United States Patent Application Publication US 2013/0096032 A1 - sequence listing, part 12

SEQ ID NO: 364 - DNA, 95824 bp, Arabidopsis thaliana
aagctttagcactcagataaaccaatcataacattgagttgctactttggtagattatttcctgtcttgaagatgtaatgttgagctttttcagtaacacactcctatgttctaaccaaatgtttgttaaaaatcctttttcttgagtggaacttccaaatctttggatatattggtaatgctcattgttttgtcctaattttctaaaaatctcgacacgagttcttaggtagtcacataaaggacaaaaagggccgaccagatagtgtcgtggtcgttggtcagaagaacgtgaaaagactgcaaaaataatcttaaaaaaagcaacaagtgcacagaatctcatgcaaatgtctctctctctcttctcaacggctatatccatccacacttattacattataaaattaattaaatgcaataatgtaacgcattatattctccaacggtccattttcccgcatttccctaacctttcctttataacgcaaaacagtttcatcttctacacttaacactttaatcctctctttctctcaatttctcactcactacttgtctttcttacattaccgagaatatggatcttgttgttatcacagagactactattccgacgaaaatcactcacgtgaacaagaaatcctccgacgaattgctccgtaagttcgccgatcctgacgacgtcgacgagtcgtcaaagtcaacgaaacgccggaagaaatcagctaagagttcttctcgagagaagggcgttgacatcgaaagtaacactagtggcttagtggagaggaaacggctcttgcttgccccggcgagtaaacggagatctctgtttatccggcagcttgcttctggaaaatcacatctcaggaacaagtctctcgtcagaaccatcggcaaggtataataattactgaatccaatttccattaattgatttgtaaatttctttatttttaaaatcatactctgctctaattggtcagacatggcgtaaaacaatggaaggagcttcaagagttttcatcgagaagcattataacagacacaggcgtctcaccaacgacgtcgtttaagctttttcaatctttttttcttttctcactattttacattcgtttgtattattctcacgtttagtgttacatctttctcgtctttttttttctttttttttttttccgttttaactcaaatcacgaaatcctttgctcttttgaccaaacatagaaatatatttaaaaaatcagatatatttgaaatctcccattacaagttttcaccaaattaaacaaagcattaaaaagaaagcataattaaagaacatgatgaccatcatgatttagaattgctaaattataaacttaaaagcatttcctgtgaacaatcgcccctccctgttcgtcatactcagctttagtaatccacatctgcatatagacatcgcaactttacattacaacacaccaaaaagagatatctatacgcacgttaaatttataaaacagttaataatattatcatatgtaccggtgcaaagctgcttagagaagccagaatggagcctccaacccaaacactatatttcctttcgggaggagccacaacttttatcttcatactaggcggtgcaagcgcattgatctctttgttcatcctatctgcaatccccgggaacatcgtcgtgccaccactcaacacaatgtttccatacaaatccttccttatatccacatcacacttcatgatcgaattgtaagtcgtctcatgaataccagaagtttccatgccaatcaaagacgtctggaaaagaacctcagggcacctgaatctctcagctcctatcgtgatcacttgaccatccggaagctcgtaggttctatcgattgccgagctcgttgtagccttctccatttcttgctcgtagtcaacagctatgtaacaaagcttctctttgatgtctcggactatctcacgctcggcggatgtggtgtatgtgtagccacgttccatcatgattttcgtcagatactcggttaggtcacggcctgctagatctagacgcaagatcgcatgcgggagtgcataaccttcgtagattggaactgtgtggctcacaccatctcctgaatccaacacaatacctaaccacgcagaaatttaacagatttaggaccattgttattaccaaaaaaaaaaatcacatttcaagattttcataaaaatcacatttatataaaaaaatatatatatttaaagattttgcatgtgaacgatattacatacctgtggtacgaccactggaatagagagagagaacggcctgaataccaatatacatactaggaaaagcaaatgactcaaacatgatctgagtcatcttttcacgattgacctttgggttaagaggagcttcagtgagaagaatagggtgttcttcaggttccaaacgcagctcattgtaaaaagtatggtgccaaatcttctccatgtcatcccaattgctaacaacaccgtgttcgattgggtatttaagtgaaagaatacctctcctggcttgagcttcgtctcccacaaaggtatccttctcatccattcctaccatcactcccctgtgtcgtggacgacccacaacgcttggaaacacagctcttggtgcatcgtctccagcgaatcccgccttcaaaatgttttaccaatcattaggatttaggtctacaatatacattgattggttgcttacgtttatatttagtatacatttttctaactcattattgcccaaccggaagtacataaaggaaaaaatcttttggtattcgtaaatgaaaacgggaaatagaaaaagttttttttttttggcgttttcagtactttgcaaaatattttattttcttaactttttgaaaaaatttaaatgtaaacgcaaagcaaatgcgtaaatagtgtttgaaacaaaggaagcattatagatttttcatcaaacaaaaaaaaagcattacagattaataaagagtgtttttagtttctccttaccttgaccattccagttccattgtcacacacgatagccacggattcgtcacctagatccgacattatctagagtatacatatcatgcatgtttcaaaaaattggttttcaaaattattatcattatataccttcaaaacgtacacaactaaataacaatcagtttcggaaaaaaacagatatcgtatacagagatcatgttaattcttatgtttaaggataaattagctcgaaatatatacctaataactacaaacggatggtgttagaaaagaaccctagttattgcaatggcaaacatcgctgcagtgacaacaaaaaaaaaatcacttaaagaatatcgttctcttacgttcaaaaattatgttcttctccttcttcttccttgtctcgtctcggcaacaagaatccttctgacaaaaatcctatcgctttgtttcgtttataaagagcatggaaaaagagacatgggtcccacactagtaggagtcaattttttcccccttccaaataagtgcaatttttcctaatcttttgaattttttcttatttttgattataaattatgtatgtaaaaagaaaaaatctaacaaaattaaaatgatatgaatgagccaactcagcgctactgcttgcatgttttggccgaccttgccctatatagtatatatactatatatgtcataatatgtatcattgtatctttataaaaactagattagctttactttattgaaaataataaaaagttaccattttaacccaaaacaatcttatactaaatgagtaagatatactttttttgaatattaatgaataacaatgcgccatgtgtaactagaaaaccatcaaccatgtatagtgtaatagtttaattagattctaatttcatataatttaacttatcaatgatttgaatttaaatagtctctaatttcatatatatgtttcttgatttatgatttcaaatttagttaaggttaattaaatggtgactcatatttaataattctaattacaaagtaaattctaactattatgattgaatcaaaccaaaataattattttaataaaatatgttaagatattaagaattaaaattggtactatagtatatgtaaccatatgtaatgtgaactgtgaaggagattgtttagaattaagagatctttttatttctgaaaatgctagtatgtagcaaatctcatagcttgacccgtagaataaagtgcagtttggaacaagtttttgaatcattttttgagaatacatatttttggttaaatttattgatcaactaaagacatattttagaaaaaagtgaaggaaaaggatttggtaaagttgtaagtataataggccaaaaacagaggataaaaaaacataggtgcttctgaaccctgtaatccttcgtcaaactcaggtcgaaagtcaatgcataatcagatcactaccatactttgatcttgttgataatatagccaagtgagacatttgtggataaacctgacaattgtctgagagagatgaaatgttgtgtgtgatgcccacgaagatgctatacggccatttctttctcgccataatggtaaagctttggcatattaggagttatgcgattacagagaactaaatggctcgttgatttgaatccaaatcggcaactgaaccacattttgactactcagagccaacgaaattttaaatatattcatagtatatattcatagttttgaccattatatcaacgccaacataattaagttatgaaaacaaaataatcagatttataaaatcccccaaaataacaatttatttaccaaaataaagactctaaattaagaagaaagcacaaagagcactcatcaccaggacgaatctcggtatacatgatatgctaacaaacttagacgcattttctgtgaacaatcgccgctccatgttcttcatattcatccttagttatccacatctgcaatatggacatcaaaaaatttagattataacaaccccaaaaaacttacactaattaactttaaaaccacattttatatcatcttatttacctggtgaaaggtgcttagagaagccaaaatggagcctccaatccaaacactacactcactttccggaggaactacaactttaactttcatactcgacggtacaagtgcatttagctctttggtcattctttctttaatcccatgtaacatcgtcgtgccaccagtcatcaaaatgttaccatacatatccctcctcgtatcaacaggacacttcaagatggaattgcgagtcgcctcgtgaataccagaagattcctttccgatcacagacggctggaaaagaacctcggggcacatgaatctctcggcttctatcgtgatctcttgaccatcgggaagcacgtaggttttatcgattgtccaaccctttgttgtcttctccatttcttgctcgtagtcgagtgctacgtaacaaagcttctctttgatgtctcggactatttcccgctcggcggatgtggtgtatgtgtagccacgttcggtcatgatttctatgaggtagtcagttaggtcacggcctccaaggtctagacgaagtataccgtgtgggagtgcgtaaccttcgtatactggaactgtgtggctcaccctctctcctaaatccaacacaacacctaaacacgtagaaacttaacatagtaattaagtcatggattgtttcacacgcaaatacgcaattcatgcatttgcgtgtattatagtgaccaaaaaagttcaacagcaaaaattcacattttagaatataacaacattcgctgtttgcatttgatgttctaacaagatccactgctaaattatgagactccaagcttataaactaacaaaatattaatttctcttaatttatgacattttggattttggttgcttacctgtggtacgaccactggaatagagataaagaacagattgcatggagacgtacatagcaggaacatcaaagctctcaaacatgatctgagtcattttctcacgattggctttagggttataaggagcttcagtgagaagtacagggtgttcttcaggatccacacgtagctcgttgtagaaagtatagtgccaaatcttctccatgtcatcccaattgttaacgataccatgctccattgggtctttaagtgtgagaatatctctgttggcatgaccttcttctcccacataagattcgttcggattcaatccatctcttggacgacccacgacacatggaaacacaacctttggtgcttcgtctccagcaaatcccgccttcaaaatgtttcaccaattaattggcacttaacaaaacgtttcacgagaaatactccagagtataggtcaaaatatggtttattttaatataaacgcataaatagtgtttagtaaaacaatcgaagccttaacgattaaccaaaaaaaaagtgtgtttctttttaacgtacctgcaccattccatgtcccttgtcacacacgataggcttcatgtcctctgatgccgaaataatctaaagtaaacatatataatgcttccacaaaaaattaagtcataaaaaagttcaaacgcagcattaacagcagaactgtaagaatcaaaatcaaatcacaaacacttggggaagaagaaaagggttcaatttgtatcacaaacttgtttctttggcttgtaatccattattgattaaaaacattatccacttttattttactaacgaaaaccgttttaacaaaaaaaatagcaaaaggtaaatcaacttggagagagatcaaagaggaacaatcgttacgaatcttactctcaaattaaggtggtgtctctctctctgtgtcttgttcttcttcttcttccttctctcgtctcgccaacaagaatgtgtttcaagatcctagtacgaccttgttaatttctcttataaagggcatgcaaagactaaaaagaggcatatgtcctacactaagtaggactctctttttttttcctacaaaagtaaatttgcattatttttactttttagccttccaaatagtgcaattctttcctaatctttgattttttttttattgataaaaactaaaacaacctaacaaaattgaaatgagaattaatgtgccaattcagcttataaagactaacataaaaactaaactagcttcaatttattgaaaaattaaaagttactcatttaactcaacaaaattatactagatgaataagacatatcttgttttgaaatcccttaattaatgatttgattttaattatcttcaaattccatatatattatgtgaaagatttaaggggatattgattaatgaactgagatttcactaattttaatttagtttttataaaataaaatagatagttgttataaaataaaataaaataaactaaaaacacgtattggagggtaactcaaattgaatgtttctcattagaactaaaattaaacattctaattaaccgattaaaaacaattaatttataacctttctagcctattaaaaatcattctaatttccaagtggtttcactctgtttgcggtgatatcaacatattcgtgaggcagagaaaataaacaagtaaatagaggaaaagtaaattgttgttaccggcggtaaatattaaaatgcccttttccgggtcagatcgactgagtcaagcccgagtcacgttacccacatcggcttttggtttcttcctttgcaaaacggcgaaaaagacacaaacttttctcctccgatctcacagagatgaacgccgccattagagcagcgattctccgaccacaaagctattcttctcagctcaaaaccgcgttttttcattcaactcctgtcttagaacgcaaacgtcgcacttcctgggaatcggtcagtactttccgtaaattttgatttttttaattgattcgccagctcaattttcgtgctttgacaattcattgggttcatagatgtcatttcgtgttgttctttaagtgggtttatcgagatagattgaaagggatcgatgaccatgttcttggcatctccttttagcttccgtagacaaaatgttgggactttagatggtttcttgtctaaattgcgacccttttactagttttagagacttagagtttgaacaggtggatggatatgtcttctgattttgggtttttacttatctgcagaaagcaaatgttcacaagaagaggttcagaagaatgagggaaaagcaagagttattgcgtaatgtcaatgcttttgctgcaaacatgtttacggtatttatttcatctatgcttatcacttttgttgttggctttcagctgttgtttctctccgctttcgaagtttcagcttcttgtagctaagcttcacaaaacacttcatgtgctcttaaataacatcttagctagttgatactgaaagttttatggttatatagtggaaggatcttgggttactgaaaggggaatgcaagtgtactgtaatgtctctgctttagtttcttctgcgtgacttagtgtatcttactgctctttctattaaggtgcattcgtttatgccatttttgggattttcatttgtaaaactctcaaagctgtggctaattatttgattccagagctggcatgatgagtttgatgacgatggtccctcatcccggaagcaaacctcgtggttcaaaaaacagtactccaaggaacccaaaggaaaccagaataacaaacacggcccctacacttggggtaaaagtaagtgaatgtcttagttctgtttctatttgacggctacactatgtaggaaaatctcttggcatgtaatttactcactgcttctacaatcaagaatttgtgtcctctttagattcttggccattaatgctaatgctataggatttgtgttattagtgggcttcaatctagttttgttgagcaactccctgattttccttaactcggactcatcccctgaaagaaagaccttgtgcttccagtactagcttacatacttatccaaattcctggctcatttgtggacttagttctttgacttctgtgctgttcctatattaagcatccacaatcaataagtgcttcgccgttgaaattgtattattgtccttttgtataatcaacgggtgctactttgtttggttacatactcatatcaaccatttgttccgttgtgtagggaattttgatttttgcgaagttgatgaggactttgatgtcgactatgtattccgaactgcttttggaggatcccgaggtttctctttttcattcactcatgaagaggatgaacctcgatggcggcatcactcttcaaggttttccaacaactctaacaggtcttggagatcgaaatatcggttagatgaagatgaagaagaagaagactatacttcagactccagtgactctgagtctgagccaaaccaagtttctcatagacaagcacttggcctgagtccctcaggtcccttaaaccttaaagatgtcaaacatgcgtaagtagtttcactgcatgtcaacacacaaaacctaacatatatctttcatcttctcaccacttaacatcaaactctcttttattttgtatatcaggtatcgaacttgtgcattaaaatggcatccagatcgtcatcaaggctctaccaaggtaagatataagatctcctcctctctgttcaatctccatgtaagtttctctttgatttctcgtgttattgaatatgtgattatatgaaaacaggaggcggctgaagcaaagttcaagctctgcagtgtggcttatcaatctttatgtgaaaagctatctgtgaactaagagttagataggtcttgattacttagagatacctcattacaataatttccgaattgtttcattttggctttgttcaagcaaaattgcctttgttctgtctttttctatttcttcaaaatctactactgatgtgtaatttatatatctcttcctcttgaaccagttaattattttcagagtgaattgacaaatatgaatcaaaatatgactgaaacaagcccaattactaattgcccaaccaggaaggcccaacgcgtgtagtgacgaaagcaagctctctgttttgtaaataatctcgttcatttatttatgaataaggacagtccttggagaccaagcaaaaattattgcgtttaaatattccatttctctgtgttttttttgttttccttttacaaaacaagaaaatcttcttttttttctcctctcttctctaatttttttttgttaattcttatgagtcaagctcgagtcacagtggtttaagacgcaatgttgtgcactctccaacaaagatgaacactgccgccgcaattaaagcagcgatttgcagaccgcaaagctattgttctctcctgaaaactgcgttttttcattctactcctgtcttagaacgcaaacgccgttcctcttcttcttcggacggtctcttcactacatgtgtgggttcatctagataatggatttctatcatttattaccaatctctagattttagagtgtgaatacatgttctgatttttttagggttttgactatttggcagaaatcaaatgctcagaagaagaagagaagcaagaaatttttgagggaacatcaagaagcagtgcgtcgtgctgttgaagaacttaaacaagaaagagaagaggtacatgactgagattatatatgatgcaaaaacatgtttaggccctatctatatcacttttgtttttggctggcctctaacaatttgcttcttgcattacctcattgccttttaagtttgaaacttgttgaggttaaagcacaaaaccatttatgtgcttttcttaatcaagtgtattgtctgtttgtttacggatcatgaaacttagtgtatctcattgctcttggtgtaactaaaattaggccgctaaaaaagccaaagaagctaaagaaaaagagaaaaccaaacgacccctgtaaaaaaagttagtgttgtttaatttaaacgttgaaaatgtctagtttaaggtgcagttttgttttgtatacatatatatatttactcttattaagaaaaagcatgtgttccattttgcagagcattccagttactgtgataacgactttgaatttatattccaaaatttattcaaagaatctcgagattcctattattcaacacatagagagaaggaacataattggtggtatcactcttcatggtcttctaattactctagcaactcttggagatcgaaatataacttctatgaaggaggagaagaaaaagatgagaaagaagaagaaaacaaagaagatggctatggttcaagaaaatccagaggctcagtgtttgagtcaattgaataccaagcctctcatagacaaacacttggtctgagtccttggggtcccttaaaactcgaagatgtcaaaaaagcgtaagttattttactccaagttcaaacacacaacacatacattcatgaccaaacgtgttgtttattttcagatatcgaacttgtgcattacaatggcatccagatcgtcatgaggaatttaacaaggtaaaccaatataagatcttcttcaatctccatttatatgtttttatctcttgtgttaatccttgactatataaactgacaggaggcagctgaagaaaagttcaagctctgcactgttgcttatcaatctttaatcgagaagttagcagtcaaataagatttttgtgtaacgcaagagagttagataggttttgattactcttataacaaagaatttcctacagaaatgtttttattatgacacctgatcaaccaatatacactacaatgtttaagcatttgctatatgtattgccctgtgattctttaatgtttgttttctctttagtttacaagtacatgtgactctataacactcactcagctctgcttttgtgtctgaaccggttaatttggtcaaattaaaccggttgttgggtcttagtgaaaccaataatgccggacctttggctaagttaaagagtcacttcattcaacaaatctcctcaaatgtcaaatttttggaacgaaatagattggccatcgagagaggagcttcattgacaaagagtcctatagccggaagtgaagaaatttccggtgcgtataatgctaaaggccgtccagatcttgggttggtcatcagggttaaccatctcacagagattgaccaagactcgcaagtcctctaccgtctctttcatctcgtcatctctcaatctctcctctgtcacttcgagctctcctcggagaatcttctctttcaagccaaccagaatgtcttcctcacttcccgggtctgacccagttgcaaattccccgactttcgtctctgttcaatcagctgtgagtctctaattctaattcatctcctagaaagatcttatctttaaggtttttggtcgcttcaatagtgtttttggttgttttattagggagatgttcgtaagataaagttctgtcaatggtgtggaggaccaaccaagcatgaaatacctgacggtgaagagaaattgagagctatttgcacacattgcggcaaaatcgcttatcagaatcctaagatggtactgtttttgatatctctatctaccaacaacctttttgttttgtgtcaatcatgagaatgtttgattaaatgtgaaattgcaggttgttggttgccttatagagcatgaaggaaaagttttactttgcaaacgtaacattcaaccttcacacggtttatggtaatatacaaatcaaaaacatttcttctctttgtctctttgagttttttctagtgttgtgtgtgaagttatgtgaatgatagatggaactttgagtatgcaggactcttcctgctggttatctagaagttggagaatcagctgcacaaggagcaatgagggaaacttgggaagaagcaggagctactgtggaagttatttcaccttttgctcaacttgatattcctcttattggccaagtaaatatatatacaaaatatccctagttttgattcttcatatgattgattcttacatggctctgtttattttggatcagacttatgttatattcttagccaaactgaagaacctgcattttgcacctggtcctgaatcattggagtgccgtctttttgcactagatgagataccgtttgattccttggctttttcatctatatatgttaccttaaatttggtaagagtatggattgagaagattctcatactctccccatttccattcactagatttctaaatttatttttgtttttttttggttttgtatttgcagtacttggaagatctgaaaaaagggaaactaaagtttcactatggtacgataaataaaaggtgcgttccaattgatatctcccgcatgtagtggttactgagatgctaatttattccacttatggtttgatgtgactattatctgctttgttctttctcaggcctggaagtagtccttcagatattcgcgcctttagtcttgattaccatctgcaaccgtaactcaaggtttgaaaatccttaccctctctacatagatgtactggattgtatgagtctagtgaagctcctcagataacgaatcctttaggagaaaatctcctttcatgatgggttatcttcatggagactttgtctttatgaaagctaatttagagctttattctccacagtttacagaagcagcttctggattggctttgttcttccatgtcgagtcttttcatttcgcaactcgatgttactaaaagaaaaggaatgatgaagttgcttatgtgagagattccttggacagatgagaaagaactcggaagaagataatttggacagagttttgttctgtatttgtggtggagaaataggtttggatgacttttaggtctctcatgtcagattttatggctgaacaatgtgtatctttatctgtttctggtttcagttgcctcaaatgtaaaaggaaaaaaatcatatgtggatgcaacatgttgatcaatctttgtgtaattaagtcaccgtgttactgttacttcaaggtcttcagtgaaagaaagataaaccaaatagataggatatatttattcaaatcagaagcacattagggaacacaagaacagagacaattcaacacatgtaaatgcataaaatcaaacaaactgaaacacaaagacacttcaaacgaaagaactgagattgaaggaaccaatcatgtttgcgagagcagaactcatatctagctcaagctgaagcttctgaagctcaagctgttgcctcaaaactggatcttccacttgctctgttattgcagctacttgttccgtctgctcagtctccaaaccctgaacaggaacagattcagcagtcggtgtctttccttcatcactcgccccacagttctcagcagaagcagccactggattgggcttattcacagcacatgaagcatgaatatgatagttacaagcataacagttgtaagaccaaaacctaccatccatagtcatattacaaagattgcaaacaagctgattcccgaaaccaaactgagtaaaagacataggaggagtactgttgtagacaagaagaagactatgcataggatgagactcatgaaccaagacctgaggcaggtgagcgcattgaacatgaaggtcaaagtcacacaaaggacaacagtaagagaaccctttacctccagtgcagccacaggctctgcagaggaaggtaccagcgctgtaagttgtgtaagggactagagtcaagtggtggagaccagcgtgagaaggatgttgcatcccacgcactgcgttaccacattgctcatgaagattgaagtcacatgttgaacagatatacgcggtttcggattcagagatggctgattcacaacctgagcagattactgaagaatctgagcttttatgtggctgaatctgttggagttttagagtgtgtggatggctgaaatgtttgtactccattgagtttgtctctttgatttagcaatcttgtgtgtttggagttttgatcacattgcatataaggtttgtctgactttgaattgttccaagtctgagttgttttgattggttacaaatttggttttcttaatgggaaattagtagtttttggatgatgatgattacataatagttgaaggaaacagcgttgaacttaagaaagtcaactacttgaggtttgaccaacgaagtcgtcgtatctcaataaactcttttgttaatttcgtaatgtcaaattatttggtgcaatcattcgatgcctaacaattatttaatcaaatcgtaacgacataaatttgatggattcactaacatcatttttctttgtgagccttttttcatttacaaaaacaaataaattgctttatctagtaggattcttctgttttcttcaaactttttgttttacaacccaataggccaacatccaagattatttgatattgtaaataatcacaaaaacaaatttgaacaaaggacattatactcatccaacatgcaagttgcagtccaaacaaaataacattaatgttgcaccaaacaagactagtgtggaaaatatggaattcaagtattcaacgttactattggcttgtgtagatatattataccatgtccatgatcgtaaaatggttaataccttgctggtttgtcaaaaattacaaaaccaaataaatcaaacaaaaagtatagggaatcattaggttagctagtaaacattattggggacagttaccttaactaacaaactttacgttaataatattggtggtttcagctaaatagtctacaatcgataatacgacagccttacctaatcaaactagtttgtttcccaccatatattttataaacaagccatcatcatcaccaaattaaagttatacccactttctagccgtcttattgtatatctttctatttatttattgaaattcgagacatataatataagctccaaaccattccatagaaagtcgtattaaatactaacatcgttcttggtataggatgatgttatatatggaggtagatgacttcaaactctaatgagaagctttagggatttcattttttttttaattttatttttttattattggttcagcatggtttcctcctttcgtaagggtacgtagttttgttttgttttgttttcttttttttgtcatacatataaaaaccttccacaaagtacacagaacaagggaacaaatctcctatctcgaccaagatcagatgttgcacaagacctgacaccaagaccaagtacgtaacagtatattctacattattgaaggtcatgatagttttggttatatcgtccgtaagtgaaaaacaatttctcgacttaggctctgtttgtttcatcatttagcattttcattcaaatgatccatttacatgattcatttaaatgatgcatttgaatgatgtttctagtatttgtttaaccatttgagatttaatctaaatgatgcatttaaatggatttttatttgtttgattattttgtagttcgtccacattttagtaggtaaaaataattttacggttttggtgaaaaaaatattttacggttttagcgggaaaacatgatattatggctttggcgggaaaacatgattttgcggttttgccaggaaaacatgatattacggttttggcgggaaaacatgattttgaagttttggcgggaaaaaatattttacggttttggcgggaaatatgatattacggttttggcggaaaaacatgattttgaagttttggcgggaaaacatgaatttacggttttggcgggaaaaaatattttacggttttggcgggaaaacatgattttgaagttttggcgagaaaacatgattttgaagttttggcgggaaaacatgattttacggttttggcgggaaaacatgattttgaagttttggccagaaaacatgattttgaagttttggcgggaaaacatggttttacggttttggcggaaaaacattattttaaagttttaacagaaaaatatgattttgcggttttgacgggaaaatgaatacaattttgacgtaaaataatagtccgtgatttcctaatttttaatttttttgggtgcaatatgtaattaaaaaaaaaaaaactttatagaaaattagtattattacaaaggttatatttgtcatttattctttttgactaaatcatctccatccaaatggtccaaccaagtccaaccaagtccatccaaatgagttttaaaaatttgcctaaatttacaaagtcattcagatggatcatcttagtgattcatccaaatggtatgttaaattgtcaaaaacaaacatcatttttcatctccatctagatgatccatctggatggagaaacaaacagggtcttaatagtaatccagatttgatagagaacatagagttttaaaaaaagaaagttacatgaatatatattaaaatccacacaattaaaactggtctttgaaaatgtgatatataaaaaccatacaattaattaaaactgtttctttttaataaagaaaatccatataattaaaactggtagtagtagaaatagtgttttaaaccgaggtaactagggtgtaactagtgttccaaataccgtaaaaaattatggttggaaactgaaacaaagtagtcctatcgtttgatttcatttattttgcaccagttgcagtgagcatcgtggagaaaaacagttcacatgattttgctaaaaaagttgaaacatcaatgaattactactattcttttacagtaagtagtaactaacttacagaagtaatagctagatagaatacaattttagttatatcttattcaatcatattctttagtccatttattcatctaagtttcaactattaaagccttggtataaacgaaaatgaaactaggaaacatccaccaatatatataagatgcagagcaaaggccaattacgtcctcgatcaatctacacatagacatgttcacacacccaatacatagagctatgcccattatcatcatgtacataaacatacacatatccatatacatgcaaatgctgatcaacagacctacttatcacatgcagcgaactgatcagcaggtgcacttatctcaccctgatcaacatcaccactagtaccaccactagtgctggtttgtccaagcaaactacttattgaacgtgcctttaccatgccaagctttactctcttcttcttcacttccaccaccaccgcctttttctcgccgccacgaccaccaccactcttgttcatgctccttacccttcctttaccgagatgatgctcacaaagagaataaccaacaagcgtttgctgacaacatctccatcctctaccgttaacacggctgcaccgtgatccttcctctaacccaccaccgctctttttcgctttctttttccctttattaatacggcctccaccgccactagcttcttcatcttcctcatcttcgtaatcctcaaagttgataaagcctcttctcttcctcaaagacacaaccttttcattcttctcgacaactatcatatatatatatatatattcatacaaacggtgaatggtgcaactaaaaaacagcttaagttcaccaaaaacatatattgatcaagcactatggtgtaccttgtattgaagagacggattctcctcggggattaacattcttgctgcgattgtttgaagcaagagaaggacaaagaatgtaatcagactttttatttaaagaaatgaaagcgatctatatatatgagtgcaagaaaaaagaacaagtaatcaataatgacaataatagagcacacacacaaggtaagggtcgatatgggaccattcgtataagagtatcccatgctaacgtgcaccgtcatgagatgtgcatgtttagatgagtattattgtgttactcttccctaactactccatgtatatatccccaaatgtttacagtgtgatgagaagaatgacgattataaaaccataagaaaattaaaggatgagatccaacctgatcattcatcttcaaaacattataattcacaaaaaaaaaaaaaaaatatgaaagttttgatcttgatctagttgcagtcagtgttggggttttcgaagcttggatctaataagaaaagaaaatttggtatattttttccaataagtaattacaccacgcaaagttatatgagagtccagagacaagagaaggaattttgatgtaagaagaaatctttatcgaattctcacatacctgcccgatgcatcagtacgactcttgacgtctacatcaccattatcatcatccttttagcaaaaacaaaacagaagagaagtaagataaacaattgaacattccattgtaataagatctgcaaatgacaagagttattctcagtggtgtaaaattgaaccaaatattcccacccaaccaaaaaagtagttttaaaaaataaagaaaaaagagagtcaagtacggtcttctgtcttcatacacgacacaacaaaaacttgcacccaaaaatccaatttgttataatccatcgataaaaacgaattggatgttttaaattggtgtctctatacgtatactaagaagcttaccaaagccttgacctcctccttcttctttatcaaatctctttgaataagccgatcagaaatctgcgacggcggcggaagcgaaagctgaagagaaccaaaatcatcaccgccgtctttataaccaccgcgaaagtatctcgcggtggccgtcggtgagcggttaaagtagagatctgatagaggaactggtaatagagacgataaaggaagaggcacttgtcgtttccggatcctcatcgagagaaagcagataaagattcttccttttgatttattctctctttcgattttgattttttgggatctttgcaccaaagaaggactgtagtataaacccagatattaaagagagagtaatctttttgatttttttggttacacgggaaaaaaataaaggggaaggctttgtggtgttgtgttcttgttgtgagctctttttattaactcttttttatctctctctatctctaactttttttgtttttgttgcacccaaaaagcaagtaagtagtagtatattgagagaggaagagctcacgtaggaatgactgatatttcaatataaagtttttattgaaaatgtgataattgataacatgtgcctgattagaattacaaaacgataaaaccattttttagatgcactgttaattttttatttacatatttggtaacaatggaaatgctaagcatctagtggtaattaagattgagtttttgaagttgtaattagataaatatgatgagtcatatatctatagagacttatatgtacatgagaacgttttacataaccatactttgtaaaatagtctcacatatgaaaagactgggggatgtaatttggtatctactcacaccagtttttgaaccatgttacacatgtataatgtgagatataaaatctaatgattcatatgtacagtttaaacaaatgtttgtatagataaaaaaaaaacagatttgaacatgaatagttaaaaacaatatagagagctaaaaaattggtaatcaacgcccatggtatataaatttcttgaaactagtatgaaatgaggtgtgatttgcgttgagtactcttattttgaatgagagaaaaaaaaaaacatgaagaagaagagaattataggagggaggcacgtggagagtggatggctcacgtgcggggaaaccgggagagaaggtaatcggtggctctcatcgttgccagcttggacgaaagagagagagggagtgggtgagcggagaagttttatccgtaggctttcatttgtgggtcctttttaaaatctcataatttcattacgacccccttatgtttcatttcttccgatttttaccctctttctttcttttctttcttcgtttattctataatttctaatacatcacctcatataatacgaatataagcatatgatgtgtcttttttttatcatatcatatctttttttgaagtattaagacaaaagttagcaaataataataataaagaaaagaggaacgacaatgttgcacttgcactctccattgaaataggtgggaatgggctggcatgtcacattaagccaaaacgggtattagttttttcttcatctttttgttatcgtgtaggcgtaggatagagatgatccagcttaatgtgttaacgtgcaccttcttcagtcacatacttttcaattcatgaatgttttttttttttcgatgaatgtgtttgttgttagaatcgtctattgtgaatttttgtttatgaattatgagtaatatggttggttgtgatttcgttcatggaaccgttcgatatccaaatgttacaaagaaatttattctttactcatatatcataaatcataaatcattattttataatatgctagtgtactatagagtatatagtctattgtttattagtcgagaaaattatttttttagaaaccaacgggtaagtgctggtgtgtatctcaccaagaaataaatgttttgtattttttaatgcaaaatttgtatcatctttttttttgtattggttagagctataaaaaataaaatatggatactatattgtgttgcaatttttttaaaaatatgtgtgaatagtgtaaacacctaacattatgaagttcaaggaatataaattaagagatcgatatattatattaatgttggttatcaaacttcacattcataaaaaagttgttatgcataacaataaccatgatactatttgttatttttagtcaatgaataattttagtcttatgtaaagttataaagtttgataattgcatttaatgaattatctttatctttattcaactttaaccaataataaattaattacattttaccaaatcaatataaatagatgagatttattaaaaaaagaaaactaggtaagaaagtaaactaatcctgaccgtccggtcagagggaaggtaatcatcgccgtggaatatagacgtcacgtcaatagtgtacaccggagcacagaggatcgtgccttctctccctctctgattaaaagtatagagagcctccgattgaaaagatttgatcggtgaaaatttccattcgacgaatcggagttccaaaagctcgctgacgagttctcaatagtaacctctccggcgcttatcgtgaaaaaccctatgttccagacttctcttacgctttccttgcaaaatctgcctcaattttggattgaagacaagagcttgaggctttttctccaatcttaattgaaactttggggtttttctcacggggattttgcgaattagggtttcggattggggattttgttacatcgaaaggactttggagattcagcgttgggctcggtaattgaagaatgcagaattcataaacaccgctctggaattttactttttaggtaatctctcgttttcttctgctgagtttaaatttgttcaattatattatccattgacagtggttattgaaatggttgagtttagtggtataaaaatccgccattgatttgttttttagttttagcgtcttctttatccatatgtttatggttttgtgtgtgaaacttgtttggttctatgtcatgcttcattcttctagtctttaatataagataaggtttgattatggtttcttttcaagcaggataacaaaggagggtcattttatctgttaattgatgggtgaagagatatctagcactgtgaacctggatttgaatctgggtcctgatcctgagttaggtctcgagccagcgacgaattatgctcggtctgattggggtaatggacttgctgctagggaatccgaatctctgagaaggtttagaagtcggtaccggtcacgtttcagacggattgatatgcttccggttcttgctgagacacatagcccggcgatggaattgagtcagttgttgatcacttctggaaatgtagttgctttgcctgctggtgagggaagcatggctagtggagaaagggtcatcgaggactccaaaaagtgcgagaatgggagcaaagtgatggcagaagacaatgtaacagaggagaaaagagatgttgagaagagcgttggcagcgatgggagctttttcgattgttatatatgtttggatttgtccaaggatccagttgttactaattgtggccacctttactgttggtcttgcctttaccagtggctacaggtttcagaggcaaaagaatgcccggtttgtaaaggggaggtatctgtgaaaacagtgactccaatctatggacgtgggatacagaaaagagaatctgaggaggtttcaaacaccaagatcccttcgagaccccaagcacgacgcacagagagtttgaggactacacttaacaggtcaggtcatataccaacggaaatatttagacatttgcaggataggcttgaaagggaatctagtacaggagaaagacgcgccagaccatctcttaaccggtttatgacttcgaggggagttagagcagaggagaaccagtctagtgaagcactggttgaaccttcatcagatgagattaacgatattgatctgatcttaaataatgcccctgaaaatgaagaggaaaacgaaaacctaagctcgtcacgtgctttggcaacccagagacgatgggcacagatgtatgggagggtgtcgtcgtttactttgagctctgctgaaagattagcggatacttatttgataacacatgcattggggaggaaccaagaacaaaacagcagtcctcctgttggtgttgaagacagggattcgttctcaagcatagtaggtgtgataaactcggagagtcaagttgaaacggcggctgagattaattcaatgttgactgtatcgacttcttcgtctgttagaagacatgagaacagttcaagggtctctgatgttgacagtgcagattctcgtccactgaggagaagaaggagattagcttagaagagaatggaggagaagaaagaggaagctagagtaataatctgtagtagaaagcagtgattttattggttttttcagtttgttttttatatgggattttggatttttgttgtttcagtttttatgctaaaagactaataaataaatacatcaataggatatatggttttttcaattcttttgatctggtgaatgaattcggttgttggcagttgttgacttgttgcggcagagttttgacttgtgatagaatataaaagtttttgttgttgactggacaaaacgtcgctttggccgagtggttaaggcgtttgcctgctaagtaaatggggtttccccgcgagagttcgaatctctcaggcgacgaattctattttacatttttatcgacgcggggtttgtaaattgtaaccaacctgtgtccctctgttcatgcaggagctagatagccaattgaagatagaagcaaaacgtaaatttttttataaatagattgaaaaatctgatctaaaaagtttgttaatcaaaatactatctgaaatctagtaagaataaatatttgaaggttgaataagggaaaaaatgagcaaaaaaggaaacgaacttggtgaatctggaacaaacgtcaataacttgtcctacctccttgtttaatttcctatcttggtaaatccgcgtttctttgattaatagaaatccgcgtttctcttcttttccaatttcttcattgattcttcttctcgtgtcgatcaatacaataccaagccaaaatctccataactccacgcttgcaaatttcttcccaggtagattcctccctctccctctctttgatttttcttcatatttgggtgttttatttgttctcaatcgggaaaatccacgagctaaggaattgatatatattttggtttgtgttctatctttctgatctaaatcgcaagacgaatattgtgacgattcttatgatttgcgagtaatactacttgttgattggtgattgatcttgcttttgctttgaatctctctgcagaggaaataaactctctagatcagtagcttatatgcgttactgataatggataatcacggtcctcgttatccatacccttacggtcagtacccatacccttacccatacccagctccttatagacctcccagttcagagccatacccacctcctccaaccaatcaatacagtgctccttattacccttacccaccacctccatacgcaacaccaccaccatatgcatcaccaccaccgcctcatcagcacacttcgggttcgcattctggaccattagactatagccacaacccacaaccatcatctctcgcggctgctcctccagagtatcacagacattcttttgactaccaaccttctccttacccttatcagccccaaggtaactttggtgcttatggtcctccgcctcctcactattcgtatcaagagccagctcaataccctccacctgaaactaaaccgcaagagcctctgcctcctccgcagcaaactcaaggttttcaagaatatcgtaggcaagattgtctcagtaccgggggaacaggtcatgataatgtaagcaattctggatcttcttatcctcctgtggatgaacttctaggtggtctgcatatttctactaaccaaccaggtccctcagttccacaactatcctcccttccttcgaactcttggcaaagccgccctggggacttgtatggttaccctaacagctcgtttccaagtaactctcatttgccacagttagggagagtagattcctcaagttcttattatgcatctaccgaatcgccacatagtgcggatatgcagatgacactgtttggtaaagggtcgttgaaggtcctgttgttgcatgggaatttggatatttggatctatcatgctaaaaatctccctaacatggatatgttccataagacactgggtgatatgtttggaagattgccagggaaaattgaagggcagcttactagtaagattaccagtgatccttatgtttctgtatcagttgctggtgctgtgattggaagaacgtatgtcatgagtaacagcgaaaatcctgtttggatgcaacatttttatgttcctgttgctcatcatgctgcagaagttcattttgttgttaaagacagtgatgttgtgggttcacagcttattggattggttacaatcccggtggagcagatatactcaggtgccaagatcgaaggaacttatccgattctaaacagtaatgggaagccttgtaaaccaggggcaaacttatcattatcgattcagtatactcctatggacaaactcagcgtttatcatcatggagttggggcaggtcctgattaccaaggggtacctggaacatattttcctcttagaaaaggcggaactgtgagattgtatcaagatgcacatgtcccagaagggatgctccctggtataagactggacaatggaatgtcttatgaacatgggaagtgttggcatgatatgtttgatgccatacgtcaggcgcggcgtttgatttatatcacaggttggtcagtgtggcacaaagttaagttgattcgtgataaattaggtcctgcatccgaatgtactcttggggagcttctaagatcaaagtcccaagaaggagtgagagtcctccttttgatatgggatgacccaacttcacgtagcattttgggttataaaacagtaagtacacacacccttgactgtcctttcttttcgtttctattttttttatatcttctgatttgtatatcgtatctatttaatatttagtgtgtgcaagtcggaatatatttagattttcatgaaatgatagctttggtaatttagtattacattggaaaagcctgattcatgttgtaactacaacttcattttgagatatgtaccttatctatttggtatggcttgtcatctctcatattaattttaacttttgactcaacttctcaacttgaacaggatggggttatggcaacccatgatgaggaaacacgccgtttttttaagcattcctcagttcaagtcctgctttgcccccgaaatgctggaaagcgacatagttgggtcaagcagagggtagagtaccactttcttttccctttatatttatacgaaactaggaatcgagcttctaatttaatttttgtctaccaggaagttgggacaatctatacacatcatcaaaaaaacgtaatagtagatgctgatgctggtggtaacagaaggaaaatcatagcttttgtcggtgggcttgatctatgtgatggccgatatgacactcctcagcatccgttgttcaggacactacagacaattcataaagatgattttcacaaccccacttttacggtacagtttcttaatgtcaactttctgtttacaatcttgcgtagctttcttggcaattacttagcaagctattaccttgaacagtagctaggagcctatattatggaaatatgatatttaacttgttcaaatggtattgtttgacagttatctttagtctttgttctggcttcatttgtttttttctaaaagagtatgcaaagaatttgctaatttctaatcaattcaatagatagcatcctgtgtcatataaaatcagatagctgaattttggtcgagatcttgtattccaaagttatttcagttttttgtttgtcttttcacaatcttgcatagctcccctggttgattttgtcatttgtatccatcaagaattcttgagctcttacttaaataatgatctggtacccaatctttttattctgaataggattgtgtactgaaacaaatgttattatttcaacagggaaatctttcaggatgtccaagagaaccgtggcatgacttacacagtaagattgatggcccggctgcatatgatgttctgaccaacttcgaagagagatggttgaaggctgcaaagcctagcgggatcaagaagtttaagacttcctatgacgatgcgttgttaaggattgataggattccagatatattaggagtttctgatactcctactgttagtgagaacgatcctgaggcttggcatgttcaggtatgaacatcaaaactgttactgaatgaccggagaggttgagtattttatgaagccatgatttatcaggtgcaagctaagctgatgtttttctggtttgatacagattttccgttcaatcgattcaaactctgtgaaaggtttcccaaaggatccaaaagatgctacatgcaaggtgacaaaaaatgaaaggaatctttagctatcattatgtttgggtgtctaaaacatgtcagaaaactaatccacgaaaggtttttgttttggatagaacttggtgtgtgggaagaacgtgctgattgatatgagcatacacacagcgtatgtcaaagccattcgtgcagcccaacacttcatctatattgagaatcagtatttcattgggtcttcatacaactggaatgcgcataaggacataggtttggtcatatgtctctgcttgttaatttcaagaatttaagaaacttaagtttgttcctatagttaaacttaaggatgaagacatcaggagtttttttctatatatcttgaactgtgtcacatgttatgacatctatgaaattattcttgaccacgacctcctacttcttcactttatgctagctttaggatgtcagtctccgatttttttatttggcattcgatgcgagttgctttggctcttaacattgctataaaacgttggtgtgtaggtgcgaataatttgattcctatggaaattgcgttgaagatagctgaaaagatcagggcgaatgaacggtttgctgcttatattgtcattccaatgtggccggaaggtgttccaaccggcgctgctacccagaggattctttattggcaggtatgtctgagttaaaacttatgggttgttgtcttagccaaaatcttccttccgtttctcaaatcaaaatcacaaaactaaagtagagactagtagagataatattgatttcaatgttcatagatcaccaatatggttgaacgattttttggaagtaagatatatgcatgtaagattcatgtttcttacatgagttctgtctgggtatatggagattatgaaactgatagtcagtgttatcatcgttgcagcacaagacaatacagatgatgtatgagacaatctacaaggcgttagtggagacagggcttgaaggagcattctccccacaagattatctcaatttcttctgtcttgggaacagagaaatggtggatggaatagataactcaggaaccgggagtccaagcaatgcaaacactcctcaggtaactaaacgccgagaatgcctgctgcttaaatttctcatgtttttgaaacgaggagtcccggtggtgttgcaggcgttgagtcggaaaagcagaagatttatggtctatgttcactcgaaagggatggtagttgatgatgaatacgtagtaattggatctgcaaacataaaccaacgatcaatggaaggcacaagagatacagagattgcaatgggagcttaccagcctcaacatacatgggcaaggaaacattctggtcctcgtggtcaggtaaatcccgcaaaccatgcaaagacaaaaccaattacgaggtcagattccggttctagagtttggatcattggtttttttcttgtttcctctgcagatctatggatacagaatgtcgctttgggcagagcatatggcaacattagatgactgtttcacacagccagagagtatagagtgtgtaaggaaagtgagaacaatgggagagaggaactggaaacagtttgcagctgaagaagtctcagacatgagaggacatttattaaagtatccagtggaagttgatcgaaaaggaaaagtccgaccacttcccgggagtgagacgttcccggacgtcggaggtaacattgtcggatcattcatagccatacaagagaatctaaccatttgataataaggaaggatccagtggcacacttttgacattttttttgtgtggatattatatcttgagagttgataataagagggtgggagatttgattaatttgataaacttttcacattattaatcgtgtataaagtggtggcttataaaaatgaataaagttgttaatagtttggctgatatattatcactctaaattttcctaccatgtttgtttgtgttcctcaagtattcgtataatacgatgcaacatgtacatcgtaatgcattccacaataagccacaatctcatcttaatagcaaaaatgatggaaaggtttggccttttaatagcattccaaggagtaatagagagcaaatgccgcaggatcgtctatcttcactctggctatcttagatctccgattgcattgaatttttttgatctccagagcccatctctaatcaggtatagagatgggtttggaggaacaaggaagggcgagagaagacacacctcttcttggtaaaggaagaccattgtcgagcaagttcaagactttcgctaatgtcttcattgctatcgttggtgctggtgtccttggtcttccttacgccttcaaacgaaccggatggctcatgggtttgcttacgctcttttccgtcgctgctttgatcaaccattgcatgatgcttcttgttcatatccgtcgcaagcttggtgtctccaatatcggatcttttggggaccttggtttcgctgcctgcggcaatctcgggaggttcgtcgtcgacattcttattattttgtctcaggctgggttttgtgttggataccttatcttcatcggtaatactttagctaatctctctaagccaaccaagagtacgactttgatgagtctgaggcatttaatgggtgtgtctcctaagagtctctacatatggggatgttttccgtttcagctgggtttgaattctattaagacactcactcacttggctcctctgagcatatttgctgatgtggtcgatttgggtgcaatggcggtggtgattgtggaggacatcaagattacggtggtgcaaaggcctcaagttgtcgcctttggtggcatgtctgtgttcttctatggtatgggagtggctgtttacgcctttgaaggggttggaatggttttgcctcttgaatccgagactaaggataaggacaagtttggcaaagtgttggcactcagcatgctattcattgcagtgatgtatggatcttttggtgtgttaggctacatggcttttggggatgatacaatggatataatcacagctaacttaggggcaggagtggtgagcagtcttgtgcagctggggctctgtatcaaccttttcttcacctttcccttgatgatgaaccctgtgtttgagattgtggagagacgtttctggagtggaatgtactgcgtctggctcagatggctgctcgtcttggcagtgactttggtggctctcttggtgccaaactttgctgattttttgtcattggttggcagcagcgtctgttgtgcgttgggctttgtgttgccttctttgtttcatctgatggtcttcaaagacgaaatggagtggaagcaacgagctttagacgtggggatcctgctgctgggtgtcattcttggtgtctcaggtacttggagttctctgactgagatcttccaagagtaggtaggtgaaagaaattggacacattgtttcttttgttggaattaaggggaatgttataggccgttgcagcaacctttgtatgcaacacctccatgtgtcatctcctaaagtcaagaaaacattaaaaaaacaaggaaactagcaaaatgagaacaaacttgtaccaattttcagatgttcagaaaatattcaactcacttcggctgctattctttgaatccagttttcagttataagctttaacctatgtaataaatggctccacaacaaaatgcaaaacgaaatattcatagtatctcaaaatagttttttttggtgacttctaaaatcacacaactttcagaagaagaataacgaaacataaattatagaggaggagcatcactactattttcattttttcagccaatcacagcgctcctctgtacgcccactcgcacctacttcacgtcacgcgctcaattctatacccattcgcaccaacttcgcgttgagcgcgtgtcatcaatttctgtaggggtaaacccacaaaatcatgcctatttctattctactcgctttgattccaaaagaggctcgcgtgatcccaaaacctttttttcttttgttttttctgaaaaccatattaattctaatgcaaaccaaacccaaatcaattttcatttcaaaaccatgtaaaccgaaccgaaatcataacaccaaaaagacaacctagcaatatactcatatatcgtcaatttcactattaatccaacgagccagtttattgcgatgacgtttctaatgcttcctaatgacatgcttttaactatttagcccgcgtcttgattgtagtatcctactctttccttagtttccaagagattccgcgctatccttgcttctcttgagctttacgaaacccgaactctcttaggctgccccgagagtcgtctttatgtatatttgagtttccttcatgactctaattaccgatcatgtctgttcactctctgccggagaccgagtcgactcactgttggtaagttggtaaccctaaccctagatggttcacgtcatgctttagaccatgtaaactcctaacaaagataaagtcagatgagaacaatcttttggtttcagacccaactcgtaattttccttatatgagttggtcggatccggatctaaccacacttcgttacatacttacacccccaagttaggattaatggatgcacttgacttgggggaattttttctactttcaatgaaagcaagtgtcaacgtgttggaatgttgttatgttaaaagtaataaccattgagcatgtgtcaagtgttttgattctgtatccctggaacaagcacgctcttgttgggcttgataatatttttcaactagaaaatttattgataaaccaaacaacgactcttgggatgatgttgttggttacgtagcacgtttgaattcaggatgctttgtcacgactgaggtaagaggagaaggagccacatggtacatagtacttaccacgtatccttttgcactgcccagtgtctatatatatctgaatgtggcagagggactttaagattgaaaacgaaaatggcagatacaggcaaaggaagctctgtcgctggctgcaacgatagctgtggctgcccttctccctgtcccggtgggaattcctgcaggttggtcctttattatatgctctagggtttgatgtgttgggattctaaaacgtggtttccaatccatgtaggtgcaggatgagagaagcatctgctggggatcaagggcacatggtgtgcccgtgtggggagcactgcggatgcaacccctgcaactgccccaagacccaaacccaaacctccgccaagggctgcacctgtggtgagggttgcacatgcgcctcttgcgccacttagacatccttatctctgtctgtaccacactttgtataatagtactagctagtcagatctgaaaaataaatctgtttattaggtccaggtacaagaaaacatatgtttcgtatgctctgctctcgtcttatgactcatcaagaatctgaaaatcctgaaggtcttggactaatacaatccactaactgagtctcctaaaactgatagccagtgaacacaaggagataaatctttgaatactgaatgagtaacaacatcgagatggtctgtacaatctggcatgttttagggaacacctccaacgctttaccagcttaacaccaaaagggaacaatgaatgtgttcatcaaagaaatttcatcgtcttttcactttaccggactttaaaagaaacgttcaacaattgcataaaatgaaaacagaagaaagtcattcatggtttcaaaaattgtatataatgcaatggggactacaaattgcttgctgtgtaacagagaactcacctcctattctaagttgggtagtatggttttccatctgcaaaggctccaactatagactggtaggacaagccattatgtctttctgtaactaatagactggtacagagttctaaattactattacagtaaggcctgagactttcttgatggattggcctttctgaaactctatgcatagcgtctgaatagattatatttggtttaagggactttgtttttctagtaatattttggctcttgaaggctaataaagcggtgtcatctatatatgtgatcacttatttgactgtggcatgtagaaatgttgatgttgtacttgatggattaaaatatttgatggcaaaagatacaagaacacacatccacacacgtgtaatcagtgttaaggaatacaggagcggagaagagagatggattttgggagatggttggcgtcgagagtgaatgagcagatgatccttgtatagaacttggaggtgacgagtcttcccaaaatgtaagcttttgaatggaggacgatagtgagattaagcggcagggagagtgtatcaagatggaaagaaacaccaccgtagaggggaatctgatggccttgcaccaccgtcactacgttcgtttcgccatttctaccaaccgtgaacttgttcatctcaccggaggatagtaggaggttggagtagtgaaggagaagaggagaagcagtgacgtggacggcaaagaaagttgatgggttacggtaatatatcctgaccgtcgaattaagagacaacatgtccgtaggcactccgctaagatcgttccctgcctgcaagttcaagtccctcaccagcatcccctgcacagtgcaacaacaacaacacattttcagtctgacacctaatcacattccaaacacatttgtctcaaatatatatttttgtcttcttcactagaaaacaaattatattattatattcatagttggcttttctccaaagttgtttcttttaaggaaaaaaaaacagaacactcgtccactacacgagttaactcagctcagagcagagtcaccaccaagtgaaagtagttattacctttacagtaactttgggagggtaggatttgctagcaccccagagtataagagagaagactgtgaacaagaagattacggagaggagcaaccaaacgtagagtcgcacattccgaaacgggtcgtcgtcatctccgccgtcagttttgtcgtctccgtcgttgatgtatcggcgacgttcacggatggacttgtaagagaggagagcacggtcagagaagcgagaggtggatgactcacgggagtgatggattggtgagcaatggtagtaatgtggatgtgtaggtgaacccattaggctgcaaccagaaccaaatgacatcttctccacgtcatggtttgatggactctgtacatagtaaagaggtctaatcgctgaacgcggcggagacaaagccgctgcgtcgatgcttgttgcctccgagtctgtcttcgcatgcatgtctcttgactctttctcctttgttttaagacgagtaatggaagaggaagcagaagcagcaataaaacagagatggtagctcctagtggcgtgtttggttcttttctttgcccaccaccacgtatctaaacacaaacgcttctttggatttgggagagtgtgtaataaaagcgaaaacccataaatctttttaagcaagttggtcccattgttggtggttcttactcacgcgattacacgcgtggctaaaacacagagtttagagatggaggaaggtgagtttgacgttcaggagttagcgcgtggggatatgagacagtcaactgtggtgacagagttacccagaatgtctttgaagatttgaaaaactctttcttcaataaatagaaggaattagattttttgcatttattgttttctttactttgctctgtttggtacttggtaggtaactacaagcccattcacattacctcttccttatgtaatcgatagtgacccaatgtaacattttccgatttttactatagtatatgcaaaagtttcagaacttaaaatttttccaattttaacaaatcacatttccatgaggctctgcaggccattgaaggtgtgagagtatcattttacaactctcttccctattgattgatcataatgatgtggccttgtccaacttgtaagaaactttcaatgctcagataatgatcttatctttgagctcatacacaaacactgcataggatacaatcatacaacaagactcagcttgacttccaaatgtgtctggccctggatcagttggaccaatttatgggccttgtatgccattctgaaggtggcaactggatccagtgtaagcatatttgctgcttgccgaggcatagtctgattgttcatacttcatagccatacaagagaatcatttgatacataactatttataataagtaaggttgacatttttttgtttgtttgtgtggattattatatcttgagagttgagaattacatcaatcaaaaatgaagatttttattgtaaactcgaattgatggacaataatgaaacaaagaaaaaattaacaatacatttgacaaattgtgagatgaggacacctttttcgttattttgttgttaagacaccacctacatttattttgatgaattgacccctaaagaatacttttggacgacatttgtctatttagaaaaacaaaagggaccaaaaagtaagaaaaacgaaattgggtgaaattcaaattgaaaagctgtaataaaaacagagcaccattaatggctttcatcgataccaacaacaagacacgacacaactatctcctccctctccctgccgtcttaattcgtttcttcttcttcctaattcaaagcccatttcttcttcaatctcttattaattgatattttcgtcttcctcaatcctcatgtgaatctgaaagtaaaacctcgataactcgaacgccaccgcctgcaaatttctccctgggtaattatctctctctctctctttattgttcaaatttgggttttttctttaatgggttcttaaatcagaatcgagaaaaaaacacgagcttaggaattaagaactaggtttttggttctgtgtttttatttttcgttcaggggtgcttattgtgacgaatctggccaagtcttttaggaatgagttatgttcctcttgtcaattgtctttgaattgcttagtttatggattcgttaactatttcatgtaatcggaaataacttttgtcgctgatgaggtgattttgaataattttgtgggtacaaagtttttgaaaattgagttcagcttcaatttgttttcataattcaaaatttgctacttgttttaaattttttgagtttttttcctccatttttatgagatcttgagtttgaacttacctgatgtttgtttgttctacttgttgtgttttcctgttgaatcaatttctcttttgtatagtttacattgaaaagttatgtcttgcaaaataaaaacagatcgtttcatttgacagctctatttttgatgtttgaatagcctgtgattgttatattataaccatttaaaatattggaacttgtaaggttttagcattgttcatagatgaactgtttctccttgaattaaaaagtctgacttgttacataactgttttactccgctagcatttagaaaggattgtgaagaatcgagggacctgagacgcaacaggctcgtggaaagaaagatgtgttggcaactttcagttgattgggaatgaacttagtcacattaattcacaagactatccttttttcctaacgaagtggctgctacgttttatatgcttggaccgcaacggtataagactggatttgcagtatggtgtactgctaagagatcattggtccctttttccggaaagaaagaaaagaacttgatcaagtgcaccacgtatctacttcctaacctactttgctccagttttttaactaacatgttacctgcttgcttattgataacatttccttaaatgttgtatatttagccatcatttgtttttcttgcagaagaacgaagttccaaaggaatatatcatcgaaaggagtacatcatctgcaacaagagaggactagggattttcacttacttgctgttagaaataaaacaagttttggctaggtttggactctctatggctcctggtggcagtgcattgaaagaagctctagaatctaactcgacaggcgtagattatgaggttaagatggcaaaggttgaggctaatagcaaaccaacaaaatcaggtagtggctccattggaaaattccattcgagcaatggtgtttatgagctccttgaatgtccggtttgtacaaatttaatgtatcctccaattcatcaggtttgttgcttttctttcttacgtcctgatctgtaaaatatggttcattcttgagtttcgttcttcgtttatttcatgttgacatctatgtttgttaatttcccatagtgcccgaacggccacacattgtgttcaagctgcaaactgagagtgcagaacacatgccctacatgccgctatgagcttggtaacataagatgcttggctcttgagaaggttgcggaatcattggaagttccatgccggtaccaaaatttagggtgtcaggacattttcccatactacagcaagctcaagcacgagcagcattgcaggtttcgatcctacagctgtccttatgctggttctgagtgttcagtgacgggtgatattccaacgcttgttgaccatctcaaagatgatcataaagttgacatgcatgatgggtgcactttcaaccatcgttatgtgaagtcaaatccgcatgaggtcgagaatgctacatggatgcttacggtaattttgatagttatgcattcccttatagctaaatagtcattgttaatatgtatttgatgttacctttcacatatgtatttttctctaaggcattttattccatgtataagaaaaggaactgacaatttcactacttgaattgaatcctgttttcatctgatgctgtttaggtcttcaactgtttcggaagacagttctgcttacactttgaggcgtttcagctcgggatggcaccagtgtacatggcgtttctaaggtttatgggagacgagaacgaggctaagaagttcagttacagcttggaagttggagctcacagtcgtaaactaacatggcaagggatcccaagaagcatcagagacagtcacaggaaagtccgagatagtcaagacggactcataatccctagaaacttggctttgtacttctctggcagtgacaaagaagagctcaagttgcgagtcactggacggatttggaaagaagaataaagctaatgatgatgatgatgatgatgatgatgattatgattcatgatgccaatgcaaaatgggatataaggagagaagaaagagaaataagagttgattaaattcaaacggatgatgtacataacagccttgagagagtttcttgatcatatgggatgagttgaaattcgaaattttttcttcaactttgtttttttcagtaactatgagatgaaaatcatcccatgatcggttgaaatattttgtggtttgcaatgttactatctctatcttgtaatcttggttttgttggaaaaaatgaagacgatctattttgttctattcttcgaccaaatggttacttttttctaaggttcagatgcatatatatatatgcatgtgcatgagttaatcatacagaatgattcatcatgtattatcctgaacaaaggttaattttcaaggataatgaaactaaccttgatgaatgtttggatttaagagattattcaattgtcaaagatgattgtctacgtaccaaaactgataaattatgaaattcaaccaaatgatgagacagaatttagacagttgaatgaatgattacaaagataaattagaagtatggttgaagaggtcgtgcaagacgtgaagacaacttaacatgtttttttttcctacgttggttatattaaattagtaacaaaattataagcgaatgtgtttttattgtttcccgactttatcgcggaacagagaaacagagagactttcaataattctaagaaaattaatttccttttttctcaaactatctttttccagatttctaaacattttcaggctcgtttgatcttttttttcccgacatttattcaaacttttcagaaacagatccttcctttgtgattttctgaagtatttactctcatcatcattttcttgggttgattcaatggcagaatcaaggtaacaatcattcatttcttcgatcttcttttaccctcttaacgattctcgaaatatgatcggaaagcttttctgcaaattgttgtttcaatatcgaaatttctctccataagcatggtaaaatatgaatgttaatacacatttttttatatgtttttaacaggtaaaaacagagattggctgaaacagaatcggaacataagaataagacaaaacccgtgttggcaaaagatctgaagatatgttttgttgcggtggtgcggatgaggaacccgccggtccgcccgcaaaccagtatgcagcccctcctaacaaagccggaaatcccaattttggcggtaaattccctaatcttcctcaaccgttccttgtacgtttatgttctgagtttcaccatgagcgtttgcgtttttgcatttctgcgtgtgtgaataggtgggaatagaggggaaccgaggaatccgaatgcaccgagatcaggagctcctgcaaaggttttgcccatagagatcccttctgttgcattggatgagttgaacagaatggcgggtaacttcggaaacaaggcactgatcggtgaaggttcttatggacgtgtcttctgcggcaagtttaaaggagaagctgttgctatcaagaaacttgatgctagttcttctgaagaacctgactcagatttcacctcacaggtacacacatacatattacaataacgattatcttctcttcaaactataatttgttcaagcttcttctcttcaagctataatttgttcaagcttcttctcttcaagctgtttagattaaactactgttattttctaatctaattaatttctattcaaaatggctaagttatcggtggtatcgcggctcaaacacgaccattttgtggagttgctggggtactgcttggaggcaaataatcgcattctcatttaccagtttgcaactaaaggttctttacatgatgtattacacggtacgtaaattttaactctcactactcatattttagtatatggtacatgaaatatatatggaccaattgaatctttagggagaaagggagtgcaaggggctgagccaggaccggtgctgaactggaaccaaagggtaaagattgcatatggagcagccaaagggcttgagttccttcacgagaaggtccagccaccaatagtccatagggacgtgaggtcgagcaatgtcttgttgtttgatgactttgtggccaaaatggctgatttcaacttgaccaatgcttcctccgataccgcggctaggcttcattctactcgtgttttgggaacattcggctaccacgctccagagtattataccataaacccgttaattcatttgtttaaaacaacctgatagttcttgataacgtaagagttttgttgtcttaggtatgcaatgacaggacagataacgcagaagagtgatgtgtatagttttggtgttgtgctattggagctcttgacaggaagaaaacccgtagatcataccatgcctaaaggccaacaaagtcttgttacttgggtacgtacacaaattaaagcaaacattttggaatgactccatatatatcatcattataagtccccttttaataacctttgtattgttgttacaggcaacaccgagactaagtgaagacaaagtgaaacaatgcatagatcctaagcttaacaatgactttcctcccaaagcagtcgccaaggtccgttcttcattttcttcttcaaatatcaaacgatatcttcatttactttgcttggttaaagatattttgatattagatgcatctagatatcatattttgaaaactagggacatatgattatttggtttagctttgtaattttgaaaagtttctttgcgtatggtcgaacagttggcagccgtggcggccttgtgtgttcagtatgaggcagatttccgaccaaacatgaccatcgttgtcaaggcacttcagcctcttctaaactctaaaccggccggtcctgagtctacgtcctaaactaaacaatataccatttctcttgtttttgttcatgttgttgttattatggctattttctccctcttttctgttccaagaactatgattattggttgtaagatgttgttatttaagcgaatgtaacttatatttttcatttggtttaacacccctttcgttttttattgtatctaagccttaaatccaagtttgctctcacaattttgaggagtcaacgcaagcaatagcaaattagttgtgagatttaaataataaaaaaaagtaaatatattaaccattaaagactttcaaattttttactattctcaataaaagatttagagatttatgtagattgtattatacctctagtttcttataagatgtttatttgatttccatctttctttaaggtaagtatccattataagacaactgccaaaacttagacatctttctatattcgttcatctgattccaatctttcttattttgttaccaaattgtacacatttcaatattttggggggctcatctttatttttattcaattcagtaaccaaaactagaagttctttctatcatatgcctatcagataaaaagtccttaaatttaaaactagaagttcgtttttttcatactaacaatatatatcaaataaataaaaaacttaataaagtcataaatttaaaatgtgaagaaaccaatactataataatttattatttatcgtcaattagttttgaattcggaactcgttacccttcatttgataaaataatttatatagtgaattaatattttacaaaatgaaatttagtataagtttccatggtcatatatctcaaatcattgagtaaaaaaacaagagtgatgacaaattacaacataatgacgacacccacacatgaagctgaagtcccaaaaacaaaccagtaaaccacatttcaccaccacgattcaaaatatataaaaaaatatggaaaaaatgatttttcttaattggtccatttgatgaaaaaagaaagacatttggatttttgctataaaaatgaaatcagcggcattaaaaataataataaaaaaatgggatggtttttaccagaaaatctcaagaaagtcacgtactgtaacagtaaagcacattttaggtttatttttttattttatttttaacttttttaacaacacgtcgcctcttttatacacagcgtctctctctctctctcctcaatataacatacttagctgcgaatctcgtcgtcatcgccccgacgaaccctgtttcgcgtctctttcccaatcccaatccaatttcgattccttcatttcaggattcgtatagccgtaaatccgttattgggttcttccgattatccaccgatagatctcgatcgaacgtttttctccgattggatttttgggtgatttcgccggaattcataatcagacgggaggagtcgcttctcttctcttgagtaatttagtccctttttgtgttatggaatcaattggttgatgaacaaatacaagtgtaaaacgatgccgggtttaacaacacacatgaatgagcattactcttcttctgggttttggtctgaggacgacgatggacttacctacgatcagttggaccaggttcttctcttcttcccttttttcttatcttagattccttgattacttagctcagatttgatcgttgccttaatgtctgttttaggttaatctgattgctttgctttagtgatattggatcttaggttatatctcttctgtgtctaattcatggttttaaatttctttactctgggatgttcatgatgctctattaaaccgtgtatgcgttcacattttcttataattttgatccatttttgtgagctagctcaaacttgagaccaatttatttttgaaataatgatacagttctggagtgagctgtcgtcgaaagctaggcatgagcttcttaggattgacaagcagacactgtttgagcaagctcgcaagaacatgtgctgttccagatgccttggactgttgcttgaaggcttcgcccagattctttctgctgggagggccgcgtacgaaaaaagaatgatgggaccctccaaagataactgtaaatctaatggcactaggaaatgtacggttgcgtaccagagccctcctgttcatcgatggggaggtctcaccacaacacgctcgggatgtatcactcttcttgactgctttttgactgcaaaaactttcaaagggcttcaaaatgtaagttcatcaaaggtttccctatatttggtcggtcctgttttacctagctaatctattagttctagcaggtctttgaaagtaaccgtgctcgagagagggaacgtgagttgctttatcctgatgcttgtggtggcggtggtcgggtatggcttagtcaagggattgctggttttggtaaaggtcatggaacaagagaaacatgtaatttgcataccacgaggctctcttgtgatacattagtggatttttggtctgcacttgaagagcatagtcgacagtcacttttgagaatgaaagaagaggattttgtggaaagactaacttacaggtttgttatttgctgattcggtattcttggattttctgtcacaagattagttgagaaagtttttggatatgatcttttttctcctactaggctgtagtgtgtattatgaactcttactacttaagctagtatatttaaaattgaataatgattagggattctgtattttcgattttggggatatgcctatcaagtcattgcattacttagttgttatgttctccttctcttctcttcgttgtcttgttactttttctcctttccttataactagttaacatttcaaactacagattcgactgcaagaagttttgtagagactgccgaagaaatgtcattcgggagtttaaagaacttaaggaacttaaacgaatacagagagatccaagatgtaccgactggttttgtgttgccgatacagcctttcagtatgaggtcttttatcttttttaaccttttcttcttactttgtagattcctatattctatacgacaagatcactggttttcaagagtaaatttatcaatataccttagaggcttatattgcaaggtagaatcaaaagtgtaattgcaatttctcaggtggacattgattctgtccgagcagattggagtcaatattttacagagaatgctggatatcatcatttcgagtgggctattggaacaggagaaggcgaatctgatatcctcgagttcaaatatgtaggcaatgatcggagtgcccgagtcaatggcctagaccttcgtggattacatgaatgctacattactcttagggcatttaaaaaaaatggccgcccctcagaaatatctgtcaaagcccatgcattgagaggccaacagtgcgttcactccaggcttgtggttggggatggctttgtttcaattaaaagaggggaatgcattcgaatgttttttgagcatgctgaagaggctgaggaagaagaggtaaattgaagatttataagctttgtgactgaaaagcgttcagatatttacagttttgcagatatgatatctccttgctgaaatataattattttgtttccaatgcttctataaggatgaagtcctgatagacaaagatggaaatgaacttgatggtgagtgcttgcgtccacaaaagcatgctaagagtccagaacttgctcgagagtttcttctagatgctgcaacggttattttcaaggaacaggtttgttatagattcctcctctaagttcaccttccattcattgttattttgggctttattaaggtgtattcatttctatctattcataataatatcttaggttgaaaaggcatttagggatggtacagcccgtcaaaatgcacacagtatatttgtctgcctttcatcggaactgttagagcaacgtgttcatattgcctgcaaagaaattgttaccttggagaagcaggtttggtcgccatcttgattggattatttttgacaatctatgcaatttaacaagacatttacacttttatctgtccaacaacttcatcatctcaacacttgcagaacaaacttctcgaggaagaagagaaagaaaagcgtgaagaagaggagcgaaaagaaaggaaacgaattaaagaaagggagaaaaaacttcgtagaaaggagagattgaaggaaaaagaacgcgaaaaagagcagaagaatccaaaatttagtgataaagcaatactgccaattatgtcaagggaagaagaaggctctcgaaatcttgatgaggacactaacaataccataagatgcgaggagtccggaattgaaaatggagatgtagatttgtcttcacctggttctcctgatgatcaagatgaagagtgtttggatggttgcatttctccaagagttgaaacccactcttgtgatagcactgataaggagattatagatcatgaagatgaaaacggctgctttacaccaagacctgctcataagacggcgagattatggaaagaggttcagactgatcattctttgaggttgtcagaaaaacgcagatttacagagaaaacttcttttgtcagtagttctgaggcaggatactgtaatgatagattagaaatgtcttcgggacacttcaatggctcagataaaaatgtgagagtgaaagcttcgaaagctggtggtagcccaaatagcagtaggtctcatgaggagtttcagtgttcagatggcaggactggtgagaggtatgattaccattcttgcagttgcaaacccattaatggttaccgggaaaaggtagagtctaatacatctgcaaccagaggcatgcgagaaccgaaatcagtattcaaatctgactctgatctggatgtctccaagcttaaccgagccaataggtatactcaatcaggctatagacgagagataagaagcaaaatgaataatagtcgaaacgcttgtaagatggatccagtaaatgtgagaaaggtcttggactctgtggagccgaagcattcacgaaacagctcaacctctgacgtattatcacttacaacatacaaagcagaagagattaaagatgtaagtcccactgtgaagccagctggcacaccgtctctatgcaaggctacagataagttgggaaatgggagttttaataattcgacggaggtagacaagaagatggaagttcacataacactgaagaatgattacctgtactcgaaagatcctatgatgagtagaagttctagttcaaacaatggaaacatcgaatcctcctcgatgtctgattccgaagttgccagtcagcaatctgaaggaagagagaatctagtggatactcagaacgatatgcccgactgtcacgagaagatggtagagaaagtgacagagatgagtatggatgaaagagatgttttaaagattaagaatatatctaaccttccagcagacaacggggaaagtaaattatcaggaactccttttatggttcctagccaaaacatggaaaatatggtaccaggtcttaatactggttcctacctgtcccagccacaaaacatgatactcccccagatgcttaaccagagtataccattgccagtcttccaggctccttcaacaatgggttactatcatcaagctccagtctcttggtcttcagcttcaaccaacggattaatgcaattccctcatcctaaccactatgtatacactggtccccttggatacagtctgaatggagagtctcctttatgcatgcagtacgggaccccattgaaccattcagcagctcctttcttcaattccgggccagttccaattttccatccgtttgctgaaaccaacacaatgaacactgttgaccaagctcaacctcttgagccattggaacacagttttttgaaggaagcaaatgagaggagatttaacgaaatgcctttaatggaaactccaaggaaaagatgtccacaaactgatagtgatgagaacttctccttgttccactttggtggcccggttgctctgtccacaggaagtaaagcgaatcctgctcgatccaaagatgggattttggaggatttctcgttgcagttctcaggagatcatgtttttggtgatccaaccggcaatagcaagaaggagaaagagaacacagttggtgaagagtacaacttgtttgcgacaagtaacagtttgaggttttctatcttctaaagtttttttatacaatttcttggattgtttggcgtcatggagaacgcagtaaaatacctttggttgttttatttcatgtaaagatctcttcatattttaaaggttttgttttactcagaatgaataatttctccattgttggctgtatatttcatcacaacacaacaggcaaaaatataatctcatacaacagatgttctcttgacataatctactattgtttagaggatttcagaacagcgagataaaggccttgctcatcaacaaactgggttagctcaaatgaatgcttctcagcaacattactcaatgtggactcatcaggtaaatcagagacgaccacatctgaaaactctttcctttgctgctccaagcctagtctaccttgcgggtgactgattactactcttgcacctgtcacaagcattagactagtgttagcaactaagactccaacaagtgttagcctgagacatagtgagtgaagaaaagtcagaacatagtacctgaggaacaacgttgagagagtgtcttgaacagttcgtcgaggtcaaaaggcaaagctggaagaaagtagagaaacacagcgtctaatggagaccatttctccgggacatagatcatttctccttgccaacatttgactttgtcgtacttctctttgatacaggctaacgtaaaaagggagtcatggacaatgagcaaaagctgagaaggtgaagattctaccaaacgatcaacgaatgtttcggagctaattgaaaccaaaaccctcgaagattcggataattctccagcctttatgatcctctcaatcttctgagtatgttcagtggagtcaatttccatagattcgagaaaggaccaatctttctcatggaaatcgactacggagactgttccctctggaggagagcttgaagaaacacaaaacgctctgtaacgagagacattagactgagagaatgagagatgttgaggtgaaaataagtgactttgaagacgatttaacttctttggttgcaaagagagacgacgcgaagaatcgaaagcaacgagagaaggtaaaagggcagaagaagaagatggaaacgaaagggagaacattgataaaactgcagcttctgtgctaaatcgaagaagaagaagatagtagtgtgaattttgtagggcatctcaatttgggaagacgatgacgatgacgtagtgtctttatttgggccagaataagaaagcccataaggcccagtagtttattagttgtaagcttcagttatggcgtagcaacggtggagaaggaacattctcggagagaagagagacggtgatcggagagaaagagaggatgggaacgagacaagtatacgaagagaagcttcggcgtgggaatcttgattatgatccgactatgaatcctggtcttggttctgctcggtgtcctcgttgtctttctctcttaaaccctaattcagtgagttgccaaagtttcttctacagtgttttgtggttttgtgtcagaagcgtctgagactcatgttcttgtgtttaataatttctcaggagaaaggagagtggacgataactccagttttacacgatgctgctgcagtggtcagttttcgcatttctatctcattcatctctttgaaattctcttcagtctccgtttcaattatgtgttatgggattactttatatgcacggatacttgttttggactcctagttgggtaattggtttgttggcaatcagctgaatttagttgcaattatattgcgaatgagaatttgaattctagcttagggtattgtgttgtgatttttggtttcctctgttggtcatgtaaaggtttaacctttttttcattgacttctgaaatagccttttccaggttaatgttaatttggtctattgcgatgtttgtgttttagctttttcatttgaaatgatttgtgttggctgttgggtgcagagcatccatcatattctccaattatccttccgttcacagatttgttgtgttttgacttttgacttagtattttggttgggaattattttttggttgggaataccatgatgtgtattggctttttggatagcatggaaatcgatttatcttgctgtgcatttagctatactactctgtttctaactaggtgtctcctgtgctataggctggttctggtattggtggcttgcttagtgccgtccatgctttcaatacaggtatcacatgattctcttgtcgtcaaatacttatcatttctacagtggatcttatctctttgggttttcagggatcccctatcttcaaaatcggttttccgggtcaaagcggctttcctttcttgtgggggtatgtattttctcttgccttacctactagttctggaattcttcctgtttcctcttttctgttgacattaccttgtatgaattttatgtacttctcaattattgcttttccttataggttccattgcttctagtatattcaggtgtaggggctgcttttggaggtaacctaatcgtttttggctcactcgcttctcttgtgcctgaatatttgtttcgtatatatcctgcgttagtgattaactgtctgtgatttgtcctgaatttttgtgaatggccttctcattgtgttttgaacctctttattttgtgttttgaacttatgtagttctgttagcatcttttgtacttgtagctttttaatgcaagaaagtttacaagccgcgataagttttccaatagtatggttagaatacgaatcaaggtgtgctgcacagtgtagaattgcaacttttacctttaggtgaattacttacattaatggtttaccatcaagagaattggctttcctcttatctgtttaaaactttcaaatgccaggtggtagtgggtatgttagtagctttgtgcacgtagtcttttgtttgatgtacctggtatatatgtagatacatctgtatgtttactttgaagaaagcacctgaacttttgtttgtgtacaatgcttgctaggttatgcacttccaaagtttgctcagctgacagttacctcgtattatgcatcttcaagtgcttcacattatggaatttctatgctaacccggcgtatcgaagaagctcatctctctcgaactcagaaagaagaggtaaaatgaagtcatgcacagataaatgagaatctattccactcctctagctgagccagcttatttcacgatctcttcttctattttgttttctcggttacctttccaagtcacattcttgagaaccacatctataatgttaatttctcaacatagttataccaaatataatgtcttttaggtcctctctactgataatgccatggtatttgattcttgaatatattatactgcttacacaatatcctcctgatctattttacaagcagtcatggaactacatgaaccatgtcttctcaatggctaccttttcatatgaatccattgctatgacttttgatatgtttgtcttgaattctgacaacaagatcggagattctgagtgatggtagcaatggtagcaagcaagtagatgttgaaaattagttgtgtaagaagccatagtcccaactcccaaggattgaaccacatggtctatagggtcggtggaactttatatatgtagctttggtcacaaaaatgagaccgttttggcaggttgcactgttgtgtaaatgagattgagtgagttttatttcttaaggggtttgagatgtgtactgttcgaactatcatcctcaagttgcaactttcctagggttgtgggccgatgttccttaaattccactagtcccttttacatatctaaaaaaaaacaagagagcagagaaagtggtcctaaggttatataatgtgtatgctcttcacacgtctttattatgtgcttcttttatcatgttgttcatcacatgcttccttctccattgcattaactagtgggtccttttatagctgctcttgatgttaactctttgacagcattcattcactgagtatccttaaattttccataatttgataaaaccatcacgtaattctcaaaggtactgtgctctctggtttaacctctgcagtttgtatccaaataactgttccaaggagggcagatatgtcttcttcttctttttcgtttggttttttgttcccatgtgattttgatatgcatccttattgcaatagtttgttgcataagacttgtctagaaaaccttatctctcatccttttgattgacaggctgagtttgcaccgtttggtccttccccgtaatatagacagcgactgtcctgttccgcgactaaagacttaaggtcagaagttttgcaatgtcactttctgcaacctgttatcacaataatgtgctgagatttgtttgaaagctttaggataatattaagacgtactccttgcataatgttagttgattaggtacacattagcaatcatgctacaacgtttcacgacatatataactagagaaggaaaagtattccttctgttcaatctcagtacttataacctgcatacttttacctcaagagtatccaaagttgttcttttggaattatagacttgatagagtaagattagctgtcgtttaacttttatatattggttagtatcacagctggtaattctaaagcaaataggctttatatatctgtaaccatcttgagttcttattgtagtatatttgtagtgtgaggcaatgccacatatatatgtgattgaagtcttgccaaaactggaaaagtcaagcatttgaatatcttggtctatgccgaaagtcgtagctatataaatatggttgtctttaatgtttggttagtgttaagacattgaaggtcatatgttaggtacgaggattgatatcattgcttcttctgagatatacgattgtgattcttgtaggccttggggcatatggacttcattcaaagtctgttcactggaggcaataagaagaaacatggtcatgtgccgtggcttgtaaccagtatttttattttcttattatattttgagcattgtggtatatggggagagagagagagagatgaacaaggaaatatggtagacagcttgtagttgatgattctctttgaactgcccaaaaaaaggttagaaaagaaactaaagaagaaagcttttgaggaaaggctttagctttaggttctgtgtgttgagaaagatgtgaaagctctatctttggctaactctacacttgtaatcatggaccactttcacttctcaactctctctctctctctccccttttgtcttgtccattgtcttcagtgatccccacagtcaccgaatcatcatcaacatctgcatttacccatccttcgttgcctcttgattcggtaaaagaccgttttaattagacagagaccctaagcattttgtatctaaagagtcttctggggtttttaatggttaagactttaaatatctcgactgcaacaacagagagaaagtacgtgtgacttccatggcccttaaattaatgttcctctttctctgaaagttatagagagtcttgaaggaagccataacagaactcacaaatgaacagatgaaatcaaacaaaaaaaacgataattatatcattcacattcacacacacgtgagaggaaattaaacggatgaacgaattttactaattaaccaaaatattattccctttattaatataaactcagaatgtgaaaacctcaaaaaggttcaagatgatctacacaccaaaccggttctcgttttctttttctttttttcagtctccaacactctcaaaagaattggcttcaccgatcagcgagtctcatatatcacagcaatgatggatgataaaaaaataaaataaaagaagtcagagatgaagatcgagactcacatgatcttgcacattgggtttcatcaatctgtacggccagttattaggctccttattagtctcttgctcatgcgacctaaacgctgaagctggtgaagatgagtaaacgccttgaatagtatttgttgacgtggaaggcggtacacgccacaaacctaaaggacttccgttgattgtcggtgggttagaagaaggaggagcaagagtattccttgagtagtacgacggcgtttgatgtccccctccgccgtagtatgatctagcttccgtcgtccaagacggatagtgacggtggtggtggttgttgaggaagccgtagatgtggtgagggtcatgaggctgatgatgatgaaggtatgatgtcatggaaccgcgtttggcgtgttgacgttcacgtttgtgagcgttttgatgtccacctagggcttgagaagttgggaagtttctgaagcagtagtgacactcgaatctcctgttgttgttgttatctttgtctttgtccttatctttttctttgtctttgtccttgatattctcagagctctcatcgttcttggtagtggtttgatgatcagaaggttctgcggataagttgtcggagttatcaccgacgagctcttggccgaagagacgaataatggcggctttttctttgggaggagtacggcggatgaaaggaagctgagagaaggattcaacgttgacgttcatgaaatcgtgagtttctcttcgtccgttggtttcgtccatggaagagagagatcagggagagtgagtttgagaagaatgaggttgactgtttcagagacagaaagacaagagatgaggttttgcattaatttaaagagaggttcccaaattctttttaaggtaaatacataattgctatttaacccctgcagcatggccgcgtgcgtgattttacgtttatccacctatatatatatagctaaagaatgatccacatttcacttgtacatatttttcaaaataaataaatctacttcttcattagtttttttatgatctcaattttttcattagtatattagatttttccttttgaaaatcaaacctcatagaattttaaaattgactccatggtgcatgtttatattttatttttttcgttagttcatgtttatataaacctgcaattatggttggaaaaaaaaaaaaactaattagcgtatggaagcataggagacgtaaatatggggtatatatggaagcatagtactatactatatgattacagatttatcttgtgtttaaattgtagcttactatgaatctataccgtgtgtcgcggtaggtaaaaatagccggataaaatcaatcaatatatagggagacctctaatctacattcacttcccctacgcaatatatctctcattagacatacatatacaaatatccatctcatcaaaaacaaacccatcaatcctcctttttcaaagttatctcctttttagttagttgtttcttaaagtgattcctgcaaatgttgaaactaagacaaaaagcttaccaaattggtcgtaagcagatgaaatggggtcacagtgagtaatgagatgaactaaaaacagtgagagtttgtaggtaagagatcattagcaaggtgaagttaggtgtgtactctttaacatcacggacctatttggttattatgtctacgtataagtacatggattttactactaatagagagagagagaaatagaaagacctaattaaagagacttcttctctctcaaggaccatacttttagtctcttggatgttttgtctctttgatgcaaagataatcttacagagagagagaggtggtccatgttcatgatcattaatgatgctcataatcgactagttgacatgtcatcaccagatagttaaccaatttaaaagattgaaccttaatcgatgagatcacatcatcttatcaatatgtatgtaatctgttaatacttatcaactcggatcgatcatatacacgtcttcttcaaatgaactatatatatatatgtattctctttttgttcgtctacactaaattttttgatattttgtaagaataattaaattttaaatcccattaattttgattatatatattccctgattatgtcacacaaataatgtatatgttgctaatgtcaagctggaataaggactataaaactcattaatccataaattaatctgacctttttcatttctttgacgactcccaaattcccaattaagtatgacgttcagttagttgttttgagcggtaaaaattttctcctgtacaatggttggaatcaaattactaaacagtctaaactaatcctacgaaaactaagatcttgtaaactaatgctgattgcttactatacacagtattcaaagttttcatttagtacgtatcgaatcatctcttatcgttctatatactccaatatggatcatccatttgtggatagataaactattcctttttttttggtcaacagataaactattctcttataaaagtattgttatttataatttttaaattaaattatgtaagcaaaacaatttctttttttctccaaatttttttcagacggattccctttaaaatccaactgttgtaagtgacttcctcacatatagtatgaatttaccgattcacataacatgtgtgaggtatatatgagtaatcaaaagcttattgtaagaaagggaagtaaattcaactatggtaataatgtccatacgaatgctggtcccaaagtacattaatttacatacataattttgcagattttggacttcacatgacgagtccacgtctcttttatttttccacaaacaataaactctgtttaaacctacacatgcgatttaacatttaaactcatcagagagccttggcatgcaaatatgaaagttttaactgttattaaaattatatagttaatgagaatgtttttttgtattcctctaatattttagaaaaatatttaagggaaattgatgagaatgcttaatatcggactttctacaaccaaattttgtcaaatctcttagatcatactacgtagtctttttaggttatatatcagaacttttttgattaaaaagacgaaatctatataaaatctcggactctgatttttttttgtctaaagctaagtcctaaccagtgtaacatacttgtgtcataatataatacttttaaatctcataaaaaagggaagaaaaaaaaaacatattgtaaatgcatatctaaaaacatggttacaaagaaaagtaaaacaaatctaaaaaaaatgtaattgggtcccatgaatggcacttgaaccccacaaaaaaacatgcacttaaaagcccacaaatctcccaaaccctaacagcaactcttcattgaatcatgcaattgcaaacctctttgctttgccattaaagtcacagtcatatgctcagagatttaatggcttttgttgaggggaccatatctctcactttcttgccctcacatccatttcttggattcaactcctccactcttatatacacatatgtatgcaaattccctccttgtttatttttctgaaaagaaatatgatgaaatgtttgggccagtaataaataataaagataataaatatgaaagatgagaaaaaagagtctagattttgagggacaagcatatcttgtccttttcgttatatgtgacctcacaatgttcagctatatacaaggaccgaacttcaaagtaatatagaaaataaatggtgaaagatattttattttaagtagaagaaaacagaaaataagaatgagaggaaccccaaaattaaaagctatagaacaaatgcaagtggagttaaaaacaacatgaagagctcaccggtctctttcagttttaaacaatctactcttaactctccatcacttcatcgaactcatgaccaaactcatgattaattcttttatatacaataatgataagatcaattaatatctcacggtgtgatgatcttcattactattattagtttttttttttttggatgatctacattatgcattacaagtagatgaaattttttactagtagtgaaaaaacaagtttgcgtttaacctactctatttttttaccaagaggcaagaggtatagctttctaatagatttagtggatataaaaaacacaaaactatgtatatgaacaaacaaaggagttcaaaactaaccaccaatgttctacaaaccggcatcaacagaccctatatttctaaattcgatacaagaaattgtttagttacatgagtcattgtttgacatttatacatagtcgttaattttagaacgtgtcagagagtctgataaaaagtatatgaaaaaaatttaccatgaaagggagagagttgaaaataagcattaagaaagaaaaaaacatgattgaatgagtaagagaaatttataggtggtgacaacaacatatgaagagaatgggctcgatttcaaccgtatataagtcaatgtaaaaggataaacatacatacaaatgtgaaatgtgtattattatagcttttggtgggtttgtgattatcattattgtctgaaactgatatgggtcttgtttcttttaaatggaccaccatttatgaatattcctatacatatatgtgtgtgtgtattatgagagcatcttttcagatgatggtttaacaatgtatgtggggaactttctctagattatgtgatatgtctccggccctattgtcaatttgctttctttttataatatgatttttatatattaatatttgaaccctcgtgcatgggaaatgagtcaattacacatatatttatatcatttttttgtcaaccatgatatcttaagtaatacttatatcattttgttgctctcaataacacattcatatactactaaggattttttaacaatatattttgataattatagaaacctaaaaccagttttataatattgtcctacagtggttacgtcggtagctatactagttgagtttggaaagctcttgagagagaacctgaccagatcttgagttcgaatcctacaggagatggttaatttacatatcatgatctctacccaaaaaaaaaagtaaagactaaaaacttggaactcttatttgtaaacaccaattgttggtgattacataaaacacatctcctgtaggattccaaacacatctcctgtaggatttcaaacacatccaaaaaagtatagactaaaaacttggaactcttattactactaggctttttggatgggtcgaaaaatcttaaattggccttttgtgacggcccatgtgtttgaacctttcgttgtttatccacaaagctatgattattgatctgagagagattgtacaactactacaatcaatttggttaatcgtatgtaagtaactagagctggttttctggtatcatcaataagcgaaggaaaaaatcgtacaactagaaataaccaattactttcatcggaattgaaaaaagacatcaataaatttcatatgcaatataatttggcaatttgcaaaatctacattttttatactagagtagtaacatggtttaacttcagtagtttatagaacggggacaaaatcggatcttgggggtctcggaggaacaatcttcacctttaggggtttattcgagactttctttaactgttggggcttttgtgaaataaccttcaatttccgtggcttcgttggaatatctttcgatatcggcggaggttttctgagcctcaacaccatccccgtcctctctccaccggcgacggaagaacccttcttctcatctccggtcaaaaacggatgcaacagcaactccgaagctgatcctctctcctcaggttttcttgagaaacacttctccaaaaacagccttgcatcacacggcagagtctctggaatctctggtgccttttgattcaaaagaagagacttaacatctttctcaaaccctaaccatggccgcttaccggtatacatcttcaacacaatgcaaccaagtgaccacaaatctagggttttctcaacggtggtgccgtcgctgactgactcaggagacatgtagatagacgttcccacccacggttcatcgactctccaacaaccagatttgtctccggcccttgtcgatattccgaaatccgaaatcttcaactcgtaagaacaattccacgtatctttatcgtaaagaggaaaaagaaggatattgtccggtttaagatcacaatgaacataaccatgattatgaatcgagaccaatccttgtagaatcatacgagtgaagtctttaataacagaatccgacaacttcgttcggtttcttttgatgaaattagttagagtaccagcagctgcatactccattgacatcatgtaaactttttttccattgcaatcaattccttgaacaagagagttcccacacaattgcacgatacaaggacatcctctgagttccgacagaattcgaaactcttggtctatagaaccgtagttctcagagtccatgatcttcactgcgttgtagagcaacgatccgtcgttttgtttgtggctgaagagctcgacggagccgtaagtaccctttcccaaaaccttcacgaattccatctccggcgacatcttttgcgattgattgtctctgatcactctctctcgcgtgatctgtatgttcttcgtttcactattctcaattgaaagatgataatctcaaactcccgaaatttatttgctctgatcaatctctctggttactttgttatctaactcctttttttttttttttttttgtctaaaagttatctaactccttagagcagtatttacaattaaaccctaatttgatcaggattttggtttggtgaaaaaatggaaattttctaattagtaaataaatagataatattgcattaattcgttggaataagagaaggaaaatagagaagatcggaaaggatattttaattatgttaatcatgaaaataaggatatattcaaatatcttaaacaaaaggaaaaaatattaagatctgctgccgttgctcccaccatccaatgaatcctgtccgttggatgaaggatttcatggaatttgtttttggactaaaaaaaatatattattctgtaccgactactgtcaaaatgttaaacacttaaaaccgtgtggtgaaaaactttttcagtgttttggacttatttacttatcattaaaaatccgacttttattggatatgaagattactaaataaaagaagtcttcaaaaacctttaaagttggtgtaaaatacagatcactaaaactaaactgacaatgagataatttatattaagtgcagagatttttaacttgctcggcacagaggttatgtaccaatcaatgtcaaaaggtccaaaagtttctggcaatctatttttcgtaactactgagtagctaaatagattaatagctgttgaaaaacagaacaggactaagctcaagaattctgactctaaacaagtaaattgagggatgtaagaaacagaggaagttgcttaagggagaaatttggactctaaacaagtagattgagtgcaaggaaaaacaaagaacattcttctttcaaaaaaggaaaagcagagaacattaaaaagaagacatgaatctggtacctggaactgaagagtgataaaaaaaaagcttgaagttataaaaggtgcacagataaatttgttcatatacattcaaaccaactattataagagtcaatgatataccaaaaactattacataattctgctaattagaaaatgtgaattaatcaatattactgtggaccagggctctctgcagagctcatcaacttcaaattaacacatagtcctaatttccgaaagcatctggctaactttctccagttgcagggtaaaatcatccgcactgtcaatcttcacattcatctgacggtttgtgaacttattgacatctccatgcaagaagctttgcctcaacaatgtcaacgcatctttcctctcatctggttcggacgcaaagcaggtcatgagaaagagttttgcatcgcaaggaagattacgcggaaacaacggctcataacacttcatgagctcttctaattcatagttagtatgccaccatggcttctttctagtgtacatctccaacaccacacatcccaacgaccataaatcaagtcctttccctatctccccgtgagagatcgactcaggcgacatatagatcggtgttcccacatatggtttgcgaggttgccaccactgagtgtctccatctcttttcgacatcccgaaatcagaaatcttcaattcgtaggatctgatccacgcgccgttcttgtagacagaactagggaaaacaaggatgttttcgggtttgagatcgcagtgaacatagccgtgtctgtgaatcgtggctaaaccctcgagaagcatacgagtaaactctctgatcatcgaatcagacaattttctgtctttgaatcggtccatgaaatcgctcaagcttcctccaaatgcgtactccatggcaatcttgtattctacgtaacccttgtcgttaaatatctcttttactccattcccgtagcattggacgattctcgaacaacccttgaattgagagaggatctgaaactctttgtagagagacttagcattttcgtcgctagatgttttcacggcggcgtattgagtctcgccgtcgcgttgtcttttgtacttgaagagactcaccgaaccaaacgaacgttcccccggatacctttcgaactccaaatctaacgccaccattgcaaatagaacaacgattgaattcttctgatagatttggcaacaagctttaagcaaaacctaattaagtgaaagtggaaaaatctgagaacttgtaatagcttgggaataaagtctcacacaaatatataagcaattaatgtgagatctaaccaacttcattcactatttcctttttatttttcgtttttaatttatttacagcgaaatagatataaagattttttttttttcggaatagaacagcggaaataaggaaataacaaaagttcggttgagaattttactttttccttagttagcaatacttatcatcaaaaaaaaaaaaaatgttaaaggtttttttttataagaatattctactaaacatcaaatattatcaaacaaaattaaattaaacaacactaatcattaattgagcttgttgtttatttttgataacttggaaatctattgacctgagagatagaatctgaaaaaaaaaatgcattaattgaaagtaaccccaagtaaaagacaaaatcaggaaaaaatctgaattagacttgctgatcaaatattagttgttatgataaaccctagagaaagtccaaaatcggagctcgatctttaaaataaataaaacaaacattatggctttaatttgccgagaggaaaataaatttatgtaaatgcattaaacaaaaaggaaagtagaagatctgccgttgctcctaccaacagcgaatcctaactgttggatctattattccatggattttgtttttaatttaataagagtccgaagtgtattagtatgacgtatacccctatttttacggtttcgtattggtccttttcttaataatatttgttttaaggtcaaaatttgaaattaatcaaaaagaacctctggtcaagattcgattcaaatttatagaactcaaaaaaagttgactcaaatttagttttggatatgaataggatatcatgaaattttaaaatatttaaatttaaccaataactatttgggtccaaatctgaatttgctatttagtttttatatcacatagtacatatactgtatattcaataaatttatacatttcaaaacttgataaacaatttgcttccggttctgtttagctctaaaaagcgtttgttaatttgcttattaatatttaataacttagtatatagtgtgtaaaccaagatattgattttttttttttattgtcaacctattgattctctagtaatcctcacattagttcctgaacttgttttggttccactctccatcatcacatctcaatttccggaacacagaccatgtttacactaataatgaagtagtcaatcatggaaactttgcgttaatgaaatagcaatcaacgaaacatacaaactaccgttaagataataaacacaacacaaagagaacaataaatgaaaaaacaaatcttttgagatggttgtgctaagtgacaaatgtgaacaggaagcaaattggatctcggtgctcttggctgcttcttgatgatcttcatcaactctccggctcttttgaaaatggacgtaagaacttttgatggtctcctcacaactctccccaatgccagtgcaatttctttcggattctcattcttcacatgaggctttgtgatcttattaaccaccccacgcaagaagctatgctccaacaatgtcaatgcgtctcttctctcgtttgtatttaacgcaaagcaagccataataaagtgttttgcatcgcaaggaagatcactcggaatcattggcgcgtaccagttcttgagatccttcaagtcatagttattatgccaccatggtttctttccagtgtacatctccaacaccacacatcctaatgaccataaatcaagtcctctccctgtctcgccgtgagaaaccgatcccggcgacatgtagatcgcagttcccacaaacggacgatgaggatgccaccacttactgtctccatctcttttcgacaatccaaaatcagaaatcttcaattcgtaagacgatctccatgctctcttcttgtagacacatcttgggaaaacgaggatgttatcgggtttgagatcgcagtggacatagccctgtccgtgaattgtggctaagccttcgaggatcattcgagtaaactctcttatcaaaggatcaggcaatttcttgtcttcggaacgtttcatgaaagtcctcaagcttcctccagctgcgtactccattagcatcatatactctttgttaccctcaacgtccagattctctataactctgttttcatagcactggacaattctcgaacaacccttgaattcagacaagattccaaactctttctcgagagactcagcgtttttatagttgcaagtcatcaccgcggtgtagagagtcgtgcgtggtttcgaatacttgaaaagactcaccgaaccgtatgaaccctttccgagatacttgttgaattctagctctggtggcaccattgcaatggaatatattattgattctctgatttctttggctccaagttaagaaacaaaacctaggtgatgtacgtgaaatctgagaatcgaaataatttggtgaagagagttatcatatatatagagaaaagtttccttctttctgttagagataagtaaactcattagtttccttttttcctgtaaaacataagtaacttcaaatcgtattaatttataaacgaaaattataaacgaaaataacaatttccttttttctgaaaagcgtacaaaactttagtttccaaaaaaataaaagaattaaaaaaggcatcgctgttaacaatacaaatcgctaattaagagcttgattactgcggctgaagttgttagtggcttctatgatctgatcatgttctgttgtgacttatgtgagacatcaatcaacattataatttgaaccattaacaaaatcacaagaccagtggtttatgattgtgattcgtcatagattcaacaagtgatacgcttgttttgaaattacgatgtgtacttttgtcggataaaatcactcagaaaactagaaccggtaagcgatttctaggcaatatccaatagtttgaggatgtttttatgagcagaaaatatctttctgcttgtacattttttgttttgtgtagaccatgtgaattcacctaaaccaaataactttcacaaagctttatatgttgaattcaataaaattaagactttgtaaaattctaacttggtcaaaattatacctgcgcaaaaaatatagtaaccaaaatatggtggtagtataagaaagatatatgaaaaagagaaaacagatagtgtatatatatatttattaatcagcattacataaaaacatgtctgaccgtaatcaaattatttttcgttttattcactttgcctgtctaaacaacacacacaaaattggacatcatagaaattgacagagacatcgatatttcttctttttttgctttaaatagaaaagcttagttcaagtagtaggcgaagagagacacaagggaagctccaaccaaagagccaagagccggaacagctacggaggctccacttgcggcgggtcctggtgcaggtgctccgacctctgcagccatgacggcggtcatggaagcagcagcgaaaacgactccgcaggcaatcttcttcatctccattgctagttgagacctgaaaggtttttttctgtttttttttttggtagttttgtttacttttattattttttgtttctcgcaggtctgaggataattggatgatgcttttggggatttataccggatggagttaagctatttttaggtaaatttaaaattagaaatccgtttgttcacacaaaaaaaacagaaattacagaaataatgtaggaacctcaccgttgaatttttatttcattgtgtggctttgattcatttacgcgtttccaaccatatttttacctggtcaaaatgagtgcagatcgtattttccggcatgttttccgatttgggtttggccttttgtaaccatgtaaccgtatctggtccacgagctaaagcccactaacatatgtgtggatttttaaagagctaaaagcccaccaacataattttgtgtgtttaaaatggttacttcaattggtttagactttagagtggcccaggtgggtgatccatcccttttatttatgttattattagcttgttccgaacctaaaaagacaatatcaaaaaccttaaactttttggtaaagtagattttggctggtataaattttggtattaaacattatgaatgaataaaaacaaagtgaaatttgaagactttttttgggaacaatgaagagaatcattagaagggggaagaaggaatgaatttcctagcttctgctatgctttttcttcaccttactttctctgtttatgcttctttttctttctgtttggttttgattaaagttgcgtcgcaatcagctttttcttttcttttatattttaaacccaaaacaatatttttaaaaggtataaattgatgaataaattcttagaaatattattcttgcgtataatatatgctcaaataggtttggtgttatcttgaataagatactcggcataagtcttgtgatttttgtgtttgatcacatcaccgcaaagcttttggtaaattaaaatattaatggaaatataaaaggtgataaagaaaatcactcaagaacaaacatatgcaccgaaagtttgatcactgaaaggtgacgatcacctatttttttaatttctcaaatccgtccatttgctttctttagtgaaatttatatttatttaaagtataaccgataaagaaagaacaacttaaacatcctattattgggctatacgctctagcaaaagaagacaagataactgaacagagaatgaataaacatgttcgcactaatcttggtttgtttttgtttttgttttcatttcctgatcaaagtttaatgctaagaaagagtccaaagagaacagtcacgtgagctcgaggatacaaaaattggttgcaccaaggagtgaaaaacagattaatatctatcgtatttagataatgtaaagtattaaaagaatttaagtgaatattattaaatcaacccaccaggccaccatctcaacacaaagctaaatttgcatattccaaagcattaaaaaaagaaaatgtggttgatcaatttttattaagaattgacaaaaagtaaagaacttacttaagaatctttattatattacatttaaagatatactatatcactgtcacctgccccataaaccacatccacatccctaagaaatccaaaaattaatcctttatggattagcccccactcagttcttctacccaacaaatatttatctatttattgcactaacgccacataaataattagttagtgagtcattaagtaattaacatagacacatgtctcccaagaatttgctttgaaggccactcttatttctcccacaagattaaagaaactaaaaagattaaagattattgcaattaatttcagggtactcattataacaaacgataacaaatagtcataacaataaaatatataaaaaataataatattaataacaataataataatgataatgggagaaagaaatccctaaaaaaaaattgaaaatgggagaaagaaaaccaagaaggttttgtttcatctcctttcttcccataagcctttttcttgtattgttcccttctcttctctaaataaaaaaaaaaaaaactgttttttgtgaaaattaattgaccaaaaacaaagaaatcttctttcttctcttctcttctttgttaatcttgttacccttctaccaccaccacctgtaaaaaagaggtttttatctaccacatagagagaccagacaagaacatgtgattctttggttaggtctctcaattctgctgagccacaagctgatcgagctgcatttgctcaatccaagcttctagcccagcatgatccattaccggttcaaccggatttggctgcttcatcacgtgttcccctgaggaagatgttgctgctttctctttggcttctgctggagtctccttcaccagtgactggacccatgacacatcaggctcatcaccatcaaacgatgacgaagatctcaacttaccaagtgcttctgagctcattccccaatccggttgaccatttgaagatccccattttgatgaccatgtgttgttgtttaccggtgaaccaacgattgggctagagtttgttctgagctctctggagctaaggctacggaactgatgttgctgctgctgctgctgctgttgctgttgttgttgcttcacgcactgagccaacatggaaacccgagcactcatgggtgatattggttcaacaacattccgaggagacattcttcctccacctgaaaacaatgagtggtcaacgctctttggtgaagaaaagcttgtgttgattggagacaacatgctctgctgctgctgttgctgttgttggaactggttgaagacagctgacttgtgtgtaggcgagaacaccgcggaagctaaagcggaatcagtgaaccggggagatgaagagccttctgctgagaaaagatcttcaagattcgaaggaggcattgatttcatccgaccagaacggctcagagcattggaatactcgttgaggagttgctgctgctcgtaatccgctaacatattgaactcatccgtcgggatatcccttgcattgagagaagaccttagcctgcttgactgtagattgcttcctggtaagtgcaacgcagggacatttggttgtggccaagccatattcgaatgagacattccgttccccgctgctgatggggaaagcggggacatgacagagactcctgatggagaaccaggaaggagactcaaagcagctgcataatcagcattcgatctaggcgaaggaaccgctgaaccagttgatgcgtacaaaggtcgaagctcctcgggtgtatgcgcaaagaaacaaacccgccgagcacagcctgttccatctttgcaaagacgggtcctgtactgagccggatgaagccagcattcaaacacaccgtgcgcatactcacacatatctcctctcctacaagctcctttcctaaaatccgggcaaggaacgcagctgtaatggaacttcctcgggtctctcctcctcgcgttttcacccgggtgaacaaaaggacactcagtccaatcatgtgaataagcacgagagcaaggccggaccttgaaggaatacattctaaactcatcagtcgcgtagatactgttcttgatatctggcaaagacggatcaaccggatactctttcttgaattcagtagatttcagcttaaaaggagagccgagcggtgaaccagaccctgatccaccattctctccagtaggagaatgacacggagatgagcttctattcggaacatttgtcacaacccgtagattccgctccgcagtagatgatccatcagcagaaagaagctcctgaagcatcagcttcacgccttcaagcttaggaggaacaacaataacatcaccagctcgttgaccttcagcatccaacagattcaaatcagctccagctgcaagaagcagcttaacaacttggatagcattcacagctcctccagaagcagcgcagtgtaacgcagtggtctgatcattcccgcaagcacggttcacgtcagcatcagtcaaagaaacaataagcttgatcacatcaatgcttccgtaagtagcagcaaccatcaacggagtcctgtaatcgttgaccatagctttagaacctttttgacgaccgtaccagagaccagcttcgtctacacaagaagggtctctctcgatagatagccttacaccttcaacatcgttgttagctgcaagctcaagcaagctcgcaaacgtatcctctgtttcgactgttaagtgattcatgtctgtgttggtaacaagattgttatcttcctcgaaagaaattggcaacgaagatcttgatgacacgatctggtttaatcggtctgatccacagcacatagttccatctgtggaatcggattctgtaaacatcatcaaaagaatcaaaaattcaatcaaaaagatcacttacataaaagaactaataaatcgatcataaaaaaccaaaagagaatctttttaattctcttatccattgattttacagaaactagatcggaatagtactccagttaagataaatctcagctaaagtcactttcagacaagaagggagggtttttgtctgaaaacaagaccatgtcttaacgattcccaaaatcaaccgttttttgaaaaaccagtaagtcaaacagatttcaataaagaatcaagcaaagaggatttgtaaagacgctacttctataaatagaacagggaaactaacaacaagcaataaaatccgatcagaaaatcccaaataaaaacttcatcgaatctttttttccataaaaacaaagtcaaaatagacaaatagagaagaaactcaaatggatctttgttgcatgttatttcacgacgttttttttctcaaaaaattcatagagactacagcgaacaaagaaagggagaagctttagattcagaaagaaccaaaaataaaaacttgagacgatcgaaaaccaaacgatatcatcaaaccataagaggcctccgatggtcgacaaatctcaccttttttacttctcgattgaaacaagtttaatagaacagaaacaaatccatatcttgccgaagacttcgatggtttagtcgtgaaatgaaatcagttaatagtagatctaggaagagagtgttaaggaacaacaacaagtgagaagaaagaggaggaaaagaattaatttcccgagaaaatctgggaaggaataataaaaaagaatcggtgaagtctcttttcttttagagagaagaagaagaagaaatggtgagaggagcttgttcttctacaatctccatttcccaagctcagatctcactagaaaagtatttacacccccaaaaaataaataatttttattttcctgagaaaaaacatttttcgacacttcgttttcgtttaatgaaatttttaataaatttcgctatccaatagggaaagctatttaaattaatattttataggaaataaataaacaattaagaaaaagacaagcgctactatgagatcttattaacccctacccgttttacgaatttaaaatcactacaaccaatagaagctgtccacgtcataactaagacagtagaacacaagggtacaatagtcaattcgacttccgatatatgagttggcagggtatgattggttgacatcggaagtggacacgcatgtatccttcctattaagctttttgtccttggtcaaattctccagtaatttccacttaatacaacttcctaaaataaggggatggcaatctagtgagtcaagttacatcgtaattaaaagcctttttcctacgtggcgacaagtgaatggatattcactttttcgactttatccccgttacagaaatctctacagacgctctgctttcttcataaggtattttccaatttcctaaattgcccttagaatctacgagaagtcgtttttaccctttttatctttggctgatgagacacgtggaataaaagcattgagcaataagcacaataagacaggagatttttcaatggacgcgagctttatgatattacaggatcgaccggtgaacccggtggtacggatggctgatggtaagagaaagtaaacgggaggaaccggtagcctgtgagtggcgtaattgagagggattattaaacgatatttaagaagggtaactggcgtccaccaagcgtacgggggaacggacgtgatacattttatttaattccagtttaattgtagagtcaatcataaaccatgagcgaaatgagaaagtgggcctaatgggtttaatagatatttttgaaaactataggttataagttataacttataacaaactgcatcaaatttctaataacctaaaaacttaaatagggaattaaaagataaattcgtaccatatggtttttcccaacacatctaaaaatatttctttaggaggatttattttccggcgttattatttttttttgttaatatttctgctgttctttcaagaatttactaattagtactatataaatattagtttataattgcaaacaatttcatcaatctgaaataaattatcatcaaattgttttatcaaacttgctatacaatacttatttatatataatttaattatttcagataactaaaatgaaacaaatttttatgtataatagttaaaaaatataatatagattttaaaaatgagaatattacgtaattaggcattttttgaaaagttaatgtctaattaagcattttaaaaagaatatacactttcgataggttatttgacctatttaccttttacacatctctttcgttacattttatttgtctctctccttctcttctctctctctttttttttctctcatttttcaagtctacacaatcaagtggagaaaataaaaagtttttaccatgattttcatctctctctctccctctcttcccatcatcagtcaacttatcagttcgttccttaattttgttatatttgaatttctagggttttgttgaaatctgagattcagattttgctctctctctttattgaaaaattactatgaatccttgctctctgggatcacttcattagtcaagtttctgattacaaaaatgacgtgaagcaatctgtcatcgtcttaaggcgtaaaatcaagcacatccacaattggctgaagaagaatcctctgttgccttctccaagttagtactctctctctcccacatgattcctattgattttcatgtcattatcttcatttttatgtcattatctccaattctccatccaattcctattttagattcgttctccaactaatctgggtatcaatttgatgtaagaaatagattaaaaaaattgtttccttggttcattgtccttatgtttagcatttagatctgcaattgatattggtcgaatttagtaaagatcacatttttacgatttaaattgttccaaaagtttttgtttttttccatcgaatctgattctggtgattatcgatcatacataaacttgtgtattgaaataaaacgaccccatgagtcattagttgaccacatggactaaacttcttggacaatcatcaatggacacatgttggctttgatttgctgtgaatttgttttatctctaagtataattatcactttcttgtttatgcttacaatatattatatggtttagagttttgttttacgattttggatttaatggataaagattagggattgagggtttgagtttagggtaaggaaattaggctttagtgcagagtctcaagggtttaaagtttacacaccacaaaccatttgtttgtgttaacaatattgtatcatattctcaaaaaaagtttgttgatggaccttgtattgatatatataaagcgaactgttatggataaatttatatggacaatatatattggatacataattagaaaaatagtttaatatctgatatttgttgggaatatataatactacttaggtttaaatatatagtatttcatataatgcaaactgtttggataagtttacgtggacaatatatattggatacataattaggaacatagtttaatatctgatatttgttggaaatatataatactacttacgcttaaatatttttatttgatttaaagcatttcatataatgcgaactgtttggatatgtttacgtggacaatatatattggatacataattaggaacatagtttaatatctgatatttgttagaaatatataatattacttaggtttaaatatttttatttaatataatatttgacttaaatatttttatttgattaaactaaattttaactgatcttaccattaatttttaacttgttatctctatctaatgtcacgtatattattttttagtaattgacaacaaaattaatttatctcctgttttttttctttctcacgtttataagggtaaattggttataaaatcaataaaaatgtggaaaagtgttcactccctcaaaagtgtcccaaacgtccaaactttctctataaatgtcttattagggaatattccctttaaatatatgcgtaaaaaaccgtaaagtcacattggttttaataaaacttaaaatttaaatggaattaaagaataataaaaatgaagaaaccgttttctatatattaaactaaaattggagtaaaaattacgaaaattataaagataattttttcatgatcattaaaaaagggaagacagataagtagaagagacatgaaagaaacaaaaaaaaacaaatatgaaaaaggaaaacatgatattaattccaaatgatggctaaacattacgtcaaagattatttctgagtcagttttgttttcattatatataattatgattcttggaaatatataataacagaatagcagtttgtttatttttaacatgaagaaactcaaaaggaaatttaaaataatttactgtaatccatagaagatgtgttatattgattaaaatgtctgaagtggtccaacaaaaccaacagtaaaagccggctttgttttggtacttacctcattcagtacatacaaaatctaagatgaatttataataaaaataattgaaccaaaatccataaatttataagaaaataattgcaaccaacgactgctaatacttgaaaagatcaaagaaatataagattaacactgtaatagaaatcaacagaggaattttatcccgtggctaaaaaaatgaagatgcatcagtataatatggatttaaatctaatctatgcatttatacagtgacataattaattgattaaatttaccttggaacagttttccactcaagtttaaatgtatttataattttgtaatgatgaacaaaaaatactgatgttctaattctattttttttgtatgtcggcaaaaaaaaaaagtttatgtcggcaattttgtttattaattatagtactactaataacttagtgtaacttatatttttctgatcgtccatagttcaactcatttgaaataataatggttaatcatacataattattgctcgaattttgacgacctcgagccctcgtcccgtgggaggaaaacagtagtgaggcttcactcacccaactaatcattattagtgataatatttgtttgtcaccgtattactctttgatgctaatgcatccatcaatatatttataacagataaagaataagagtatataaaaataagaaaagcattatcctcatgcacgagaaaacttttggatcatgtcatttggataacaagataatagagtgagtccgacattagttaatgaccaatcatcacactcacaagattgttaatccaaaaaaaaaacttaacacaatggatcctctcataagtagcaatatgggtagaacactatttttattatgctataaattctcgttcctatttatagtaaaagaaattagaaccattaaacacaagattgacataaccgtttaacaaataaaaataacataactaaaaaaaaaacctatgattttttttaaaaatttactattaaattgttataatcaatgatatggaattctataaatctagtcaaataatgaatgtgatacctatttcattttttgtccaactaattagcatcgacactatattcaaattccaatcgaaaaaatgacacgtgtgaaaaatatgtgtgagaattagggtagtagtagcaagtagcaactagcaataatggaaggggaccgagtgaccaaacttgggcaaagggaaaatgtgagtgtgtttactttgtggtgttttgtctgcgtctctcttttgtttgatttccatgtgaacacttaccaaactctaatctcttgtttcatccacagggcgcaacttcttccaactatccctctatcttatcatattcattcattttctttggttacttaatgagttaatatgatttttatttatttaataaaaaattaactattagatagtaagtgtaacaaatatttatgtcaacactttagtgtaacttttaaaacatttaatctggcgtatttaccttggatcttaatgtagtagtactataaagttgagtataattcatttcatcaacaattaggtctaagataacaaacaaacaaaaaactgttgattagtactcaataaaaacttaatcgatgtataaagtaataattaattgtaaaaaaccttaagaattaaaattgttaattatctcatctgttgaaccagagaaaaaaattatattattgaaatggattttcttatgacatttttttaatcttgacaaaatacctatttttatcaaaaggaggtaacttttttgtctcgagtttaaatacaaacgatatatatgagattaatctattttgtttttcaatctaaacgtttaataatagaactatgaaataaaagttagaagtgtacatcatctattgaagacgtttatgcaattgacttctcatttctctttgaaaatgaacacctctacgaagtctctagctaaaatcaatctttaaaagattggaaactaaattcggatgttttatctctgcataggtccataagtatgcagtagatgttgcgactcctaatcaataattgatacaaagttattaacttttgtattcttcgttttaataattttgcatttatatatgtgccaagagacaaacttaaagagaaggccatatgttgagatggctaccgattagaaatatgtttcgctttcaagagtttcgtgatgttgagtgtaccattgaatctaggacaacatattacatgttctcgttttattatatatgtgtgtatatgtatattcttgttttctaggggaaatgtagtatttaacttattaaataaattatgacaaaagaaaacaatgtttgttgtccattactaaagcaaaacaataagtctgattgttgatagaaaattaatgagtgttgatcggaaagagatagttgtaaacagaaacataatagttaaaaaagtaagaaatagcagcacacaaatagattagtgataccattagttttactttttcgcgatcattaatcaattaatagggtacatacaccttgcatcagttaataattatgattacatacatgttaaaataaaatataaaaaactttaaaatataatttaataataaatgttaatttataatgattttttgtttaaaaataaaatttgtgatcaaaaaacttgtttagtttatcattttaataaatatttgtagtctcatctcaacaaaagaaatgataaatcttgtttacaagtattttattttctgaaaatatcaatttcgattgtctatatatagttttgtgtatggagcgacttattaaagtaaagaagaagaaaaaataaaagaaagttatggagatatctaacagggtacacgtaaacatataagatctttggaatatagaaagttatacgtcaaatgatatgaacaaaagaaaacaaccgaacctaacctaacattggtccattttcggacatatgggatgttaggaaccgtcgatgcaacttttcttctgatatctctgtttgtggctcctctttttttttttttatctatttcttctttttctctttttaataataagaactctggggtccgccttcacttgctacctttatttcaaatagaactgtattagatgagactagacgatggataatattctttggcacgaattattttcttttaatttaattgtcgggaaaaaaggacgaatgtcaagttcatgaacagaggaataaaaaaacctaactttaagcccaactagcctataggagaggttagcccatcacatagacaatttaacaggcccattttattgaccatttgtggcttcgttattatatcttgtcaatcaaatggtcaataaactgggcctgtcaaattgttttgagtcattttagaggttggtattccggaaggacagaaaccattaagtggtgatatttctgtaatagttgcgtaccacaactctccgttcttctacattatcgagttccctgaaataactggaatcggtaactaaatcgggtgataaacgatttgattgaccttatgcagttgggcctaattccacatgggcctgtgttgtgaatcttttgtggtttgagactctgtttgcttcagaggtttgtcttgtgctctaatattattaatgtattctcagatgaggtagaactatgtttctagttctctttttataaacggaatttgacttcgaggatatcagccgtcgaagttaactactccaacatacctatacaattttatgaagagaaatacacaattaaatttgttttggaaataagaaatcatattgtacaagattgtcatatatttattagtttaaatgaataaatatatgatgggcataaaataatatatattaatatatacataattttctttaaaaattgccgatttattggctgctaagaaagtaaaagtaagaattatgatctaaaacacgaaaagggaagcaattagctcaactgctccatgttagattggagagatcagtgatgaatggaccctatgaatagaatgtatgacacacccgttcctctcaattttttttctttttgttatttctttattattgatgttttgtatgactaaatattttcattgaatatatgaaacaattattatgtggggatttacttaaacggaaaatattactttttattatattttaacactcatggcttgtaatctgcatgcaacgcatgagctttatgacaaagttattttgcattatttctctactaaacaaaagtgaaaggaagggtctcctttccttctatgaaaatcaaaaaagtaatctaaaagctttaacaagggcatctcactcgtcttccactcgctcattatctgcaacaacgtaattatttgttccctatgtatttgactaacccagactatgacgtcgagattattctttagtagtttagtacgtcttcctctgctttcaaaaaacgtgtcatatactcctgtttgaattcggatacgtgtaaattgaattatatatcaaccttctagccgttttattacaacaacaacaacaacaagaaatctagccgatcactttactggcgcagaaaatgtcaaactaagcacccagttgcctcgctttttttcaacaagtaacttttttggattcaaaacaagtgagttttatagtatttttaaaagtaagcgttatttcgaaaaagataaggaaacgaatatagtatagacacacacgtgctagagtgctaggacccgacattcttcaaccgaggcaagcaactcgtcaaaccctgcctgtctaaagctgaccctcttattatttattatattgaacggagcacctctgattttctcaatttttccatttggccaaaaacattgaaattaatatataaatacaatttgttgttaatgaccgcaaatcagaagaaagaatatacataaatttagcagtaactgagatccatcgtaaatatcaaaaaaaaaaaatgtaaaaagaaatctaaagtcattatttttagtctatgcgagtcacagagcaaaactatccatattttagtctattatctaagcagcagtagaactgttagttatcgtaatcataattattggtgctttattatgctagaattattggtcctttattatcatcattattaatgtatggttatcatctaaatgtaattcaagattttggagacctattgagacgagggaccattgttagaagttcttattgttgagagttgagactggaaacaactatttgttttgcaagaaaaggttacaactttaaaagtgtgtaacaaagaaaatggacactaaactcgttgattatattacttcattcatcatctaagtcggcaacgaattgattaaatatggaaactaataattgaacgcaacccctaatctgcccataaattattgtcatgtatatacttgaaggttttttaaaatctcggtctttatgttctatggattttaaagacttattaatccttaaataaatacattctcttgtttgcattcttttaaaagacaactcgtaaaggaaaacgacaaagttcaatcaaagctttaaaaaaaaatgttttcttttgtaccatccattgctcaagtaaaaccactttccttttcacactagccaaaagaagagaagcccaaaaatttatcagattcatcatctcattgtaactctcccttgagagatttctcacattatccaccacttgcatcatcttcttcaacatttcagttttcactacgtctctttcaatctcttcatgcttcttcgtctacatctactggttagtgcgtcttcactgtcttcctcttcatatttcacaacagcttcattctctgaaattcttatagtaatccactcattgagtttttaaatccttcaaactcaatatcttgggtcccatttttcagcttaaagtctctgtctttatggtcaatctttacagtaataccctccacaattcttcttcgaaagttcagttagctttttctggagattataaatcaaaattttttcgtcaacaacactattaattgctctggtcaatttgttgatacttacttggtgatttgatatatctgtgggtccaatataagaaattaagcttcttcaagtgccatacctggtagaaatttgttttgaggttcttattcataatatcttcttttaaagtttgggtttttatttttggaaacacaggttttggattttggaatcatgttgagatgaaaccagtgtctctttccttgtatcttgctgttgttgttggatctctaaatcagacatgaagatgcttcgagctctgcttttgtgtctctctttagtgttcttcttggcgtttcagattgttgtttcagagattcaattaggttctaagctcgttgttggtgaaaacaccttgtgggtatccaacaatggtgattttgctctaggtttttttaatccacctggtttgcttaatcggttcagcattggtatctggtttaactccaattcaatcccttatgatcaacggaaggtcgtttgggttgctggagcaggtgttgtcgtttctgataacagctcttactttgagcttactcgtaatggagaattggttttgtttgattctttgttgggtgttccggtttggaatagcaagacgaaccggttctctgtatcctctgctttgcttcgtgatgatggtaatcttgtgttgttgaaagatagagaagagattgtttggcaaagctttggtactccaactgatactttgcttccaaaccaaaagtttccagcttttgagatgttaagagctgctagtgagaattcgaggtctagttattatagtcttcacttggaggattcggggaggttagagctgagatgggagagtaacattactttttggtcaagcggaaacgaagttgtgaagaagaagaagaagaagaagaatattggggctgttcttacttccgaaggagctctgtttcttgaggatcaagatctgatgagacctgtttggtctgtttttggggaagatcataacgacactgtgaagttccggtttcttaggcttgaccgggatggtaatctgagaatgtactcgtggaacgaggattcaaggatttggaaaccggtttggcaagctgttgagaatcagtgtcgtgttttcgcaacctgtggttcgcaagtttgttcctttaacagttctggatacaccgaatgcaattgcccttttaatgcttttgtatcggtctcggatcctaaatgcttggtgccttatcagaagccaggctgcaaatctggtttcaacatggtgaagttcaagaacttggagttgtatgggatctacccggctaatgattctgttatctctcagattagctcccagagatgcaagaagttgtgtttagagaattctgcttgtactgcagtcacttacacgaacgatggagagcctcaatgtcgcatgaagctgacccgatatatcagcggttactctgacccgtctctgagttcgatatcatatgttaaaacatgtttggacccaattgctgttgatccaaataatgtttctaaagagtcaccagtgactgtaacaaagtctcacagtatctgtattccttgtcttgtcggtgcaacttccactacacttgttctgtttcttggatttcagctcggtatcgttgtgtacatttaccggaggaagaagaagctagctaagaagaaagctgaacgattctccaaagcgacaaatccgaaaggtgtgatgatattctctgttgatgagattaaggccatgaccgataactttgacaataacataggaccacagatattcaaaggggttatgccggagaatgaacttgttgctgttaaagaagtggaagcaacattaacagaagaaaggaagtttaggagctctgcatccaagataggaacaatgcatcacaagaacctagcaaaccttgaaggttattgctgcgagctaggcaggaggtttctggtttacgaatatgctaagaatggatctatacttgaccatattgttgaccctttacgaagcaagaaactaacttggaggataagaactgatacctgcttaagcgtggctaaagctctttgttacctccacatggaatgcagagaatttgtcagtcatgggaacttgaactgcggaaacattctgcttggggaggatttggaagctaagttaacagaatatggattcggtttatgtgctgcagataaagatgttgaagattttggaaagacggttttagctctaataacgggtaggtacgaaccagaaggagtagtgagtgaatgggtgtatagagagtggattggaggaaggaaagaaaccgttgtagacaaaggattagaaggatgcttcgatgtagaggagcttgagcgggttttgagaatctcattttggtgtgttcagacggatgaacgattaagaccatcaatgggggaagtggtgaaggttttggaaggtacattgtctgttgatccaccaccaccgccttttgcttgtgcaagatcatcgcccactaactcgtcagagtctagtcaatcgttgtacgagccataaaggctctaagttagtaatgtttgtatagtttgagtatctgatttaacaacagctgtagtagtgaaggttgatgattcttgtttcattttttcggtaaggtctaaacttttatctttaattctattaagagaaagtaaatgttctattgcaacttgtaagcatctttattgggcctcaaagcgtccatgagccttttgtacggaccaattagaggatgatgtttactcattagcaccatgataaatcaagtgaatcaagttctgagaagtttaatgatgctcttgaatctcctggaagagaaggaggctttgtttggttcttcctgcgcgtcacgccacgcgcttgttttggcagagtctaaagtcttttgtacaagtatctgtagtggtggagcaggaccatgttgaggaccagaaccattagtgagcttacacgaaccttccttttactacaatccgaccgactttggccccaccagagtgatcctgagcctaagattcaaaagcagttggggtatatcagcggtgcagagagcaagatgcaaggaccatgacacatagaggctttgttccaaagtcccaacttgttctttggctgtctctttcatttgtctttctctttgtaatttcattggctgcttttaaaagttcaactgttaactgtcactaactgctgtctttttcctcccaacaaaggacaacgatcaatctaagtcttttgtacatccaaatcttgagttgtgtattcaagttttgcttttctaaatttgattcttgttcaaaatcgacaactaaaaaaataaaaaatcaactttgattcttcgagtcttgtcaaacaaaattacaatgaataatatcaacaccaccaaactctttcaatatcatcatcatcatcatatagactctttgaatgtttatctagtccaaggaaaaacggtaatgtaatgaatgaaataagttatttcaaataacagttctttttctagaacttaatggcgtcgacaagaatcccccttgttctacccggtgctcctccattaagcgaagatatatccactacaatcctgcataccattgtttaccacaaggtcaaattataacttttacatgcatagagagattatcagaaccataagatcattacttgttagctgcttacttattccttgtttcttttcctgtttcttgaataatgatcttatcttccattttagatactgcgtactcaatgggaagattgatcccctctactgcagaatcaaacaattacaaaagcaattactttccatattcacttatttttactatgcatagtgttaagtttctcactttctacaccattgacatgagcgagtccatctagccccaagagattctggaaacagatccggtaatgttatgcattcagaacatgacaacattttgagcaattaacaaaaggtggttcaccttgagcttcttgtagcattcctcaaggttgtcattatacaaaatgagaccgaaaatacccgaggatatcccttctttgatctctgcctcagcatttctaagccgcttttgaatttgctcctctgtctcggttcctctgtttttaagaagttgaactgataatgatctcccaggaaactgttatgaaagatatcaacaactcatattgtaaaagcctgctttttacctagcacggagccgatcttcaagctctttcattgaagggggacatacgaatatgaatatggcatcaagagaactcgctctcacagaccttgccccctgaacatcaatgtcgagaatacatctctgtgtagggcaaaagcaaaactcgttgtttaacaaatcaaagacacagaaagcatccgtgatcaatccaaaagctttcttatatacctttcctgaatctgttaccgcttcaacggactcaatgctggttccatagagattaccgtgaacagaagcaaactcaagaaactttccgtctttgatttctttctccataacttttttatcagcaaagtgataatgaacaccgtccatctccatagacctcggagatcgagttgtgtgactcacagagaacccaaacattgaaggaaactccttcataagcattgatataagcgttcctttgcccacaccagaaggaccgcttataacaataggcttctcagcattgcctctcacacctttactccaagcaacaacttccttccttagtaacttcttctgttcccgcacataaggactatcgacctatcaatgttccaacaggtgagaactccaaactgatacaccacaacatcctaagttactgcaacaaattactaacctcgaggaaccagatggagtcgttgcgaggtgaaccttttttaataaccaaaatccgaccttgttcaagaacaaacgcggagtaccccttgctgggcttaggacctgtcccaagcacaataggactaaacctacaacacaaagtgtttctatctttaagaattcttctgacatgcaagtacaattcttgtcacagaatttaaagaatctacataacattcacgcgcaccagttgttactgattttgtcataaatctgaaccccaatggaaaaattgttcctttcatgagttccaccgatcaaaaactgcaaaagataaacctcagtcagataattatcagccagcttaaacagatttggatcaaaacattaagtggacttactattcgatcgccgacatcgactgttatctcagtgttctctggttcagatttcacacagacaccattggagtgtccgttctccggatgatccactaatactgctggagcttctccctaataacaacaattaagaaaatagaaaaaaaaaactatcaatagaagaaattaaagaatgaagaatcaaaatttgataactttagtaaccatccattgagaaactagagttctctagcaaatggagtgaattagccaaggaggctcaccatagaaagattctatgcctccaagaagaacaacaacacagcctgaccaatggcactacaatcatatataagagatcaaataaaagcataataaaaacaaaatctttatctgattttcaacaagaactcaaggaaaataatgaaacactttagtcaaaactcaaatgcagaattcatggaaataaagacagaatctgtaacgtaacacacaaatcgataatgaaaaaaggtatcaatgggaataagccaaaacaaacaagaacccatgtttgttcgtaccttgagtatgaaacaggagaaagaccaatgctttttgggattgcaggagaaattagagttcttaattgcaataagaagattcgattttctccagagtttttgtctcgatttgtaatcccttgtccgtatgaatgtgtggattataaaaggagacaacttggagatgatcgagtctcggtgtaggcaaatctctgcttctctcggtggcgcgtccttgttattaaattataggtcgaaagagagagagactcagagtcaacaggtggctcctaaattggttttttattttattttattcacatttacttgtcaaaatattcgtactatagttttgttaatatgcgattaaatctaataattatgacaaatttgacttttcttatgtaaaggttgaaatacagttggatttcggttgcgctcactgaaacacgacatttttttttaatttaatttcaaagattatagtaaatttcataactaatgtatattttgcttgcatgcacgtattttagtgccaaatttaattcattttgcttctgtctattttttagatgaatttcaattacagaggtttgctatagaattgaaacaaaaatcctatttttataaatggaaatcattaaaaaaattatacagagagcgacacgatatttataatgttcaagatgcaccgactgttttatcaaagaaaaaaagatgcacacacttaaacaaatggattgagtttggcccccggagttatacatttttgacagctctaaatgtgattgggtaagaatacgtgacttcttagttcatagttctaagagaaacaacttaacaagttagaatgcttcaaattatgggaacaaagatatagcttagtgggtaccaccaccgctcattattcgattgaagaacaaatgatggagaggaatttgctctgccaaaacattgttgtttgcagagaaaacttcagttgctaaatttctggtttagtacctttgtactttctccaaagaaatacattactacatttaacatctttgtgtaaggatttcttatgaaaaagggataattgaggatatatagcaagagttgccagaagatctaacatgttggaataagtctgcttaagggatctatacggatgctctctttcagtcaagtttattacagtatatggatattttattctctccggagacataaataacttcgaattagtaaccactaacaaaatatttttggatggcgaataaattatcgtagatgacgggccttaaagggccatccaaatatgtgattttatgggccatccaactgtatatgtttatgatgttggtttgtatgaaatctataaacataaaagacaatgtggatggcagatcaaaaagataagggaaatgtattgggccatgggaaaaggttgttagttgggtctagtttaagactattgtcggaaactcggaatacactcaattaacctagcttcacaaaaataaatgaaacacgtatacaaaagtaacctatatgtgttatcggtattcaaagaatttatatgttgttgataatgcgtcataaatgtgatgaaaagacatagcagacagatataacaatttgctaaaatcactaccaagcttctcagaaaatacaaatacactcaaacgtgacatcaaatacgtggccacgcacaagtggtgtctccaagtcattagattcattttatgatgctgacatacgtgactcagtttgccgggaatgtttaactaatcaaatatggccacgtagacatcaatcttttttaagcgacatgtgtattatcttgttttcgtggtagggtctgaacttgccgacactcgctcttaatattttagtttctcccctaaaaaaattgtctcgtttgttttgctctttagaaattaccgatttacgctgaaaaaatgtgaaaaatacaatcgatcgcattatctttatccctagctaatcattcatgtacaagcatgtctccgaaggttaaaagcagtcgctatttaccggaccaacgtagttttctcgaagtggtggtccgttgtcatattttaaatttatcaccttcttgagaattccacatttttatcctttttgtcatgtagtgtatattttttcctctaacctaattaaaatcaaaacaaaatcctttgacccaattagcttcgcgatatatcagaagagatcaaactactttgatcagaccatgatcttcttcttcttcttcttcttcttcttcttctttttagacgatcacaattcctaaaccctatttctcagattatgctgactctttaccatcaagaaaggtcaccggacgccacaagtaatgatcgcgatgagacgccagagactgtggttagagaagtccacgcgctaactccagcgccggaggataattcccggacgatgacggcgacgctacctccaccgcctgctttccgaggctatttttctcctccaaggtcagcgacgacgatgagcgaaggagagaacttcacaactataagcagagagttcaacgctctagtcatcgccggatcctccatggagaacaacgaactaatgactcgtgacgtcacgcagcgtgaagatgagagacaagacgagttgatgagaatccacgaggacacggatcatgaagaggaaacgaatcctttagcaatcgtgccggatcagtatcctggttcgggtttggatcctggaagtgataatgggccgggtcagagtcgggttgggtcgacggtgcaaagagttaagagggaagaggtggaagcgaagataacggcgtggcagacggcaaaactggctaagattaataacaggtttaagagggaagacgccgttattaacggttggtttaatgaacaagttaacaaggccaactcttggatgaagaaaattgaggtaatttttttttataattaaattccggtcccacgtacgatgattaatttagtaacatgcgtcagatttggatttgagctatgggattaagtattggggttagtaagctggttaatatagaattagaccatgtgatagtataattaagtggacttagttggcacttggcagtataaacattttttttgggtttatcgccatttggaatgtcaaacgtaatcttctcatctgaaaaattgtaaactatagtaggaatggtgtggtggcataatttgtctgtaattaggtgtgagatggttagttctctcacatttctagcttctaattaatgtttttagtcttttaaatagtagtatttatttaccatcgtgcatggcatcgtcatttccaattatacaaacattgttgaattacctttccaggattcataataattaatatagtgaaaaatattcagtataatgtaggttcattcaacaatcgtctaaatggtgatcattcatgacgggttcataatgtatacatagagatatgtatgtataagttaagctaacaatttgggatcgatgcatgcagaggaagctagaggagagaaaagcaaaagcgatggagaaaacgcaaaacaatgtggcgaaagcgcagaggaaagcggaggagagaagagcgacggcagaggcaaagagagggacagaggttgcaaaagtagttgaagttgctaatctcatgagagcccttggacgtcctcctgccaaacgctccttcttctctttctcctaatttttagttatatcaaaccattaaattaaacagtactcgttatatatctagttagtaaacaaaggggcagttttatagctcatgtacacataattgagagtgtagtactgttgtgtcatgtgtggttttgtacttttcttagttacacacaccatacaagaaaaaaagaagattataattcaacttaattttgatttttgaataatgcgtttgtataagaagtcaaataaaaaattcgtttctactttctaccatccatctctagtgctttgacaattcaaaatttcaatttaatttacaactttggctcggtgcaaccctctcactgtgattcaaaagttatgacaaaagtgttgtgaattagtccataagagagaaaattactattaattaacaaaaaaaaacctatgaatatacgaaaatttcatgacagaatgtatgctctaacaactaatcaacataaaaatctatgaattatagattacttgactgaaaaaagaagagtagagctattacgaggaaaaaaaaacaaaaggcaatatgtattttgttttggtttgtttgtttttgtaaattttttatttaaagtggctctgtatgtttttttttgttaattatttgacttcgcgatgagttaactgaatttgccaattcatcgaatgccactaattaaagtgtatccctaattcattggaaacaaacaatggattttagaatttatgcgcttgtctagatacatatgattactaccacaaatgaaacaaaataaaataaatattgtgtaagtgatttaataagcaaaaattaagttttctcatgcccatatcaaaacataagatgatcttaatcctaaaattgttctttttattttggaattttttcttcgtccagaattgcttggataatacggcaaaaataatctaaaaataaattattaaaagtaagccatatctgatttatcaaaaaaacaaaaacagaaaacaggataacaagaagaaacagagagattagggagggaaggaatttgtgctttttcaaaaaaagaacttccttccatatctctctgtcatttttgccttcaacctttctgcatatatttgaataaatacaagaaccctttgatatgattcgcttcgtcttctcagattccaagtcaaacatcctttgattccatttaacttactaggcttccccaaagttttttccagaatctgtttctaggtttctttatctcccctaagctttgggaaagatttgattagggttctcgttccttctttcacttctgcaagaagttttcaatcgtttatttaattgatcacattttgtataatgggaaattgttgtggaacggctggatcgttgattcaagataagcagaagaaaggttttaaattgccaaatcctttctcaaacgagtacggcaaccaccacgatggccttaagcttatcgtgttgaaggaaccaacgggtcatgagatcaagcagaaatataaattaggtcgtgagttaggtcgaggagagttcggtgtgacgtatctgtgcaccgagatcgagaccggagagattttcgcatgcaaatcaatcttaaagaagaagctgaaaacgtcgattgatatagaggacgttaagagagaagttgagatcatgaggcaaatgcctgaacatcctaatattgttactttgaaagagacttatgaggatgataaagctgtgcatttggttatggagctttgtgaaggcggtgagcttttcgataggattgttgctagagggcattatacggagagagctgctgcttcggttattaaaacgatcatcgaggttgttcaggtttgtgaaacttttatctatgaatcttgttggacggtattgatttgtaacattgcttgaaaggcacgtttttatattagagtaatgtggtttattcaatctgtgttgcagatgtgtcataagcatggagtaatgcacagagatttaaaacctgagaacttcttgtttgcaaacaagaaggaaactgcatctttgaaggctattgattttggtctctctgttttctttaaaccaggtgatgtattatcatcttcgatgcttggtttccacggaattggaaggaatcttacccactaatgtttttgtttgcaggcgagagatttaacgaaattgttgggagtccttactacatggctcctgaggtattaaggaggagttatggacaagaaattgacatttggagcgcaggagtgattctttacatattgctctgtggtgttccacctttttgggcaggtttagttttgtcaaaccacttgtcttgtgtcagttcttgtagaatcatacaaatgtaaatgacaccttcgctatctttgtttgtttgcagaaaccgaacatggagtcgcaaaagcaattcttaaatctgtaattgactttaaaagagacccctggcctaaagtttctgataatgcaaaagatctgatcaaaaagatgcttcatcctgatccaaggcgtcgtctaactgctcaacaagtgcttggtatatatcatctctgctttcaaatgcaatataattgtttttttggtgctcatatgaaaacaatgttaagactcaatcatctttggtttgtagatcatccgtggatacagaatggtaagaatgcttccaatgtatcattgggtgaaaccgtaagagcaaggcttaagcaattctctgttatgaacaagctcaagaaaagggcactcagggttatcgctgagcatctatcggttgaagaaacatcttgcataaaagaaagattccaagtaatggatacaagcaatagaggaaagattactatcaccgagctaggaatcggattgcagaaactcgggattgttgttcctcaagatgacattcaaatattgatggacgcggtaagctcttaagcaagtagttccaatgctgatacaaagtttcacacgcaatgcattgactatagtggttacgtttgtttataacagggagatgttgataaagatggatatttagacgtcaatgaatttgtagccatatcggtacacatcaggaagttaggcaacgacgagcacttaaagaaagcttttacgttctttgacaaaaacaagagtggttatatcgaaatagaggagttaagagatgctttggcagatgatgttgacactactagtgaagaagttgttgaagccattattcttgatgtcgataccaataaggtaagatataagtgttgtaacctataatattttctatacgtgtaaaaagactaaaaaatttgatgttgttgaaccgaaatgttgtgcaggatgggaaaataagttacgacgaatttgcaacgatgatgaaaacgggaacggattggagaaaagcttcgaggcagtactcgagggacctgtttaagtgtcttagtcttaagctcatgcaagatgggtccttgcagtctaatggagatacaaagtagagcttgaaatacgcgacatggatacttattatcagtcgcagaatattgaactgaatctgaatcaaagggaagaaaaatatttgttctttctttttggtgttttatcttcactttctcacaacttgttgtttagtttcaacgggtatcaattaagctt

SEQ ID NO: 365 - DNA, 56635 bp, Arabidopsis thaliana
aagctttgttacatagctgttgactacgagcaagaaatggagaaggctacaacgagctcggcaatcgatagaacctacgagcttccggatggtcaagtgatcacgataggagctgagagattcaggtgccctgaggttcttttccagacgtctttgattggcatggaaacttctggtattcatgagacgacttacaattcgatcatgaagtgtgatgtggatataaggaaggatttgtatggaaacattgtgttgagtggtggcacgacgatgttcccggggattgcagataggatgaacaaagagatcaatgcgcttgcaccgcctagtatgaagataaaagttgtggctcctcccgaaaggaaatatagtgtttgggttggaggctccattctggcttctctaagcagctttgcaccggtacatatgataatattattaactgttttataaatttaacgtgcgtatagatatctctttttggtgtgttgtaatgtaaagttgcgatgtctatatgcagatgtggattactaaagctgagtatgacgaacagggaggggcgattgttcacaggaaatgcttttaagtttataatttagcaattctaaatcatgatggtcatcatgttctttaattatgctttctttttaatgctttgtttaatttggtgaaaacttgtaatgggagatttcaaatatatctgattttttaaatatatttctatgtttggtcaaaagagcaaaggatttcgtgatttgagttaaaacggaaaaaaaaaaaaagaaaaaaaaagacgagaaagatgtaacactaaacgtgagaataatacaaacgaatgtaaaatagtgagaaaagaaaaaaagattgaaaaagcttaaacgacgtcgttggtgagacgcctgtgtctgttataatgcttctcgatgaaaactcttgaagctccttccattgttttacgccatgtctgaccaattagagcagagtatgattttaaaaataaagaaatttacaaatcaattaatggaaattggattcagtaattattataccttgccgatggttctgacgagagacttgttcctgagatgtgattttccagaagcaagctgccggataaacagagatctccgtttactcgccggggcaagcaagagccgtttcctctccactaagccactagtgttactttcgatgtcaacgcccttctctcgagaagaactcttagctgatttcttccggcgtttcgttgactttgacgactcgtcgacgtcgtcaggatcggcgaacttacggagcaattcgtcggaggatttcttgttcacgtgagtgattttcgtcggaatagtagtctctgtgataacaacaagatccatattctcggtaatgtaagaaagacaagtagtgagtgagaaattgagagaaagagaggattaaagtgttaagtgtagaagatgaaactgttttgcgttataaaggaaaggttagggaaatgcgggaaaatggaccgttggagaatataatgcgttacattattgcatttaattaattttataatgtaataagtgtggatggatatagccgttgagaagagagagagagacatttgcatgagattctgtgcacttgttgctttttttaagattatttttgcagtcttttcacgttcttctgaccaacgaccacgacactatctggtcggccctttttgtcctttatgtgactacctaagaactcgtgtcgagatttttagaaaattaggacaaaacaatgagcattaccaatatatccaaagatttggaagttccactcaagaaaaaggatttttaacaaacatttggttagaacataggagtgtgttactgaaaaagctcaacattacatcttcaagacaggaaataatctaccaaagtagcaactcaatgttatgattggtttatctgagtgctaaagcttaaagtgtgacattccagatttcttaggttcacctgcgaaatagacatggtgattttgagatttagaatctgcaatctatgagggtaaatggtctcaaattctgctcaaattttaaactcaccgcaacagcaataccggtctcacagaacttaggaatgcagatcaaccggacaagctgcccttctgaccctgcagcattcatatttacccaagaaaagttaaagcctgatgtttgacaaaagagaatgttatttctaatctctgtgtaaggtgcttttaccctttatcaaacggttgtcatatttatcttgattcccgacgaagtagacatgcgggcaggtttcaatcaagaaagggtctctatcggtgaaaggataacaacctgtacgcaagtgaatcaaaaccaaatagaactcaaaggatcatttttttatgggcttagttcaaaaaagtaatcttgcagggcaaggagaattcttaccgagtgtattaggtgcagttggggcaagatgtctccacctcagcgttctttccacaaaatcaagcttgctcttagcctctgagtacttgccaaggtcatcgatgttctgaccagaagttccaagaaatctgcaaaatgcccccatatgaggttttcagtcagataaacccaagaattttatcgttgtaaaatcagagagattgtattcaactattaataataatcatacctgatattatcgacatcaaatgagtgaggatttgtacatgatctgaaggtgttataaggtgaagatccagggaaaagacatctattcagaggctgaacaaaagagaagggcctatgaatcagagttatcgatacaaaatgcgggattttgaatgtttcttatgtatttgcagacctgctgaggcaatgcgaagttagctggatcattcgtgcctggcatgatatctactgaaactcctgcagctatctaaaaacaatccacaaaaaaaaaaacaggagtttgaactttcatctcaatagatatcgataacacacacgtagatccagttaactgacctggcttaacatgatatcaagctctttgatgggctcatacagtgtcgattgatctttcgaggccaagttctacaaagatcaaccaataaagatcataagacataactggggcagataattactggaactgtatctgagaatatatcagcaacaaaagttataagtacctggccattaatgagtttgcggggaaattcaaaagagtttccagcaattactacatgaactatctgtgctgcaaggccttgttcctgttcaaaccataaagtataaattaaggaaagaaatatgttgaacaacctgcaagttaagagatttgaacctcctcatctccgagatgcccagttatatggtcaacaagaagctgaaactgcaggggattagccgatttgcttccaatacaaaggcccgacaataacacgacatatttatcttcctctgcagatgcaatatggatgtatcatgagagattgcttatagaaatgattgagccatgaggttagcaaaaggaagagaacatagctagacttacgtagatcgataggccgctcaatctgaggtggtaaaccagcttctagtacatcctcaacaaagaattcaccagcattagtttccttcccatgcagtgcaacaacaacacctacaatgcacgggaggcttcaacgttaattttcttaaagaacccatcttttaagagaggaaagcttgatcaaaatctctaagatttgccacattgtaaagaaggaaaaaatcatacagtaaaaacagtaagaacccatttgcaatacctgtcacataaatcgcaggtgaaagtgcggaaccagcaagcttaactctcccactctcgtcttcgaggatcagattatcatcaggatgcataaagttatgtggtttaacaagcggagtaactgacctctgcattatgttaaatatactcagattgattcagcatagacatagctcaaaaaaacagtagaggttaataaaaaccaacctctttagaatattcatcgagaacacaaggtttaagcttcatgtgtttgaacaaggttcccacaattatgcattcttttcctttttcaagtcccaaaaccttacacactgcaaaaatgaaattcacattcagatctataatttaaacaatactagcaatctttctcaactgtaatccataagatagcaaaaatccctaaaaatcactgatttcacctaattatatctaacccaagaaaattctcaaaaactgctcttcgttgttgtgctaaatatgagagaaacaaaagcactgaccaggcaaatgagatttccaagtaggagcaagagagtagagaagtgttctcatgagatgaagacgagcaaagtaaatctgactgtattgctgacctctgtacatctccttctgtatctcgaatctctcatcctgcttcaattgcaaaaactcagaatcagataacaaaccctagcccgtacacttataagtagaaacagtcaccaccacgaatgattacatttgtctttcactacaagtcgataaagtaatagagttcgtaccagcgaattgtaatcggattgcttcctttcgtgaattttctcggagtcgatttccatggcgggaaaaaaaaactcagaactgagcagaaaattctgagaaaaggtttcaactttcaactttggcactaatcgacgacaagagtcttctttcttttatgaacaatcgaaccaaacacaaaacccggttaactgtaagaggtttaatttgaaccggatataaaccggttgaaccagacactcccaccttaactcttttttcctgaggtttggttgctcaaagcaaacaaattctcaatctttcgtttttcaccttcttcttcttcttcttcttcaatggcgttgatacatggttcggttcctggtacgtctgcggttcgattggttttttcaacctcagcgtcaccgtcgagattttgtctcaatgttccggtggtgaagcagggttggaagaattcgtgccggagaagggttttaagagcaatggtgcaggaaacagttcaaggatctcctttggtttacgccagagaaatggagcgcctttctgctaaggaatcgctacttctcgctgtataacttctctcacttttataaactctttgaattacttggttgttatgtgaatatatgatttgtttagatcttcaattttactctgattttgaaattgtgtctcttttactatctctgtcgtaagctgaggataaatgggaagactttaggtgaattgtgtatttgttagatgtaatcgagattttgcagataacaaaagagaatttttttctcaaagtccagaaattgaatgatcatgtttcagctcaattgagtttttcttagtataggaacagagctctgtgtgtttggaactgtcaaactatttttgtcctgaagccatctatgtacagttgaaggatgctggaggctttgaggctttagttacagggaaaacaactaatatgcaaaggatcgatgttaatgagaggattacgagtctagagcggcttaatccaactccgagaccaaccacgtaggtccttctttaatcttttggttacaattttttgcttcggttttaggataattgtcttttaactggttcctatagctttccaggtctccttgtttcgaaggcaggtggaattttgagtggtttggatctggaagtcctggtttactcgctgctcgagttatattcgagtctgtacttatcattttctcatcttaaagctcaccaaactttattcaacgttttaagtgttttgccatctgattgtattgtttcaggaggtttccttcaacattggcgaatttatcaagaatggagatactgatcaaggatgctaacgcaaaggcgactgcaaatatcaaacttttgaactcggtaacacactcaaaccctttttccaaagtttgattatttgtttactcagaatcacaaaggaggtttctcacagtggcagaaaaatgcagatagaaagcaaaatcattctgtcatcaaaattgactgttgagggaccactgagattgaaagaagaatatgttgaaggtatgcttgaaactccaacagtcattgaagaagcagttcctgaacagctaaaaagcgctttgggacaagctgccacaacgttgcagcagcttcctgctcttatcaaggatactctagccagtggtctgagaattccccttagtaagctactttatccattttttatacatttaaccattttccgctcaaatctgcactgaaccaactagtgatgtttgcttcaggtggatcctttgaaagatttttcatgatatcttatctagatgaagagattcttgtaagtttgttgaatattttgttaagaatggtgagagagactgagatcgttgcactaaccgagttttatccgcttttggttgttttttctcgtagatagtaagagataccgaaggagtgcctgaagttctaacgaggatagaaacaccatcatcgaccgttgtagaaactatcgaatatgatagttagatgtgactagccattgttcttgttcttgttcctatgttctctgtgtgttatattacaagaaccaaccaccaagttggtgtctgtaaatgtatgacgttaataacttgagggtcatctccatacatcaaaaccccttccttcttttgtgttcgctcggcaaatcttctcaagttatccaagtacttgcagattctctgttttgatcatcttaataaactctttctatgtaagaggcagctcagatttaatatttttcttagttgatttataatgccaacttgatcaaatatgaatacatgatgcgggttatcttttgatgtgtcatgtgtagttccatcatcatcatgcatcatcaccatcaccaccgtgacacacatgcatatatacacgtttgtaattgtggttacttgtcggctcatatctgtaattttaaaatattatatttgttatcttgattaattatggtcccatttgtacttatcttatgttaagtatcagtcaatcgatcaataagtctatttctcagtccatttggataagcgagaaaaacacatcgcaagtgaggaaaaaagtatacatagaatttctaaacgtccattatattcagatagtgttagttaattacgctatagccaatcccaatgatattttgttatagattttcataatccttacatatttaataaggattttcttggtaaaaagtttgcgaaattctatttgtgatttatcattattataatgtggatttgaattatatagatttataaaatttcatacctacttactagattatagtgtaatcatataaaaaatacaaaaccagagggaaaaaattatgcagaaatagaactcgtaataatcgtaaacccgaacctcccacgattccacaagaatattgtctagaaagtcaaacatttcaattatcgaaaaaaacaaaaattagcttctagaaagtatataaaagaagaaaacaaaaaattattaaaagttttaacctattttaaagaaataaaatgtttaaaagattcttccgcttgagacgttttaggcgtaatggtgaggttctgcgaaaacgttgccatgtaagtgggaggaagaagcaacggcagggtcaatggtgaagggtaaataaggaaattcacctagctcctgaatgaagccgtcgagatctcctaacccgttcaagaacccaccggagctctcgtcaccatttccgttccacgtcatcgacaccatcccttcttcctcttcatctgagtttatgcaaaatccatggctcttgttcatgtcatggacttcatgatgatcatgacttcttctagatctagggtttcttttgagacccttttggtgggggagatcgtggtgatgatgatcttgtttcccggtgagattctggacgatttcccggaagttggcgacatcggtcttaatgatctccggtgcgaatatgtgaatgattcggatcttaggtttagatttggtgagtgttcttgactgtttgtgcatggctattgttggtaagcttcttcttttctgaacagtagtagcttcaatttccatagttttgtagaagaataaaaattagggtttatgtgatcagaagagagagttggtgattttttttggtaagtgaaatgtgataaggttaaggttatataggagaaaagatagaagaaaatggtaaagaaaaatcaactattttagatgtacaagttttagtgacaactaggtaatatatgtttaatccttttccttttctttttcttttttgtcaactcgtatttctagtttatatcgtagcagaacgtaaagatcctgaatatattattaataaaggcaaataatattgattgatgtcttgttgagattcaatagataaactatagtttgaataattaacatacaatatgagattacacttatattgaatattgatgaaagagatgtgtcaggctgtctccgaagacatgagatttatgaatccaaaggaagtccagggacccctccaactataacaaaatcctcgttttggaatgtcttaagacattaattcattatatttttagcatattgtaatttagtatcattgatattaaatttttgtggtcagagatccacgtacgatattgcatgtaatttgtaatcgttttcgcattcatacaagtaaatgtgtacacatggtgtaaaaacgatacaatattaaagttggagtttatataattcatgaaggtgacacatacaatatttccaattgaaatgtattttttatctcaacatagtcgaaataaagtaaaagttgtcattagtatatttggcaatgtgtgtttagttaaggtattacgcataaatccaggtggcttcaattaaataaatgcctataggattgcagaaacttgtccccatgtaatgtacacaaactcaaccaccttatcatttgcaatctctaaagttcaacataaaaatacaatttgtgtggaccactaccaacactttttataatctatgattacagccttaacaacgagaatctcagatagtacatgtttaactaaactaaattggatgacataatttgaaagaattatatatgcaaggtgtaaatttaacgtatagacatgtcttgataattaagaaccacaaatgtcacagctagtggtatatataaaactaaattttaaatacgtatatatgtgtgtgaaatgtcatgataggttaataaccatttaaacgaacttatgaatagtaacaagacgaacttatgaaatgaacttgtgaaatgtcatgagaggttaataaccatttaaacgaacttatgaatagtaacaagacatgaaaagataagaattaatgtacactttatcaccaaaaaaaggaagataagattgtacgaaatcggacgtaataatgtaaggacatggaaatggcatgaccctcgggtgcacgaggcagttccacttcctgacgactctccattttacttggtttacttttatcttatctcttttcctttttaccttgcgaatcaaattgaccttttaacaaattcaattcctaagtgtttttgtacaatatttgtgaattataatgtgtagtgtatgtctatgcttgtttgattttctaacgcttgttggatataagaaacaattatcttgaaatctctacagtacttatcacatccaaacacactatataatatattggacaagcgatacactgtcttatacaaaacaaaccaatcacaaacaaatagaaaacaatacatctgtttcgagtcaagtaacgtcctatatattttatatagaaagtataaatatacacacactagttgaaaaacttgaacaagaacatgttagagggcatacatatatcattcttactaacaagagatgttttgtataattaagccaagactttctaatattatatttgtgtggtatagatatcataccaacaattgaactagaataagcaatatatttaccatactatatcttgtttacctaagatttaaaacggataatagccatcggatgtacatgtacacgtgaagagttgggatatgaaagaaatccaaaggctgagaaaaagaaagagaggtgaaactccaatgaaagaattgggtttgtatacggaaacacgagtcttgtgctctcttttggatccggaccacacgagcggctaaagaagcaatgttgtcaaaaacgttagagccgtatgggttatgggccccaccatctctttacttgacgtggttcccagttccaaacttgtgttgtgtatatatcttgtttggctggcaattaatttttgaaaattttaattcgatttctgaggacaaaagtggttgctgattaatcaactaatccaaatttgcacaatgctaattcaacactcgtgctgcattaggtgaaaacttattcacactgggaaacctgcctttttatatagtatagattgtttctcatgattattgttgattaattaaaacattttttaaaaattagtgttgcaaaagaaaactaatcttatatgttgttttattatatgaatgtagatgcggatatatgattgagtcccacatgctaacacgtattgttccctgctggggaagaaggaaatcaaaatcatgggagaattataagcatattcactcgcctacctaccttgattactcatcattcataatttcatagaatcattttccctaaagaattaaatacacccttgatttataaagtttaaacgcttaaaaagtccaataacgagagggcctttgaatcggattcgcaattatatttgtaacaagtaaataattgggccgactaaaggaatgaatatacttccaaaacaacattctcagtcggtgcatatggtacggacctaacgaatccaaacctaacaataaaaagaaaacgttacaaaaaaatatgtaacagagaaaataacaaaaatataacgaagggaaagactaaagaagagacacattcattaacaattcatacacctttgttcaaatcaacgaataagcttctttattttaatggcaaagccggaaaatgacgtcaccttaaccgagaaacaaacatggagcacatgggaagagcttcttctcgcctgcgccgtacaccgtcacggtaccgaatcatggaactctgtttccgccgaaatccagaaactgagtcccaacctctgttccctcaccgcctccgcttgccgccacaagtacttcgacctcaaaagccggttcacccaagagctgcccgtaccggaatccgtcgctgagatctcaaccgctccttggctagaggagttaaggaagctccgcgtcgatgagctccgtcgcgaagttgaacagtacgatttatctatctccacgttgcagtcgaaggtgaagcaattggaagaagagagagagatgagtttcattaaaccggacacggaaaccgagaatttagatctagagaggaagaaagagcgtagcgattccggtgaaccagtcccaaacccgccggttcagctaatgaacgaaaccatttctccagatcccaaagaaatcggatcggaaaacacggagagggaggaggaaatggccggaagcggcggcggagaatcgaagcttgccggagaggattcttgtagaggaagctgtgaaagtgtggagaaggaaccgacgacgaactcggagagagttgaaccggtgagtgtgaccgagttgatagagtcggaggacggagcgagtcgtggagaggagattactagtgatgtgcagagctcggcgagcttgccaagaaagggaacgtcggagccggataaggaagatcaatctccgacgagcgccaaagatttcaccgttgaatcacagccgttgattagttttgtcgagattcttctgtctcatccctgtggttcccacttttcgcgccgactcgaacgtcaggtgaaaattgaaattctttctttctttatttaaataaacttaaattcttttgggttccgtgaccggttgggccgaaaccacgtcgacatcctcgtgataggagcatgcattgcaattaaatacttcaaaaaacaaaacaaaatccttagtttggcttatatttctacattgttctaatggcatgcattttctgtttgaagctgcaggaaacaattgagtacggtacaataattagagagcacgtagattttgagataattcggaagcgagtcgaaggaggcttgtacaaaagttggaggatcaacttctttcgtgatttgctgctacttgttaataatgcaagagtgttttatcacagaggatcttcagagtttaaatttgctgagcagcttcaccaactcgtcaagaaacagatgactactactctcaagggacttagtaatagagatgagatctcaatctcaccaccaaaagaagaagttgttgcaatcccttcatcaaagcctgtttcttctaaaccaagaatgtctgttcctaatattgtagcttgtcggaaacgtagtgccttggctgctaaacctttgctattattgcctcctggaccagataaaaaggccaagaaaacagatcatgttgtggactatgatgagaagccggtttcagacaaggatggtgaagcctctgggaaagacgatgatgactctctgattgtgaagataatgactagaggaagaacctcctcgacgggaaaagtagctaacaggaacgacaagaaccgtgactccagtttgaatgttgatgatagcaaagataaggttaagaaaactgatgaagagaagaaaggtggctcgaaaaagaaaagggctgcgagttttctcaggagaatgaaagtgggctcttcggatgacacattgaagcgtagctctgctgctgattcttctactacgggaaaaggaggaggagcggaacagaggaagaataacagcaacaaagctgataataagaaaacaccgataccaaagataagacaaacaaataagaaagcaagtcctgtgaagagaagcaataatggtcgaaactcagaaagagaagctgctccatcttcttcatcttatcctattctagcaaagcgaagcagagatgctggtgaaaaagaggaggcgtcttcttattcaccacgcttgaagaaacgtgcaaggaggtgatttagttattgtactacttctataacttaacttgagatgaaaatcagaaactaataaattccaaagagtcgcaaaacattcgaaaggatatgcttatagatatatttgggcccacaaaaggatatgtctaataataggtgaaacacgaattatgggctttagaacgtgatcatgagcactcaaatgaatagcaccttaatgcaaatatatatcaatgtagtagtcctgaatatacatcaagcctaagtaaatccctataagcataccaaatctgttctttactttctccggtttgacttcttttgccttctaactgaggaaactggctcgggactgataggcactggtaagacggttccttcgcgtataccatccgtatctgatgacatcttctttaaggttttcttggcttcaatgaagaccgtaatatctcttatctgtacaatccattatttaccaggtcattcgttaactgttaatagcaaacctcaataagtataagaaacttacctgttcttgaagatcagttatcatctcgtcttttgatcctagcaatgcagcttccctagataaacaccaaaagataaaatcattcctctactatggctgatgatagtttatgtaaaatcaagaaagaagagcaaacacatcttgcacctctcttctatttctttggccttcttccgccaagtatcctgctcttttataagttttgtgttaacctgaaaacccaatattgcataaggaaacctttcgagaattgaacaatgatcaactaggcagagatactcttacttcagtgataccacttttttcctcttcacatttttcaatcttattctgaagctcctgcattgtgttaacaacaatttgctctactgcttcggcaatactactttcttgcttgcttctcgcctcaacaatgagagattcatagtactgtaagacatcacaattgcaagtagttgagatctcttgaatcagtatgccattaggtggctacaacttcaccttctattaagtctgttcatatatacataagaagagaaagaaacaagcatcagaagaaccacttgcctgtcgctgtccctttagttgacttgcaagaaggtcattatactcgattacaatctgttccacaaaaataaaaccactgaggcaaactgatgatctaagattcatattctttttccaggaaaaaaaaaatggctaagggtggttgaatatcatactgaatcaactttgctgttaaagatagctccgctaattcctgtatcctcactacactcacagaggccacagtccccctggtgtgacagacaactggtgctcatctctactgactttccatcaatttttgaatggtttaaccgatgaacatagctgtcaccaacataatcccagatttgttgtgttcgcaaatcaagagaatagcagtgatgcgtttctttccagtgcctaatagaatgcccttccttgtatctaaaattggaaaacagaatccactgtgaatgaacttccacctctaaagaagataaaagatgtggatataaattcaggttaactaaatcttagaaaggcaaaccaagaattaccttccacaacctacgaagccacagacaaggcatgcccatacattctcagtttttccacaaatagaacagtttaatatctcatcttgctgttgacacaatcgacaaacctacaaacgaaatgagcatgttgtgacacaagtgcaaggtatttgttaataaatggatgaatcagattcattttatggaacaaaatgtattagctgagggaacactgccaataaatgaacaccgaaaatgcaacactaacccatcatataaagtggaaattcaatgaaaggaatgaaggagaaccactcacctgacaagacagataagtccatttcgaagtgcaagaacactgaaacgagtgatcacaaagagtgctaactataccactggtgtcaggatctaatctctctacaggagtcaaatcccaaatatagatatcagaaaaaaaggtactgaagaattcaaagtgataataacatagaaaacgtcttctttagcacaaaactcaccaagacatattggacacgtaggtaactcggtaaatccagtaggtgcttctgcagcaacctcatcaaattctgtgtgttccaccgacattacatatagaatatgacaaacctcagcctaaaacccaaagaaaagtcaatttcatgcaatcaaatgaacataaatacaaaataaacgataagctcgtttccatattataacctcagatggtgcgaactttttcccattcaagttgttgtagaaaccatcagcttcggattgatcagaaaatgtgataagaacactatatctatcttccattccatcgttcctgataatttacaagaatcatcaaatcaacataatcattctcgtcaaatcaagtaatcacaacaccaatgaatttcttgaatttgatcatctaacagataatgaatggaactttcaacgaacctgatgaagaggatgtcggagacttgggagatgcgggaatcacagaaacggataaaatcgagagaggagagataattgggaacagcgacgatgaagagagtggtggatcgggagctagggttaggcagagagctatgtgaagatttgcgatagagatggatcaagcctttgcggtcggtgagtttgagagatggttgtatgagtttaagaggaggctgagctcttttcgatgcgtaagtgaaacctgattcttcttcttcaacggagattggtctctcggagtcaacggaatgaactctgaggatgaacatcgccagaagcgggaaagagctcgacgacgaaagcttaagctactcggagagaagaaaagagacgacgatgcttcttctttctgattttttgattcgtcgttcttccgatattgagatgcttcaattttgtgttttgactcttattaatgggccttagccagtgtcatttgttcgataagtccgcccaacatgtcgatatgatagtgttttacagtatatatttttcccaatttatataagagcagaaatatgggcttttggttcggcccatataataaagacgacgataaaaaggccattatgagacgaagtaaacaataatatccctgaatgcttttttgagctgtcagcagcattcttatcaacaaagacgagacgacagtgactgttccgagtagcaccgctaaaacagtaagaggtgtgtgttggggtgagagtcacgcaaggaaatttcatgcatgttaaatctgtgtttttttgtagctaagtttactgagatttatatcaaattactttattgttcgttgttcttgttgatgtttagttttgaaatgtgtatgttaaaagatgataaaagggatcttgcttttgtgtttgtactttctttgttatacttattagatctgctatgtgaaatgagtagtgttaactgattgattctttgttttagtttggatatagttcgaggaatgacaacgattgtgttctaatgagccatggattttacagtttcttttatgttaatgctgtgttagaactttttaatgatgatatttgaataacaaatttgttgaaactgtgaacgtgatatgttatactctagataatgtcggaagtagagggcgaaaaccgggctatcgtgtgtgacaatggaactggaatgatcaaggtaaggagaaaataagaacactctctattattaatttgtgatgcgtcgtttgttttccaaacacaatttacgcatttgtattgcgtttacatttaaaaatatcataattttgaaatataattataacaaagtcaaaatgtcaacaaagaaactttctattttcaattttcatttaacaatacaattttttttttttctagtgagcttcttctatgtttgagtattgattcggaaaaatatgcaaaatgtaaaagtaaacaaccaattaatgcacattataaaacaacgtggcagatctaatgattggtaaaacatattgaaggcaggatatgctggagaagatgcaccaagtgttgtgttccaagcactgtgggtcgtccaccacatacgggagggatggtaggaatgaatgagaacgatttatttgtgggagacgacgctgaagccaggagcggtatacttacacttgactacccaatggagcacggtgttgttagcaattgggatgacatggagaagatttggtaccatacgttttacagtgagctacgtgtggctcctgaagaacaccctgtgcttctcactgaagctcctcttaacccgaaagccgatcgtgagaagatgactcagatcatgtttgagacatttgctgttcctagtatgtatattggtatgcaggccgctctctccctccatgccagtggtcgtaccacaggtaaagtaactgcaactcaaatttcacaattcaaatttttagtttgtaagctagaaattttgtggttttttttgcttgcatggtagtaccaactacaacgtcggtagagaggctttactacagtagatattcgaaggcagcaatttaaagtttttacaagcttttaaaaaacattacttgcagcgtagtcaaaaatgtagctggattttgctggcaatattagtttttacgttttgatgttttaaaaatgaacctacgactttaaaacatttgaagcaatttgttttggttaatatacacgataaataccaaacgcaatcggaatgcaaatttatttggtcgattttggcgtttgtgtttgcacttaacaaaaatattttttggaaaaccttgaaatgtgatttttttgttttgtttgaaacaatcaataatgggttccctttatttgtgtttaggtactgtgttggattcaggagatggtgtgagctacatagttccaatctacgaaggttcagcactcccacatgcaatcttgcggctagatttagcaggccgtcacctaaccaactacctcatgaaaatcatgatggaacgtggctacacatccgccgagcgtgaggtagtccgagacatcaaagaacaatttggttacatagctcttgactacgagcaagaaatggagaaggctacaaagagttcggcaatcgatagaacctacgagcttccagatggtcaagtgatcacgataggagctgagagattcaggtgccctgaggttcttttccagccgtctttgattggaatggaaacttctggtattcatgagaagacttacaattcaatcatgaagtgtgatgatgatataaggaaggatttgtatggaaacattgtgttgagtggtgggacgacgatgttccgagggattgaagagaggatgaccaaagagatcaatgcgcttgcagccgctaatatgaggattaaaattgttgctcccccggaaaggaaatatagtgtttggattggaggctccattttggcttctctaagcacatatgaacaggtaaataagataatactaattgtattattaatttaacgtgcgtatctcttttgggatgttgtaatgtcaagttgttgtgatgtatatatatgcagatgtggattactaaagctgagtatgaagaaaatggaccggccattgttcacacgaaatgcttttgagttcttttaatgctttgttctgatgaaataaattcttttgagggattttcatttcataaatctgatttctttctttcatatttctttgtttgttgtcgttgttgttgtttttcttgccaataaaagaagacgtttccttaataaaataaaataaaaagaagaatattcccaatgactaactctccttgcgattgtgtgtgttgattattgttagagttatttaatcttgtaaattaaagtattaaacgattaagaaaatgtgttgcacagcaccactaatttggttttattggaatcaaaacaaatttatagtgcacaatctatactgaaaatctagaggttttgaattttgaacacagcctttttgtcctccatgttttatgcatctaaagattgtgtatgctgattaatgattactgttagggtttatttgttattaacactataaaatagaaccataaaacataaaattgggtagaatctttacagaaaaacaaaaaaaacgcatgctccaagtactctactctatagtctatagtcatctatactacaccctctgttcctaattttttgtttactcttaagaatcttcatggttgtcagataacgttttatcttggataatgaaaagttctattaaaatccaaatctcgaaaatatagtggaaatttggtgtttaagagtaatgcaagaacactttcaattttgtttcttaggttttccagattccaactaaatcaaaatgtaatgagtcttaatttttacaatatccaaacgactatactctataatttgtgtataggcttcagtctctctcattttattaattaagatttccatcaaacaagaatataattgacttaaaaacaaaataaaataaactttttgtcgtggctctgattctcggttctcacaaactcctcgccaacatatcttggaatctcctgtaagattcaaccttctccagcaagaacttctcatgacacctcgcgatgaatttatctgccagacgatcaatatcatcatcaccaacatctctctccccaacactctgatcatcattaatgttattattctcatcaactctctcttcgagccactggaggtattgagactcaagattatcctcatcttcaacatgaccatcaagggagaaagggaaaggtttagtgacgggaacaacgacatgggaggatccaaagaagatgttgtgttggttcatggatgactttgtcgtgtaaaacatcatcatgaataacctcttcttgttgtgtttcgaaatctctatcagaacggatctggctcttgagagagaccgtaaaagacggtaaagagagtgtgtgatgagatttatgaatagggttttgagattcgtggagtgggaagaagatgatgaccttttgagctgcattactcaacgacaactctagagtctatctcacactcttcttttatgtgcattaatcgacaatctcgactatttataagggactttcttgacgtttataaccttacaagtccctgttatttacttatatgaatatgacataacattttgtcgtacaattcatttgaaagtcttcattcttcaaaattgaacaaggtacgcgtgaggcgaaatctagagatgacacaatcgtgatacgagttggtttcaatttttaaacaacttgcaactgccccctccctaattattcatctcagttatgttagatcttaatttttttcctcaacaacttgcatactgaaaatttgagctcaatcgctataaaaagtttgcaacgataaaaatttgtgatttcttgacattaggtatattataagctcttgatctttcaataatatgtagtttaggatcttgaggtaacagccagaaaaatcaaacgtacattacaagttgttgtttacgtgtagctttggcatatcctatataacgtatataaaatgaacatatctaggctaaaaattgttaagagagaagcagttcgatagattcaattgcgttggagagtggtgaaatgttacaattaggaaatacaaagtctagaatatcatttaattacatcaccgcttatttcaaattccaatcattttgacatgcgtccatcaccaatcgtgtgcttaaagcgttggggtatatagttcagtacaacatttctcagcaaataagttcatatgatcgaattatatatcaattctaacatatagtcgtagtatgaataattcagtgagttttttttttttttttttttttaattcagtgagttatatgcacaaataaaacgaattcactagattgcaatcacttagtctacaagctaaaacagattttttgggctgaaggacaggaagccttatgggctttaggtttcggcccatataatgaagagaggaaagcccattatgagagaatgctggtgagctgtctatgagtcttatccacagagagactagagttggagagcaccacctaaatcgtaacagtaagaagatgatcatgtgtgggagggagtgagaaacacgcgccgatagagagcgtgtggattagttaggatgagaaaatccgtatcccatcttcaacggggcaaaagaagatccatcggccaatggacttggtttataggatggtggtggtaagtgtgtgctactctacttattagcaaactactctctctttttcctctttctcagatctctctgtgatcacttatttcagagtctcaacgtttctctgttctctgtttttcctctgtttcatactgtgttttgagtagatcgattggaaacacaagaacaaacaaagagttcctttttctaagtatccaagaaggaaaaaaagaaactttatactgtttggttcttaggagtgattggttcatgtgtcggagattctgatgattgggtattagctccacataggtaagtatttaaccagttttgctttactgtacttgttaagttgttgtgatgagattggaaacaaattaagatcagtcttttttgtttcatttgtttgatcatgcaataaaatttcatggatgttaagtataaaatagaaaatgaaacttaaaaagtaggcttttcttcttctttagtttattggtggttaaggtttggaacggtttggttggtataagaaatgcaaattggtatatgttgaacgagagaaggaaatattgttttcatttgtaaatttgtttgtgatttccactgttaactaattagatcaacaatgtgaaaagcagtaatgttacgtgattgattctttgttttaatctggatatagttcgaggaatgacataatgattgtgttcttatgagctggtttataatgtaacaatgtgtttttttgtaacttgcaggttataagctgtgtagtattttttgaggtttatagacactatgagaagaggtagagggaaagggaagaagcagaatgcatctgctcgggaagatcgtggaagcggtgatgaagaaaagattccagcttacaggagaagaggaagaccacagaagccgatgaaagatgatttcgaagaggaagaagaagaagatgatgaagagatggtagagaaaatggaagtagaagatgaagatgaagagattgatgatggttcagtaacaagtaaagatttgaaggagagaaagaggaagatgtctaatggaagcaatactgatctgactgaagaagagaatggtttaggatcgaaaccaaacaccgatgattccacgagatcgacatctattgggtttagacaaaatggaagccggaggaaaagcaagccgagacgagctgctgaagctgtcgtggaatgtaacggagtttgagaaaccttcctgtgaagaactcccaagaaacagaatgacaaattgacctgaggcttgtttttttgcttttttctttcaagtttttgaagttgacaacttaggatctcttatggtgattcatgaaatcaatctgcattctctttcattcttgtctcttaatctgttttggtttatcacatttgagcgtccaaagatatggtctctgcaacacatgaagttggaatgagagattgggagatcatgtggatgacactatgggagagagatgtgtgatcctctctaatctataatctcgagatttctaatgagtgtgaagatgctataattgcaaattgtggaacttaggcaaaatataaaacagcaaagcccttaaagggaagagaactaagaagtgagaaaggagtaattagactttagagattagtctaaattgaaaagttaaaacaaaattaaaattgtcaaccaatattaaaactttacaatagtaaatttaagatcttttcattgaaaaatgtcaaatagttatacatctccaacttaaccaataaccacagatccaaaacccaaatttgccaccatttatatatatatatatatatatacatataactaataataagaaatttagcaagtatttgatagtatttgcatcagcataaatcaaaattttctcaaaatgtctgtctagctatttcagaacctagacgtagttgtaaaactagtcaggggttaggagatcgatcaggtctttagtttcagggttaaaccaatgcagccaaacaagtggaaaccactttcactaaataaagctaaacaaaaagaacaaatcaaaacctaaacctataaaataatactatactacagtttacacagactctgatggatgatgtctatgactccgatttaacttttcatacttttcattataacgaatagatctttctttagatattgtataggtacaaattatcaaaaataaaaaaaagaagtccaaaaataaaactaatttggctttaactagcaaagagaaacaaacaaactcaaaatcaagataataattagaagaagaaaaaacccatttttgtatatttaaacatgagagaaagaggtttaacaaataaaaataagagtactgaattcatttatagggttgcttgcacatctgccgacaccaactagttcccttgaagtgtcacatcttttgttgtgttccaataactgtactgctcatatttcagtctttaatacttttaaccttttcacgatcagtataaaaaaatttcttatcatattcgtcgttactctttaactaactacagtatagaagaagaaactacctatttatagaactctgatctcctcggcagtttcctattggttaccactgctgagtatatagaatctatggagaatagtatttttaaatttagaatgttactattaacttaagtacaaatcaatatcagattatcaaaattggtatagttggatgttctatggctatggggagtctgaatattgctccctggtctcagatagatgctttcaaaatttaatactacttaaatttaaacatacatcgccacatgacccatcactatcacggttacttatggatatccaacattaaagagtaccacccaacactaggactcttataaaacacataaactccaaaattttatacctaatatccctggacaatatcaataaagttttattggtttcttttttgcaacaaacgcaagagaaatttttattcgtcacggattgaggttttacgcacaccggtacaaaagtgtctatgaagaaaataacaaaccatgcaaacgtgtttaacgggctttacaaatatgttcagaaattactcgcatgcgagattaaagaaatacaaaaaacaagtttggaaccggaggattgcaattatcatctattctatatcgcgtgtgtgtgtgtgtaaaattatgatttataatgtatcgaggtcttagattttaccttgcgatcctagagtttcgtacatatatatcgactattcaagttcttctttcatctttttgtatcttaataagttccacaaatttcgacgatagagaccatacatttgttgttatcctctactcacgaagacaaccagtctaacgttattgcataagttccacgtaaattaaaattgtgtttcttttgttaatattgaaaataggttaaaatgtcgccaaaaaataagctttgaaaacttgaggtaggaaaaaatcatggttcttttgcacatgctccggaccaatcatgtttactactaaaattcttactgcttttataataatcatctcgactggcgcgtgtagaactctagatgaatgccaagtcttattttctaattataaacgcaaataataaaaaggtttaagaatatttaaatttcacatgacaatatgacacaataaatactacttgaaaaatgatctttgaaatttcatattttctaatcaaaaacaattccttcatattttgaaatataatcgatctctcatatttaatttccaattagagaattatatccacatgatttgctttcaaatatgtctatttaacgtgtacgttgaacttgaacctatttattatttaattcattcccaaactaaaaatattttattttctaaaaaatatagtcgtaagcgtacttgtgtaaatatgttctaaagttaataatgggtttagacatttagtagaaatatatattttttggtttttggtttggttggttcggataatcaaaattttcagtattcgactaaaatacatttttgagttatatttctttacttaattttcataattgtaagtatttaaccttgtgtacgattaaaaaaaaaaaagtattttaaccttgtgtatcattcataatgtaggttttctttccattttgaaaaaaagttttgatattggttcgcattcatcagttgaaaaccaagtcaaatttatggtagattggcaatggacaaacacaaaatatcatctccatttattgccaacctcataatgccaaatggtggaccaaaaggaaaaacatgcatttatttattctcttgacataagagaaaatgcatttaacttgtcaaataattgcaaggaaaaactctataaaaagatagaaatgtgaacagtataaagtaaataaagaaatatgtgtacatgaaagacctctccaatgttcacttgctccagtttctccaagattagaaactgctacgtctctctctatagctccctcgttttgctatgtggtaattaacaacagacaacagtttttgtttgtccgtaccgttttacttactctctcactgtctttgtctattaccactctcgtctctttcttttttccttctgttctgtttctctctctaaacccaaaacagtcaaaatcagggaagccgaaattttctttgctttcttctcctttggtcctttctttaaacccgagacagttaggtttgtgtgagagagagaatgatgagtaaaaccctttctgtctgagtaagaggaaaccaacatggagatgggttccaactcgggtccgggtcatggtccgggtcaggcagagtcgggtggttcctccactgagtcatcctctttcagtggagggctcatgtttggccagaagatctacttcgaggacggtggtggtggatccgggtcttcttcctcaggtggtcgttcaaacagacgtgtccgtggaggcgggtcgggtcagtcgggtcagataccaaggtgccaagtggaaggttgtgggatggatctaaccaatgcaaaaggttattactcgagacaccgagtttgtggagtgcactctaaaacacctaaagtcactgtggctggtatcgaacagaggttttgtcaacagtgcagcaggttcttttattcttcttcccagttctaccctttagttctattctttattaacatgttttgccattgccggagatattcgagtccggccaaggctctgcttgttccactgttgtgaatcaaatctaaaggctttagctttttgtgattgtcagtgtcatatgcttttttggctttaacgtctttttattttcattttttaaaaaactttacagcttagttttgtaacctggtcttgtgtttgttggactcgttgggctcatttttgggaatatgtttacgtctacttgtagatgcttctcttttatttttcttttgattttgtctttctaaatatctaatccaaagagatatgaaatgaatggacaagaagaaagccgttgccctcatttttgcttctttaggtcatatcattattgagggggacaaaactagtgtaccatagcatcattgacgtgatcattgaggaactctgttacattatattacaagtgtgtggttttagattttaattcaaaactgatgacaaaagcttataatgactgatagaatgtatacaaacggtagttaacgtggagaggtcttgtctttggaatgttctgttatgttgcttttctttgaagttaactcaatctgaatcaatcacataggtttcatcagcttccggaatttgacctagagaaaaggagttgccgcaggagactcgctggtcataatgagcgacgaaggaagccacagcctgcgtctctctctgtgttagcttctcgttacgggaggatcgcaccttcgctttacggttagatccttaagctcgacacataagaccgattcatgtacttttcatccttaaaagatagatgtatatgctacagaaaatggtgatgctggaatgaatggaagctttcttgggaaccaagagataggatggccaagttcaagaacattggatacaagagtgatgaggcggccagtgtcgtcaccgtcatggcagatcaatccaatgaatgtatttagtcaaggttcagttggtggaggagggacaagcttctcatctccagagattatggacactaaactagagagctacaagggaattggcgactcaaactgtgctctctctcttctgtcaaatccacatcaaccacatgacaacaacaacaacaacaacaacaacaacaacaacaacaacaatacatggcgagcttcttcaggttttggcccgatgacggttacaatggctcaaccaccacctgcacctagccagcatcagtatctgaacccgccttgggtattcaaggacaatgataatgatatgtctcctgttttgaatttaggtcgatacaccgagccagataattgtcagataagtagtggcacggcaatgggtgagttcgagttatctgatcaccatcatcaaagtaggagacagtacatggaagatgagaacacaagggcttatgactcttcttctcaccataccaactggtctctctgacttgtctttgcatcagagaatcttcttacaatgaacgattctgcaatatcttatctttttgcttctttgtttattctgttatctgctatcaataaaccagacaattgttgccagataatggcttttgattttgatttgttgttttatctccatgaaaatccaagttatgagatcagattgatttctttagcacatcaaggttccatataatgaatctataatcatcctagtatattagtcaaagcaggagctaacattaccttttaacttaaggcttaagccatagcattatcatcagctttgctcaaactcaacatcttaaacacttaattagactcagagatctatcgaccaacgaagtgaactgctttttccccaaaaccctaaccacccactttcaaagattcgtcctttatggatttagctcccctgtttccaaatgaaacctcaaaaaacttgaaccatatatactcatcagaagacaacttaactatggcagcttttcaaatatgattcttatctttataaaaatctttcgtcagaaacagtaaaagtaagacgatgatagagacctttcttcctaaagatctctcatcatctttcatggtcgtcagagctttgctacagagacgtgaagagagaatatcataaatgggctatataatgggccctaagaggcccacatgaatttccgtatgattcttgtaattgggctttctctggctctactgactcgtctcctgaagaacaacaacaaaacatatttcattgagctcctccactgaatcgctctcatccttcgcttcttcgaattccaaaggttagactttcctgaatccttcaataatctctcttcgttgtcttctgtaacatttcttctattgttagtgatggattccattattttccttgtgttacaactttgatgagctcaatgctttcacaaactaggtttcggaatttttgtttcaatccaatgtctctatttgggtctttaaaccagattatattgaagatctggaaaatgggtttataattttgtaaagaccgcgactttgaaaacttcaatttggtgaaattctttcaaatccgcatcttgtaaaaatcacatttttatatttttgttgattgatcttgttctctgttgaatgtttaacttgtgtgcgttaggtagaacagtagaagaaatcatggatccagctgaaatgagatatttggaagaagaggatggtccgttgatgaagacaatcaaaggtagtatcactggttttggtgctgggactatttacggaaccattttagccacatggaaagatgttccaagagtggagagaaatgtggctcttccaggacttattagaacactgaagatgatgggaacccatgggctgacttttgctgctataggaggtgtttacatcggtgttgaacagctggttcagaattttagatccaagagagatttttacaatggtgctattggtggttttgtcgctggagcttctgtgcttggctatagaggtaatggtttttcttcttcactcatggttcgttcgttttcattgtgtttgcataaaacaatgtctcgatggttaagtagtttagaactgatgtgattttggtgaagaccatttgaagttactggaattagcagtatgtagttcacttcatgtgttttacgagcttagtagttattgatggacaaacaatgatctcgagtgggagtaactaaaggaattgtaatgggaagaaattgattcttccttacctcaagttaatgttatttggtgcctagtgtagcaattctataggatagcacaagtgtcaagactttgatattgagtgtatacaggaaactctcaaaatcatatatatgtaaagatcgaaagtacatagctttgagtgagagatgatgctatagattcgtgcattcttatgatgctatacttaattgttatttggtttactttggttttcctctttttttacagcaaggagcatcccgacagcgatagctgcaggtgcaacactagctgttacctctgctttgattgattctggaggtcagaccacaagagtagacaatggcagagaatactatccttacaccgtcgagaaaagagctgaagctgattcctgatttctcttttggtcactgagattaataagatgtgcattcgctgatccggggatcttgagataatctcttttgtttattttatctggatatgtgatatcatgatactctttgctcttgtttcttcttgttttcttgagagcgactttctcacatcttttgtctgaatgtttcctgcaataaaaattcaactttgtctgcagatgtaaacaaatgttttagctttcagtaatcattttaatcagacatttgcttgcttctgttaacctcaagctagtttctttatctgaaactataatagatttgaacatgacaagcataaggaaacaaacatgtaacatgtataacaatcagatgatatggatttggagatctacatgtaaaagtagagtgaatacgtggcaataactcattggctatcttaaatttccttgtggtatggctaatctagtggttcttgtccaagtaactatcgcatcacagtgacgagtttttttcctagagacctctgctgcaatggcggggatcataagccctagccctacggctctttatttcaccaggtaatactagttccctcaactgaaagttgactcctttgtataattcgccaagttgtttaatcttggcgagttctcgtccaaaacaagataaagttaacagtttcgatttctgatgcagtaatgtcggtgggaggcgactgaaagcagtgagctgggcgggaaagagtgtctccgggaacgttatccgccggagaagcttgagaattgctgcggagctgaaattcgtgaatgcagaagaagcaaaacagttaatagctgaagaaggttactcggtggtggatgtaagagacaagactcaattcgagagagctcatataaaatcttgctcccatattcctctcttcatttacaacgaagacaacgatattggtaagcactcgagccttaacttgaacatactgtgtctgtatgcattataattctgagattctgagtggttttgtctgaacaaaattgcaggcacgatcataaagaggacagtgcacaacaatttctcagggctcttctttggtttacctttcacgaaagtgaatccggaatttcttaaatctgttagaaacgagttttctcaagacagcaaacttttacttgtttgccaagaaggtctcaggttggtagaacaaactctggatttcactgagacatgtatcaccaaatgtagtatgaagaaaaattataagtttctttgttcgattcttgaaaagatctgcagctgcagctagtagattggaggaagcaggttacgaaaacattgcttgtgtaacatcagggctacaatctgtaaaaccaggtttgatcccatttggtttcatctaagatcatttcttgaggggttttggagatagtttggtttgagaaggataatgaatcggatttactgttgttgcgactttagggacatttgaatccgtcggttccactgagttgcagaatgcaggcaaagcagggcttatcacaattcaaggcaagatctcagcagtcttagggacagtactcgtctgtaagtttaatttacatagagctgaagaatatagagaatgttgtttggtctttcctttggttatgagtaagactttgttgaacttgcaggtgcttatttgttcatacagttcttcccggaccaagcagagaagctctttcctccaacaagctaagacaagacaaagaaaacaattgaggcagacatgttttcacattttctgcctgttttgaatgtgatgcttaagagaaaattcaaaatatttaaaattcccaagtagtagttactaaaagatttatatatatggtattgagaaaagttgttataacaattgaaagaaatcaacaacaagacaagatggcttaatgtttttcaaggacaaaaacgtggatatttaagactaataaatacgataaaagcagagagaaacctacacacaaaaaaacagagctttaggagttagagagcgtgctgtgcagttaaattctgatgtcaaacgtgctagcaaatctctgagaaggaacggatcaagagaactctacagtgactctgacattttcaatcgccattggtcttaatcgccttgtaggcagtaaagttgccgaatatttcccgtcgctgtcaccaaaagaaagagatacatatagatcattggctggccaaaggagtaaatgaactagaatggggattttatttgattaccgtatagccagtctttgaaatacatgtggaacgctgtagtgagttctcgttttcggttttcttcgagaggtgtttctctcaaggattgtcttgtttcctctaagttcttaagctgctcaaaaccaaaacacagttaagggatcagatgctgaagtatggatgaaaaagaaacgagcaattttatgcggaaagcaaataaaaaacatacgtttgtctgctgcactgccttatatgcatctggcaatggaaatggattgtctttcgtggaaccaatcgcctcacccgcaaaccagtttgggatctgaaccagagacattgatgtgagaaattaacccacgaacacaatcttaataaccaatatcactagttactagaggaaaattaaactaacaaaaaggggaatctaaccaaaaaggtagtgaactggtcagggtccacacaagaagccggttcagcttgtttatcagaggcaccagtcggatgtgatagtgagtcatgcggatcaattgctccgagcgccaaggattcgttccatttgttgatagttggctgaattcctacctcggttatgtgctcctccaagtgtgagtaaaatgtattatatggagcaacctggaacagataacagtcacattgatgccaacagttatagacaacacatcagaagatgtttccacttaactcagttgaagaagtgactttaacagcatgctcaattttccaaacaccaggaaccattaatacgatcatgactataccaggatattaacacaggaaagatttagcctagagttaaaagaaaaactgtagtctatttattaatttcagctgaatatcagggcgggaaagaagagttatgtatgcagctcaatcttaaatagacatatcacctgtagtttgtggttatcaccaactataagaggtcgctgattgactcccaaaaagaacacacattcacggcaattggcgatgcaaattcgtttggtagctacaatcacatgaactctctcacaatgctcaacttttactgcctgcaaagaacataaaatattatcactgcattctaacctgaacctcgctaacaaagactaaaacagaaaggagtatatttgccgtaccttgccagcagctcccagaacgatagtagaatcagaacacccatacacagttgcatatctcaatggcgctaacagataaataacagaatcatggcaattggcaacctgcagaatacacaaaacatgcaattgacgtgcatacatgagtaaacgaaactaaatgagggattgctgtttaaaatgcaaattagttgttcaatacggaccttcactgatctacccttaagatcagaagcctgcttgaaaagtgaggtcttagagactccctcaataatacatggacctctgtcgttagatgaaactttattaagagctacactagaatcagccattgcagcattctgatcagaggcattagatgccccattttctttcccagagattctgttagaaatgctttctaaggcggaagctatgtctttgagaagccaatcattcacttgggaagcaggaacggggacagcgggcatatcaggatcagaattcgcaaaaaaaggagtagcttggcttaaagaaggtacatcaaatcccttatcaccataatgaacaagaaacccaatgtgctccaaactctccatagacaggacctgaggaggagattcggaccatctagcatgagatattcgttcttttccatttcccataatattgcatcacaacataaaattttctatccatctgatacaaacataaaaaaagtttagcacataccaaagaatcatctccttgtccctccacaggctctgcaaggagagaaataatatttgcaatgtgcttttgcagatacgataattgatgagcttcttcatctgtcggtgatggcataaaccgacggctgttgctacgaacaagctgcaagatgatgaaaggaaatttaacttaaactcaacagctacaaggatgtctctacccatatgatagaaacagtaatgagaacaattatcggtaaaatatttcaaatatcagacaatccttttcatatgtttctgaatgataacgtaatattatttaacttgcattgcaaaattatagtaaaatccaatgcaaaatgaaattttttaaaccaaatagatcacaagataacgttttgagccacattacatgattaagagaataaaaaagcttgcctgaattggagataatgccgacaagtatccatcaaaagcagaagtcgaaggccaaacatcagccacagaagcagagtctttatgcgtcctaggcaataacttcttatacgattgaatgtagagaaacaatatcagatccctcaaatcagctcccacggaatcaacttcctcaggtttggccaaaaccaatgggtcagtctcgcaatggagcaccgaagagagagtttcgagaacgaggcgcgcatggtcatcggagatcgagagtgcatcggaaatggcagcagatccgacgcgatgattcgtcgccaaagaagctaacttttgcttgatcggagctagagtttgaatcgggtcggtaaaaacgagcttctggatcggaagaaggccgtgctcgaaaggaacacgtcttgggtggattattaaattcgaattttgaatcgggtctgggtcaggtggtggtgattggtcgatgagctcttccgtcattatgctttaaaccagagaacgagagaaaaagaactgttatgaatgaagttgcagatctttgaacataggaacaattgtcatcaagaagaagaaaaaaagagagagagtgttatgttacagtgtgtgcaaccacatgctattatcctacgcctggtgatgaacaatgggtcaaaaaggccgatatttaaatgggctttaaacggcccattaagtaacgcgattagtttcttctccgttgtaaactgcgactttcaccggccacgagattaagtcgttgtcaatggatgatttggaagcttactattctcactataatttaccggcgatggttcctcctccgccgccgggagtttctccgattccaattacttcagctcattccgtctatttgcctacccatgtctcaattggagctcgcgatgaggttaggacgcttttcgtcgccggacttcctgaagatgtcaagcctcgggagatctacaatctctttcgtgagttcccaggatatgagacttcgcatctccggagctcagatggagctaaggtaatcattttctatctctccggatttgtgatttgggtaatgatgtttcccggcgaagagactgagaatcttactttatttgtttggtagcccttcgcatttgctgtgttctcggatctgcaatcagctgtagcggtgatgcatgctctcaatgtgagtacaaatttcttcaaacttgctcttgcaatgtgtcgccgatgtatctacttacaaagcattaagtaaatttggtatctttatggttgttcttaattcaatctagtaaattgaaatcattcggttgggatttgtatgcgtaagtgaataagctttgtcatttgcctagattaagaaactttctgaattttatttctgaacctttcagggaatggtgtttgatcttgaaaagcattctactcttcacattgaccttgccaaatcaaatcccaaatctaagcgttcaagaacaggcaagtagtaggattctttcggttcggtagctcaataaaaatttgacctttgctattgttgtgttaatttttattttgtgatttttgtgatatggtagatgatggttgggaaagcttgaaaaaactcaagtcttggaacactactactgaatctggtaagatcattggcacacaccttcatcttgaggcttcttgtaaccttctgtattttatgtttcttgtaactgaatgtttgtgtagtatatatattttcaaacttccaatcttcatgaccatcacgctcatgcatgctagctctttttggtttaagatttcacacttgggctttaagtgccgtcaacatggtttcacgtttctgaaaactcacactgcacattcttgcacgtttgggcactagcaggttttggcagctttcaaactcctggaatgagtagttctgcttacaacacaattggttattcacctgcacaaaggtcatctgcactacttgagcacatttctagttccttgtgaatgcttagattctgtttctttgttgcacactcttttcttgtacctctgccttgaaaatctgacctacttaaggattagctgaactagtcctagctcacatgtctagatactggttacgagagtgcttgttctttcttagctattagctcacgaaactcagggtctcattaaattctttttgctcgttcagtcaaggaattgctaatgttgctgggagggcaccgacttctagaaaacctgtaagcttctgcctattttatacttcatatgagtattgttttctgtctggacgaaaaacagtgaggtaaactattcttaccagtgaacatgacaatctttgttcctttgacagagtaaggcggcagatccttgtccaacacttttcatagcgaatatgggaccaaattgcaccgaagctgagctaattcaagttttctcgaggtaagaatactctattctccacgcaaaactgtaaccactagagatagttttcactctctttcctctcagatgccgtggattcttgaagctgaagattcagggtacatatgggactcctgttgcatttgttgatttccaggtacagctcttgcaatatctttttctttaaatcgagagagatcctagtttgtttaaagagtgaattgactctcgcatgtttactttgatatgtggctttgcaggacgtcagttgctcaagtgaagcactacatactcttcaaggcacagtgctttactcatccctcactggggaagttttgaggctgcagtatccttcacttcttcccattttatttctttgttttttactcgtgggacttcaccgctttccgaaaaactgacttaacaagcaatattagatatgctagatcacggatgggaatgcgtaagaagattaattagggttagaattgattaagctctgataagtaaagataaagtagaaatgtcatgccaaaacagcataggtactgaactttgctatatgtatgtatagttagagtccgcagattataatttatcatggttccttcatacccaaaggaggagaatagtgttgttggggtcgtcaataatccatatggtcaagtttaatcgtcatcgtagtagcaaactaactgtgagttaccgtcaaagaccatttatggcccacgtaaaacgacgccgtttaaatctgagtcaaagcccatttgtggcccacgtcgaaacacagtcgtttcactccgactagtaaactaaaatcccggaaattctcatccgcatgagctccggtgaaaaatggagacgtaagcaggagcctctcgtctctgcaatctgagacctcgaaagacctaaaatccttcaacaggtaacactttaattcctctttcgcctagaaagaatctcgtgtttgtttttgggttttagctaagaattttaggaaaaagcttggaacatatttggctctcttatgaattgcatttggtttgtacttatgatctctgtgtggaatcgaatcaaaattatcaatctgaaagtgacaatgatccctggtttgtcttttgtgttttttatttgggttcggtttacatggtttcgaactttttcaattgatttttgagttcggttttgcattggaattaataaggttttgagaaaagaaaagaaaaagaggcacgcgaggcgttttttgagaggcgcgagtgtctttcaaaataggctatttggtgggttagaacccacagaaattggatacacgcgctaaacgcaagatgggtgagagtgggtatgaaaccgcaagatcggtgagaatgggtatgacatggagcgctctgattggctaaaaaactcaaaatagtagacatgtagctcctcccttcctcctctcataatagtagttattattacttcgtctaggcgagaatgaaattaagatttttttcaatctgaaagttggtgtttttagagatatacttcttgggaaatcttacagaaacaggtaacatctagcggtatacataagcacttagaaggtgttaaagtgatccacaggattgcacacaagtggtcgagccatctcagcagaaaaaccagaaccttggctcagatcgaccttctgtccatcaacactcttccagtcgaagcgctgcaccaatgaacccacacctatatgcatcacattcatggcaagggatgctcctggacatcctctccttccactcccaaatggaaggtaacggaaattctgccccttgaactgcatctggtgttcacctatcttctcttcagagctctctagaaatctctcggggatgaatctgtctgcatctgcccatagttctgaatctcgcatgattgcataaacatttacgagtacacgggtttttgacttgacaaggcacccgttcacctggcagtcttctgcgcattctcttatgatcagaggagctgaagggtggagcctcagagtttcccttaggacagctcggaggtaaggaaggttaggaacatctgattctttcaccagtcttttacttccaacaacgttattgatctcttctcgtaacttgttgaacgcttgtggatggtttattagttgccccattgcccactgcattgctgctgctgatgtatctgttcccgccatgaaaacatcctagagaagtttcacgcaacacacagttttatcacatcaaaataatcaaattgaaaattggattctgattgcaggtgggaggaaacataccagcaggaaagatttcatgtcattcctcgttatcttcatttcagcagtgggatctctgtaagtttccaacaatatatccaaaatatcctttctggtaccatctttcttctttgcctttgcctcacgttccttcataattctctctacaagcaggtcatatttctccattacagccactaacttcttcccgttcccagaaaagtccattactttcaatggccccaacacatctcctacactgatcttccccgcaagctccaaacttttcttcaccagctcccttatctcttctgcttcattatcagtacctgaacacctggtgctcatcgccatcctgcagattacattgttggtgtattttatgaactggctactcaagtcacaaggcaacccttctctgcaacacttagccacagaatcgaccagcttcagtttctcctcctcacggatgtcagcgaatttctccagctgtggaacagcaagaagcttagtcatgcacagcttcttcatgaacctccagtaatctccatactgcgcaaggacaaacctggaccctctatacttgaaatactctgcagaaccaaactcaggtctcgaggagaaattaagctcttgctccttgaaaatctctctcgccaccgaagagcttgagaccacaacgcacttagaagcaccgagacgtatctccatgagtgggccatacttgtgagctaaactttggaatgagacaggcaatactttgcctatcaaatgaaggtggccaatgaatggtaaagctggagggctctgtggcagcttcgtagcagccaatgaaccttgctctttcaagaaccatttgaagagagcataaagcatgaaaggaaaagctaaggatgtgatgagaataattagtttagtgtttagttttaaatccattgcaggcaggtattgatacaatttttgaagtatgcttgtatttatatccagacacagacgaatcttgtttattagatgctcattgtaaagaaaacaaaacaacagatgtgaccttttaccaaatataaaatgtgtgacgtaacatatatgaaaattgtttgatgggaattaaaaaaaaaaaatgattagaagtttttattattcgaaggcacttcctagattgtgacaattacagatacacacatacaagaacatctgcaatttctaccaacaaaccaaacttctgtacaactgtttaactacaatatcctgaatcaagaagacatcctcatcatacaaaaagcctaaaagtaaaagggatccaacataaacccgtgaactatctaacagttatctcccatatgatatatcatcagaagatgaatttcttcttcttttttatcattagaaaaatgatagaatctccctactatatatcatcacagagatgattacctctttctagtgaatcaccagaggatgatgaatcatcatcgcatcgacattagcgtcctaactcttttctccctttctgctcttttagcactaggagtgctcttcattttctgaatctcttccatcacaaccttctccactttatcaatagagttgaggagcttcttctctggagtgagggcatcttcttcccctgtgttttctcttgtgatgtcgagcaaaatctgatggactttagcagttgagggtggccaaggacgcttgaatccaatagatggaccgggagtaaccatagaatagtcgtgctcgagatgagcacctgacaacggtactagagaatcaagaaccccaagttgttgtggagttggggtctcaatatctcggccaacaccttctcccatacgagctctccttctctcaatagcctgcatataagagtttgtaaatagccagactaagcaagccttttggtaacaggttatgacttatgatatagttaacaaagaggctaagcaagcctgttacagaagactaatctagcttataagcagcagattctgaaccaatatgcaaatcacaaaccagatataaacagatcacaaattagctatatatcaatgaaaaaaactccagttaaatctaagaataagcagacaaatccaaaatgagactaggtttagtgaactaaccctaacaacggcagaaatatcacggaggggcgttcttggataccaagaaggtaagacagaatttgaagcacgagcccttccacgccttgtaacacccaagctcatgttctctcgtccctgtggcgatctaaattgaatttgacctcttctaccaccaccagtccgccgaataccgaaattacccctcacaagcccacctcttcccgtcatagatccttgaccaattgacccaagtcctcctgtagcttccgatggcactctctgaaccggagacccaaacaaattgtgctgtgttgctggttcgtcaagtaaaataccatgcgagcgtctattgagaaatgcggctgggtaatcaacttgcctctctattcgatctcgtgcttctggcatttgtgattgagcgctgaagaaatcaaacaactatgccattagaacacacccaaaatcgaaatcgcaacattaaaacccaagaactcagtcttgttctccattgttaatcagattttctcgaaacctcataaacaacaagaaaaagagatcaactcttcgttttcgcaacaaatctccgtcacatcacaaagaacctacttgaacaaatcaaaccatggatttacctatgaatcttcaatagattccttcgtgatagctcggaatggcttcgtgaacggtaaagtggaggggacaaaggagaaaaagagagaaaagcttttgagagagagacgatctggcaaacaaaatttagaccattttctaggcgggttttgtaattgaaaatgaaaaatttcgagctcgcacgtgtcaaagtggtttcacctgtgtgaaatattttgaatttttcatctcacgcgggataaatttcgttttttttcaaagcgcacattgtcacaattcgtcaaattctttgtcagatttcaattttgcccttctgaataaaactgggcttgtggcccaattctatttacgtacgcattgctttcaagatcgaatcctcaccgttaattgtcataggatccaaccgctgctttttactaataccagaaaaccggattggctagttggtacggtctaatgatacgataacttgctctgattatacgaaaacactcatcaagaaccaactctaattaatgttttcttctaattatagttaaaacggattgaaccggacaattccataattttagtcggcttccggacaggccttcgtgggtttggaatttgtggccgacaatgtattgtcggtttaagacttgtttagggtgtatatataagactgttgaacgaaaaaaaaaaaaaactcatcgactcgatcaaattcttaagacgacgattacggagaacgggagagaggtaatagaagagtttttcgttccgaattttgttttgtttcattgatttaattcttggaatttggggtttgtttttccgatttggtgatgacgaatttgggtggtggtggtgcggaggagcaagccaggttgaagcagtatgggtacaaagtcaattccagtcttgttcttaacagtgatgagcgtcgtcgtgatacgcatgaatcttctggtgaaccggagagtctcaggggtaggattgatccgaaatcctttggagatcgtgtcgttaggggaaggcctcatgagttagatgagcggcttaataaatctaagaagaagaaggaacgttgtgatgatttggtgtctgctcgtgagagcaaaagagttcgtcttagggaggtgagtgtacttaatgatacggaggatggtgtttatcagccgaagactaaggaaacaagggttgcttttgagattatgcttggtcttatccagcagcaattgggtgggcagcctttggacattgtttgcggtgcggctgatgagattttggcagttcttaagaatgaatccgtcaaaaaccatgaaaagaaggtagagattgagaaactactaaacgttattactgatcaggttttcagtcagtttgtttcgattggaaaactgattacagactatgaagagggtggtgattctttaagtggtaaagctagtgaggatggaggacttgattatgatattggtgttgcccttgaatgtgaagaggatgatgatgagagtgatcttgatatggtccaggatgaaaaagatgaggaggatgaagatgttgttgagcttaacaaaactggagttgtccaggtgggtgtggcaataaacggcgaggatgcaagacaggcaaaggaggatacgagtcttaatgttctggatattgatgcttattggcttcagagaaagatatctcaagaatatgagcagaagattgatgcacaagagtgccaggaactcgcagaagagctgcttaagatacttgctgagggtaatgatagggatgttgagatcaagctgcttgagcaccttcagtttgaaaagttcagccttgttaaatttctgttgcaaaaccgtcttaaagttgtgtggtgcacccgtttggctaggggaagagaccaggaagagaggaatcaaattgaggaggagatgttggggttaggttcagagttggcagcaattgttaaggagttgcatgccaaaagagcaacagccaaagaaagggaggagaaacgggagaaagatatcaaagaagaagctcaacatcttatggatgatgattctggtgttgacggagacagaggcatgagagatgttgatgatttagatttggagaatggttggttgaagggccagcgtcaggtgatggacctggagagccttgcttttaaccaaggtggtttcacgagggagaataacaagtgtgagcttcctgatcgctctttcagaatacgtggcaaggaatttgatgaggttcatgtgccgtgggtttctaaaaagtttgatagtaatgaaaagcttgtgaaaattagcgatttgccagagtgggcccaaccagcttttaggggaatgcagcagttgaatagggttcagagcaaagtgtacggcactgctctttttaaggctgacaacattcttctttgtgctccaactggtgctgggaagaccaatgttgccgtgctcaccatactgcaccagcttggattgaatatgaaccctggtggaacgtttaatcatggtaattacaaaattgtctatgttgcaccaatgaaagcccttgttgctgaggtcgtggatagtctatctcaacgtttgaaggattttggagttactgtgaaggaactcagtggggatcagtcccttactgggcaagaaatcaaagagactcagataattgttacaacgccagagaagtgggatatcatcaccaggaaatctggagatcgcacttatacacagcttgtgaggcttcttataatcgacgaaattcatcttcttgatgataatcgagggcctgtgcttgaaagtattgtcgctaggactcttaggcagattgaaagcacaaaggagcatattcgtctggtaggtttatctgcaacactgccaaattgtgacgatgtggcttcatttttgcgagtggatcttaaaaatgggttgtttatatttgaccgtagctacagacctgtgcctctcggtcagcagtatataggaattaatgtgaaaaagccgttacggaggttccagttgatgaatgatatatgttatcagaaagtagtggctgttgctggaaaacaccaggtccttatttttgttcattcgaggaaggaaacagcaaaaactgcaagggcaatacgggacacagctatggcaaatgataccctcagcagattcttgaaggaagatagtcaaagtcgtgaaattcttaagtgtttagctggacttctcaagaataatgacctgaaagagcttctgccttatggttttgcaattcatcatgctgggttgacaaggactgatcgtgagatagttgagaatcaatttcgctgggggaatttgcaagtgttgatttccacggcaactcttgcctggggtgtgaatttgcctgcacatactgtcattatcaaaggaacccaagtatataatcctgagagaggggagtggatggagctgagtcctttagatgttatgcagatgattggtcgtgccggaagacctcaatatgaccaacaaggggagggaataataatcactggatacagcaagctacagtattatcttcgtttgatgaatgagcaactacctattgaaagccagtttatttccaaacttgctgatcagctcaatgctgaaattgtgcttggaaccattcagaatgctagagaagcttgccactggcttggctatacatatttatatgtccgcatggttcgtaatccgacactgtatggcgtatcgcctgatgcccttgcaaaagacttgctattggaggagagaagagctgatctgatacattctgctgccactatcttggacaagaacaacctgattaagtacgacaggaaaagtggacacttccaggttactgatttgggacgcattgctagctactactacataagccatggaacaatagctgcatacaatgagaatctgaagccaacaatgaatgatatagagctttgtcgtctgttctctctgagtgaggagttcaagtatgtcactgttcgacaagatgagaagatggaactggcaaagcttttggatcgtgtaccaattccggtaaaggaaacactagaagatcccagtgcaaagatcaacgttttgctgcaagtatatatttcaaagctaaagctcgagggtctttctttgacatctgacatggtttatattacccaaagtgctggacgtttgttacgagctatttttgagattgtgttgaagagggggtgggctcaactgtctcagaaagctctcaacttgtctaaaatggtagggaagaggatgtggagtgttcagacacccctctggcagtttcctggaattcccaaggagattctgatgaagttggagaaaaacgatctggtgtgggagaggtactatgatctatcttcacaggagctaggagagcttatttgtaatcctaagatgggcagaccacttcacaagtatatccatcagttcccaaaactgaaacttgcagcacatgttcagccgatttctcgttctgttctgcaggttgagctcacggtgacacctgatttccactgggatgacaaagcaaataaatatgttgaaccgttttggataattgtggaagacaatgatggtgaaaagatccttcatcatgagtactttctttttaaaaaacgggttattgatgaggaccacactttgaacttcactgtaccaatctctgagccaattcccccacagtatttcatccgagtggtttcagacaaatggcttgactcgccgactgtgttacctgtatctttcaggcatcttattcttccagaaaaatacccaccacctacagagctactggatttgcagcccctcccggtgatggccctaagaaatccttcttatgaaactctttatcaggatttcaagcatttcaatccagtgcagactcaggtctttactgttttgtataacacaagtgacaatgtagtggttgctgctccaacaggaagtgggaagactatatgtgcggagtttgctatattaaggaatcatctcgaaggacctgattctgcaatgcgtgttgtctatatagcacctcttgaggctattgccaaggagcagtttcgtgattgggagaaaaagttcggaaaggggcttggtttacgggttgttgagttaactggggagacattattggatcttaagttgcttgagaaaggtcagataatcataagtactcctgagaaatgggacgctctgtcccggaggtggaaacagagaaaatatatccagcaggttagtttgtttatcgttgacgagcttcatttaattgggggtcaaggtggtcaagtgttggaggtaattgtctctagaatgagatatatttcaagtcaggttgggaataaaatcaggattgttgcattatcaacttcccttgcaaatgccaaagatcttggagagtggattggggccagttcatgtggcgtttttaacttcccgcctaatgttcgtcctgtcccactggagatccacattcatggggtggacatattgagttttgaagccaggatgcaggcgatgactaagccaacatacactgccatagtacagcatgccaagaacaagaaaccagctatcgtttttgtcccgacccgtaaacatgtccgccttactgctgtggatctgatagcatactcgcacatggacaacatgaagagccctgatttccttttagggaatctggaagaattagagccttttttaatacaaatttgtgaggaaactctgaaggagactttacgccatggcattggctacctgcacgagggtttaagcaatctggatcaggagattgtgactcagctttttgaagctggacggattcaggtatgtgtaatgtctagttcattgtgttggggtactccattgaaggcacatttggttgttgtaatgggaacacatttctacgatggacgggaaaattctcattcggattaccccatctctaatctgctccaaatgatggggcgtggtagccgacctctgcttgacgacgctgggaagtgtgtgatcttctgtcatgcaccacgtaaagagtattacaagaaatttttgtatgaagctcttccggttgagagtcatcttcaacatttcttgcatgataatttcaatgcagaagtagttgctagagttatagagaacaaacaagatgctgtggattatcttacctggagcttcatgtacaggaggcttccccagaaccctaactactacaatctcctgggagtgagccacagacatttatctgatcacctctcagagctcgttgaaaacactttgtctgatcttgaagtgagtaaatgcattgaaatagacaatgagttggatctctctcctctcaatcttggtatgattgcgtcatattactacataaattacaccaccattgagcgattcagttctctcttggcttccaagaccaagatgaagggtcttcttgagatcttgacttcagcttcggagtatgacttgattcctatacgtcctggtgaagaggacgcagttcggagactcatcaatcaccagaggttctcttttcaaaacccaagatgcacagaccctcgtgtgaagacaagcgcacttcttcaggcgcatttctcaaggcaaaaaatcagcgggaaccttgtaatggatcagtgtgaggtccttttatcagcaacaaggcttcttcaagcaatggtcgatgtgatatcgagcaatggctgtctgaatcttgctcttttagctatggaagtaagccagatggtgactcaaggcatgtgggatcgagactccatgcttctgcagcttcctcacttcacaaaggacttagccaaaaggtgccatgagaatccggggaataacattgaaaccatatttgatcttgtggaaatggaagatgacaaacgccaagagcttctccaaatgtcagacgctcagcttcttgacattgccagattctgcaaccgcttccccaacattgaccttacatatgagattgtgggaagtaacgaggtaagccctggaaaagatatcacattgcaggtattactggagagagacatggagggaaggaccgaggtgggacctgtggacgcgccaagatatcctaagactaaagaagaaggttggtggctagtcgttggagaagccaagacgaaccagttgatggccatcaagagaatctccctgcaacggaaggcgcaggtgaagctggagtttgcagtaccaactgaaacaggagagaagtcgtatacactctacttcatgtgcgattcttacttgggttgtgaccaggagtattctttcactgttgatgtcaaagattctgatgccgcagatcacatggaagaatgatttatgttttctggttagttttcgcgtctttctttgttttctggtcataattttcgcatttagctactgtggtcgatcttaccttttgtaatatcaacatttgcttactagattctgcatcgtagctggagtttgcagtaccaactgaaccaggagagaagtcgtatacactctacttcatgtgtgattcttactttggttgtgaccaggagtagtcttactggtgatatcaaagattctgacgctgcagatcacatggaagaataatttatgttttctgcttagttttcgagtctttctttgttcttctggtcataattttcgcatttagctaccgtagttgatcttaccttttgtagtacaacatttgattagtagattctgcattgtaataatgaaataagaacaaatcgagtactattttattacttagaattttgttggaagcagatgcttttctcgagagcttacatagacaatttggtctgtttcggctaaaaaatattcagacatgacattgtttctttcttgtccttctccctgctttttagtcctatctactacacactttgttgcgccctatattgacttcttctccttgttcatacacttacagttagctctgttgtcgtttaaaatctgtgtaaaaccaacagaagactaaatcaattcaacagaagactaaacaggcccctttgttttttttccacaatgatcaggaactttaccttatactgtctttgtaaatctttgatgtaatccacagctaaatccaacatatccgaagtgttggtttgctgttaaaacataaagaaaacaacatcatttaacaatttgtttatgatcaaaagtcattacaaggaagttcctgaaaactgtaccttgtccatgttaggaacaagctcttgtaacttcctcattcgctcgcttatccgcgttcttcttacctgacacaattgacaagatttcttaggaaaggctttctgaaaacaaactagattctgcttcaaatggacttccattgatatatgtaaagatggccttaactaggtgaagttacccgttcagcgatgcttcgaggatgtgtagcgcaaccacgtttggctctgattttacaaggaacagaatcttgtagctgaagatacttatccactgaaaccatgtccgaggctgtcgatgatgactttggtaggctcaaatgatgcgacagtaactgcatacgattcccggactctccgttctgtagaaacccatcaaaaacatcattagaaaccactccaagaaatcaactccactttcagctactgatcaataaccaaaacaaaccggttagataaccgagttacctgagctccgagaaacaattttccatcgtcctcggcttctcttttaagtgaggataagttatcaataaagctggatggatcattccaatggctatatggaaaattagtttcgggtgcgatttcaggtatttgagaaagcattccaagtgaagaaggtggccttgaagagagactgcaatggcgtcttaatccattggaattagatggactctcttcatcttcttcgtaattcatcaaattcctcattgaaccataacctgcaaatttgtaagtatatagtaaacacttattagatttgttgagtccaaagtgctttaactctatggttgacaaaatcaaatcagatcttgtcttaaaattattctcaaggaacgtaaaacattcaaaaatcttgaagcaagtgttaaaacattcaaaaaagttgaatcaagaagtaccaaaaacacttctgttataaatgaaaaaaatatttcagactaaaaaaagggggaaaaactttgtagcagagagcaaaacggtaccgttttggtcagagagattagtaaacattccggctggagagctgctttgacggagaagattagattcaactggtttggtgtgatgattattgataccgagaaactgatccaaaccaaccgagttcattatccctttactctgcctcgggtaatgcggcggcaaacccagaaaactcgacggctcaagctgcggcggtggcggcagagtggcggcgtatgaaacagaggtgttcgttaacgaaaccggagacttatcctcgaatttaggtgaacccagatctccgttaacgccattagaggtcacgaatcttgaaagcaacctatcggagtcgaaaccaatcttgtcgtcgtcaacaaaagcggcgagaacagagctcggagctgatctaaaacgaagaagacccgacccggtgggattcgggtcgtagagatgattatttgaatccattaatcgaatcaatatgtaaaaaaaatgcaacgaaatttcctctgttttctcttcttgtaagctctgtctcgtgacgtttcaggaagaacaaatttgtagaaaaccaaatcttaatagctttccaacgtcaaccgttgatatgaatataagctttttcttctcccttgttaagttcttgtttgtgtcacttttcccgggaaaacaaaacttgagcttgagatgtgagcaggtgtaggatttgggaaatataaaaccttgaaggggaagtaaaggaggtttcgtctgaagatgaagaagagagaaagaagaacggtgaagtctgatgagaggaagagagagatgaaggtgatgatgaatatttatcgtctttttgcttctgagtttctgcgtccaactttaattgctgaagatagcggcggatccaaaagcttttttaccaaaaatttattaaaattgaaaaagacgtcgttttaagccgcctgtgaggctgagtcacggaaaatgccttttcatattttttttcaagaacaattttactactatttcttaagaatatgaatttttctatataaaatgtaattgagaaaagagtagattttagatgaaaatacatactttatacttgtatacaggaagagcatgtgaagtaaattacctacctaatcaattttgacgagtatactgatggacccgtgacaaattattatttctcatcttataatctacatgtatccataatatcattttattacgattcttgtttttttctttgtctctgtaaaatatgtgatgtttctaccctaatttataacacacgaacaaaaatatctgtatgttggggacaatgaaatcgctggtaggccatacgattacaatttacaacaagatgcaccaatcataaatattagtttctttttttttattgggtcggtagtttaacaaccaatgtaacaatttaacactagattcgaaatttaacgacgtaaggaaataattttaatacgttttaggggacatggatctaatatgtcatggttacgttacttcaaatttgttttgtttaagtactcattattcaggaaccaataatgatgttagagtacttcattcatagtcagcaattgtactgacaaaatctaatatccattcgcatggtacaacttagaatttaagaattaaagattgtcccatcagagtataaaagtcagaagttagatgttaatatagttagacacgaaaacgtacttgaaatagaaagaaagaaaattgtcggaagtacagtttgtttgtaataaaagagagatcaaaactgtttgaactttttaaccaatatttacgtacgtacgtagctttccaaatccgattttaaggttcacggaacctatacagtgtacagcttacgacacgatcgtgacggaggacgttgacgccgttatcacccattgggaacgtaagttggcgactactataatctgtgtgacatacggtacacctgcatgaaaaagtaagatttgaaactaaactctaaaaccttagtggtcgatggattatacagtgacgtgactctatgtgaacgatatacaccagattacgtctcctctaaatctctttaaatcttatcttagtttaaactttaataattcacgagcgccgtctttttaaaatctaaatccaataaagcgacttgttctctatggagtttttagctattcagccctttaatggaaattgattaatttttatattttcaaaaacctattcgtatcgtatcagtctgaatttttagcttttagtacaatgtaagaattgaaaaaagaaaccgaaccattgagaagattggggtggtgaatttgctttgaatgtgaatttattctctatggagttattagctgtttcattcccttttttatatggggactacggtttatgtgcctgaggctctatatatattgcatatagattgatgacattgacataggctaagctacatagtcttaaaacttcgagctgtttaataattaatcaacaagaagacaaaattgtatgtacaaagcacatgcacatacataatactattactatttaagcataggtaattaatatttaaaagttgtacatactatctcgaaactagctatatactgatgatactttgttttatatcactaacgaatgggcaaacataaaaaatataactcaaaactacattgatctaattcaactgaatcaaaatttcgtatcaccgtgcaatgaaaagtatgtttaatcatacgtaacaaatgtttttgttcaaatcaaaccagtatttcttcaaaggaatccatatataccaatatatgattagttatctataacaactattttccaaatcatcacacacaagttttctcaagtgctctcacttcaatgcaggtcataatctcttagttttttttttttttgtaaagacgtgcataaaacaaactcttcattgctgaagttctttttcgaagaaaatcagtggtctcaacaattttcttctaaatgcaatggatacaacgggaaaaacacccaaaaaaaaaagaaaaaaaaaaagagattgaaattaaagaagcaaatatcaagtgccatttataaaggtttggcctaaagaaatgtggaaaattagaaagcaaatcccgtccgtggctatgtggatgggaacatggacacgtgagaccccattagtttctcaatgttgttgtgtacattttgttttttatactgtttgatagtagtataaatataaaaaacaaaacgattcccatcaatttatttaaaaatctttttatgttcttaagaaaaaatagattacattgatagaagtggggaatcgtggtccagctttggcttttataatgtcaacaagctcaaaaagggggcttcactatttttattttcttccaaaaagaaacttctatattaagcaagtgtttctctccttttttatttaattttctcgagtgggctgctaaatttggaactaatcaatcgtgctgggggcaagatatgttttgccatgaagatctctctctttttggtttataaaagtcatactttttgttgtcaatttgaacaaaggaccaacggtgggatctgatcatgtttgatgtttctgacaaaaaattatattcgaaatagatttgattttgcctttctttctcatttcttatgttattgctaacgatcggttcaaatttatttcatttcacatcccccatgcgcaagagatatgcaatcatgcgattgagtataatctattttcccgttttcataatatttaattagaacaggctcacaaaagagctattgagtctcttttttttttttttgttaaccatgatctttcaaaaaatctatgcatctatcaaaatcgaatataagttttgaccaatgaaaacaaacaatttaaaatacatgtataatttataaacccacttggtgatattatataattcttttgagttttggaaagataggatcaatcatgcaaattgcaaggattgtcaacattttttcgtattttaatctttacttacaaagcctgataaggtttgaaacaagatctttatcataatttccttattaatattatctgtgtaagattctagaaggggcaaataatttcacaaccaaactctcttccttaagacacaaggtacatgtgatgataaacagagacagacacttgatccggaaataaaccttaaacccttttaaacttgccatagaaactacaaaactccacttagcctgagactaatacatacacaactaattaatcccggctctttaagaagtggttaattcctatttgatccgacctagaatttcagacacagatctcatcctaggacgcatatctggatccatttccgtgcagtttaaagcgacatggatggttgcaataacctgcttattcgcaaaatcctgtttcagaagctttgggtctaagatctcagccaaagatctctcttccttgtgccacttcctcaaaacattcacgagttcttcttctccttcgttttcagaggaaccataaggtaatcgaccagtcaacagctccaatagaatcacaccaaaagaataaacatcgcatttgtgagataatttgcaatcagaagaagctcgggcttcgggtgcaaggtaagcagctgcaggagctgagactgagagtcttgtggcaaatccttggtctatactttgcgtcatggatgatagtgaatggtcagtgactttgggatagccggaaaccagtcgtgtgagaccaaatcctgagacgtgaggatgcagctcattatctaacaggattttgcttgattttaggttgccgtgaacatactttctcgaactgtattcatgtatatacatcaaaccccgagcagtcccttgagctatacataacctctcagcccaagagagtgtaggccgagtattcgaaggtccacctacagaaaaaaattcaaatgccgtctcagaaaccagtgatacatgatactcaaagcacagcatatctcaggaaaatggaaaaatctcaacgagtactaacttcccaaggcagatcaagcagaggttaactatgaaaaacacacatctatcggatcataaactaatctctgtctaagaaccaaaaagaaatattctttctgtcacattaaacactctctagactaccattaactcattctcgacttaagttttcccatgaaaataacaggaccacatactataatgctacacagaagcaaatctgtatgcttgtcatcgagttctactgtttcaagtttcaacacatgtaaacacagtaaagctt

SEQ ID NO: 366 - DNA, 85835 bp, Arabidopsis thaliana
gatctttatcataatttccttattaatattatctgtgtaagattctagaaggggcaaataatttcacaaccaaactctcttccttaagacacaaggtacatgtgatgataaacagagacagacacttgatccggaaataaaccttaaacccttttaaacttgccatagaaactacaaaactccacttagcctgagactaatacatacacaactaattaatcccggctctttaagaagtggttaattcctatttgatccgacctagaatttcagacacagatctcatcctaggacgcatatctggatccatttccgtgcagtttaaagcgacatggatggttgcaataacctgcttattcgcaaaatcctgtttcagaagctttgggtctaagatctcagccaaagatctctcttccttgtgccacttcctcaaaacattcacgagttcttcttctccttcgttttcagaggaaccataaggtaatcgaccagtcaacagctccaatagaatcacaccaaaagaataaacatcgcatttgtgagataatttgcaatcagaagaagctcgggcttcgggtgcaaggtaagcagctgcaggagctgagactgagagtcttgtggcaaatccttggtctatactttgcgtcatggatgatagtgaatggtcagtgactttgggatagccggaaaccagtcgtgtgagaccaaatcctgagacgtgaggatgcagctcattatctaacaggattttgcttgattttaggttgccgtgaacatactttctcgaactgtattcatgtatatacatcaaaccccgagcagtcccttgagctatacataacctctcagcccaagagagtgtaggccgagtattcgaaggtccacctacagaaaaaaattcaaatgccgtctcagaaaccagtgatacatgatactcaaagcacagcatatctcaggaaaatggaaaaatctcaacgagtactaacttcccaaggcagatcaagcagaggttaactatgaaaaacacacatctatcggatcataaactaatctctgtctaagaaccaaaaagaaatattctttctgtcacattaaacactctctagactaccattaactcattctcgacttaagttttcccatgaaaataacaggaccacatactataatgctacacagaagcaaatctgtatgcttgtcatcgagttctactgtttcaagtttcaacacatgtaaacacagtaaagctttgaacaataaaacaatgagaagaagcgaacatgttagtcaatacaacacaatcagacaaagacaaaaaaaaagctctccactttatagtcagagcaagtacacataaaaaccttataactagtggtagatttatgcagaattagcaccaaaataggaaaaagattagtgttttaccatgtaaggcagagtacaagctgccattgttaatgaaatcagtgatgagaagcttctcgtcctctgcatagtagtaagctcttagccgtacaatgttaggatgattgatcctaccaatgctctcaacttcattcacaaaatccttaaatcgccacgtgtcattgccgtcgctgagccttctaacggcgacaacggtggaggacgattccgccgccactactctatacacaatcccgcttctgctcttgcctatcacgtaagccgatgctctcagcaaatcctcaagctcaagctcgaatccttcatcaaacgctacgaatttaccttcttgcccttcttcgtcgaactctgaaaccaccgtcgtcgtctttgtctccgaattgtacccatcggagcttcgttttctccggatcagccatacagagagagaaacagctccgattacaaccgaaactccagaaatcagagaaacggttactgaaccggtgatctgctgcttcttctcctttgcgtcgtcattgctgattacactagggtttggtttctggagttcttgagtaccttccggctttgcagcgacgaaatttggggttttgattttttcacacggcgtttgcaatgggaagccacagagatgagagtttccagcgaatgcgtttggtccttgattcaacagagatcccacctgaggtacttttccggtgagattgttgtgactaaaatctaagctgacgtgaactcgaaatcgaccgtacgacggtggaatctcgccggtgaattggttgaaagagaaattcaaggttccgacgaggcttccgagttcagtgagtgactcagggagtgaaccgttgagatgattggaggagaaatcaaggtggttgagtgacttcatggacttgatttgggccggtattgggccggagagtgagttgtgagagagatcgatgtaccggagcttggttgcttcgaagagacgaaccggtatggttttagagaaattgttgtgagctagatcaagccggtttagcgagttgagtaaaccgagttctgatggaatgtaaccggagagactttttccgaagagtacaagagttgtgactcggccgtttgtgcagacgattccggaccaatggcaaggagtcgggtcggattcagaccagtgggtcattactcgggtcgggtcgttatcgacggcggatttgagagctaggagagataaaccgtcggaattgagagaggagcaaaagctcatgcagagaaagatggaagaaacaacaagtgaaagaatcgatggtaacttcattttttgcttaggatataggaatcttgaaactttttggttgttaaagaagctacaaattacagatgattcatatagtgtgaggcaacgagaagttgcagaggaaaaacggtaaacagtgaagacgaaggagaagaataatgggagatttgaccgaggtatgattcttttatggtttcatgttagcaacgtggtgtaatgtagtcatgatcaattttttgaattcttgtccatatactatggtttgaaattttaataatatatacactacagttctaattaaaaatgtgatatattgggatttgcgttttgggtttttgacattttgtggttatttttgaaactttttgaagtttagttattgattgatgcaggtgggttgttgttacatttttaatttgtgtgtatccgttggtgatatctagggtcactggatttttatagcattaaaactatatataggtatcaaaaaaaaaagttacaacaaatttgggatacaaaaaataaacaaagtgttatcttaaatgctatagtctatagaatcttaactcgtataggacctcttcactcttgagccatgaaaaaactgtacagtcccactgggtcgataattgttttacttttacaagattcagcagtaactaaaaaaaggattaaaatatgtttaagaataattgaaaataatcgaactcgacctattgcatatgaatttgaattggatagaggatgtcatatttattcaaattaaaggagggaagagacggtagagagtggattgtgtcagagaaaaatcattaaccaaccgacaaagtaaccacacaaagatgcatttgaaaatatgccacttttggctcctctactcctagtcttaatgggcaattccgaaatatacacgaagagtcacaagtcccattgttgttgggttagcactttgtcacggcccaaattcaacttattcacaacatcaaataaatatatgcatcatatcatcacatccgacttttgttaacaattacttttttcagttaaagaactttcaagaggaaatagtagtaccttaaaatcctacaaaaccttgtcgtgcaagaactgggagggctacaaattgcggtcaatgtacgcaaacatcttaccgtttttggtacaaacactagaactccaatgcagtgagtgagatgggccaattttggcaatctcaatcaacggtccatgtggcccaataaatcactaaaaacggccgaatttttagatccatgtaacttaaataattggtggggacggaaagtcttgtcgttttcatttattcgagtgtggcactctgattcatctcaagcttattttttataaaaagagtaattttagaggctgaacaataacgaccttgaacaaaataaaataaaataagagggtgaacaacgaccagtcaaaatttgaaaatttactcaccagagtctataaaaattaaaaaggaaaggaaaaaaaaagaatgaatcatagtgaaatgaccttatttatggctccaactatagtgattagtaaccactaaaccagaaaaaaacaagtgacccattacacagggattaaaaatactaccgaataaagcccaataggcccaattcaaaagcgtctctctatcatcgtctctccaaaccccataaattggatatttcctttctctaaaaatttggctttattaacagacgcactccaaagctaacgttgctttcttcccactccaaatggctcttgtgctctcagaacacacacagatataataaactcttaacgaagaagaagactttttcttttcttgagcaagctctgagaaactcacagagagggacagagagagaaatatttcattcgctactctctttaataccgccattgatgcaacctccttcgcgttaactgtcaaaatactccccaactgacaaaaattaaattcctttttttctctctcgattttaaaagctctaaaaggaacgagttgatcaagtcggtcggttctggttatcactgaatttcattcaactcggtttattccggtttaagtgtgattttcccggctaatggatctgacccaaggtttcagagctagatccggcgttgttgggccggtggccggactagaatctctcaatttcagcgacgaatttcggcacttagtgacgacgatgcctccggagactactggcggctccttcacggctttactcgagatgcctgtgactcaggccatggagcttctccatttcccagattcatcgtcttctcaggccagaaccgttaccagtggtgatatttctcctaccactcttcaccctttcggggctttgacttttccttctaactcgcttctcttggaccgcgccgctcgtttctcggtgattgctacagagcaaaacggtaatttttccggcgagactgctaactctttaccttctaatcccggcgcgaatctggacagagtcaaagccgagcctgctgagaccgattcaatggtggagaatcagaaccagagctactcttctggaaaaaggaaagaacgcgagaagaaggtgataccaattgttcacacaatcaaacttgttaattaaacaagagagattagtccctaatttctttattccttaatttctaggtcaaaagctcgacgaagaagaacaagagctccgtggagtcagacaagttgccatatgttcatgtcagagctcgtcgtggtcaagctactgataaccatagcttagcagagagagtaattcacaatctcacagacatggtttgtattaattaattagtggcaatatgctaattaatcattaactcttgattataggcaagaagggagaagataaacgcacgaatgaagctgctacaggaactggtcccaggctgtgataaggtttgtctttagataattgaccttttaatcaaaaagctaatcaataattagatcttcatttgtgcttaaagacagaatctttctttattaagaccaacccccaaaaagtgattttttttctataatttgatcatgtggtttgataagggtttagtgctaaattcctcttatatgaaaaaggttttgtggtgtgacaaagaacaaaaccactagtttggtaatttcactgccttgaagatatgtaaactttattttcgtgtggggaagaatatctcacgggtcacaaccatttaggtaaactagtagtagtaatacggaagtgatgtgacattgctcaatagattcttgtttcttcttcccaaagtgtattcatttgagcttgaagcttactccataaatgccgataatggattatatgatgtgggaatgctagctggactgttcccttaaggttttgggtagaggggacagattttggtggatagatcaaggtcagactgtgttttggggtccatcttttgataataagtggcaaaagttgcaggctttctatggagggtgaggagtgtagtatcgtctctaataagtttggtatctatcaagtagaaagagggtgaggagtgtagtatcgtcactaatattgttatatgctttgagtcccacaatacctaattggttggatacatgatgtgacactcctgcagacagctaactaatccatagatatcttggaatttagctgcaattattggtggaaggagatgatgataagtgacaactctttaagagtttgtcaaatttgtggggttttgggacttgattgtttgtttcatgaaatcctgagaaatcctgaatccatgtttgtaaactacagatgttgctctgattcgcttttctggcatattatcttgaaaagagtagagttgttgattttatagaagccgttatacatatgcaacttaggattaaggctcattttcacactgcttcgttaaccacatatatttctaaaaactatgccttgttcttctttctttctgactgaccagaaagctttggcctgcagattcagggcactgcattggttctggatgaaatcattaaccatgtgcaaactttacagcgtcaagtggaggtaggacttcttgcactatcttttgttgttgtttacctgaaggtcctgaactgaaacactaagctacacaatgtatgataaaattggtgccacagtgtcacataaccgtttttcttcttttcagatgctatctatgagacttgctgcagtaaaccccagaatcgacttcaatctagacagcatactggcttcagaggtaagtatcaactaatcatataggagaattaaggttgcatgtgatcttcttttacaataaaaactcttaaattcaatgttcactgggaaaaacttccctttgaccatgttactcgtttaagtaaccatagggattatgtttctttgagtaacctttttaagttgtatcacaaaaagagaaacttttggatatttattgatccaacattaatcgaccctattctagactaggcttaaagaagaagaacaacgtgggggaaataaatacttagaccttacaaaaatgcagtacaaacagtgagatcaaggactctaaaaaatcttttgaaaggactcattagttctctcaattatatcatacagagagataaaagtggtcagaaacacggaccacctttgttctatggtctatgatgctgtcttttttttttatccttgcacaattatttttctgtgggtctcagtcttaagttattgttgcttcaagtttcacctatctaatctaataatcaacttttgtttctctgcaaataactttcttattaaatgaccttcttcttttacagcttgtacaccatttaagaaccagaccccactcattaaaaaccttgttcttctaggatgagttacagtaaaatagagctggcttgttgactagattgagaatctaggatgttggatcaatcatctctaagagaagctgatatgttttacaaattgtgttaataatgatgaggtccaattatcttttctgcagaacggctctcttatggatggtagcttcaatgcagagtcttatcatcagctgcaacaatggcctttcgacggctaccaccagccggaatggggaagagaagaagatcatcatcaagccaatttctcaatgggttcagctactttacacccaaatcaggtgaaaatggagctctaagttggaaacagtttgacatgcttatgtgtatatataagagttatatatatctactaaagtttcgattgttgaattagaggtagaaaatggttatgattgtttcaggtctttgttcatggcctttctatatttactagattcctcaatgtagaattcagaatgtctaaattgcgtttcccttgagagaagtatatgaagatttgatatgttactgagcaattacgacgtcgtacacgaatactatcatccaatactgcttaaccgactagtgtgaccaattcaatttggtctacctaaattataaccaaactgccagaaccgatttggactacaaaatttccagtcaaaccgtaaaacaaaatgagaactgagaataccaagtcataccgaacataaaagagagtcaatttcgtatataaatctgttagaccggataatctaagctgaaaccattatataattcccaattaaactgacaatttcaataaaccaaaattgaaattctcggttcggttcgaatgaaaccttttgtaggtcgtggtcgtatatagttggacacttgacaaatctgagcatttcctttttgcttacagcggaaatatctgaaccaacgcgatgccgtcgacgcagtccttgaccgtcgcagcgaagacgctacgaaatcggatcttctctaggtctggatctacatccgccggtccgagtcggtgggcgacgccaggtcacgaggagcgacctaagggttactttatgaaccgtactcctccggcaccaggacagtcgcgaaaatgggaagattgggagcttccttgttacatcaccagcttccttacaattgttatcctcggcgttggactcaatgccaaacctgatctttcaatcgagacttgggctcatcagaaagctttagagcgtcttgagatggagaagctcgcgaccgctggagattcatctgattaagcatcaccgttggatctccggttgcttgatttggtatgtccttattctccgggagttgaggagtttttttaccgtttaatgatgatgataacgaagactggagagttagggtttcgtttggcccttgaactttgtttcaattctcctttgttttgtcgataatgatgatgttcatgaaataagtgttcttttaactgtttagacgcaattgccttcactctctacttcttattacaattctcaaatttggtcacttttgatttactcatttctcaaatgattcaatttcgactattgattgctgcattactaattggagaaagagattaaacgagagttgtatgctgatgttgtgtgcttctcttccttagttcatggcttgtttatgttctctgtgaatctcaggtttgcttgtttcactcagtgcagtgcatattgattagattaatagctactttatgttagtcgattcttatctctttagatcatcttttttatacttgtcatttgttgtagtagtagtgataagctgatagtgtagctctaactagggcatggattgttcctttgtgttgtagacatgttcgtgattataggttattgcagcgtgcacaataagttttgtaggctttcaagtggttggaatggcatcagccattgttagatgcaacactctagatttcagttttgtcatttgctgtattttattaggctagcgtttggagttttcatggtgtcagctattggtagatttgacacactagatttcagtttctttgacggtggtgtttattaggtttctacttagctgagaatagcagatgagaatgttgatttcgatcttatacttggacaagtctggagttgaaagtaacttcactagatttgggtagataatgttttagaaatcatgactgcttacctctatctctatagattttggtcgattaatactatactgcctttgagtactactattgctcatagtttcccaaatcctttgtttagtttcctaaagtgtggcttcatattcttctcttttaagtacaagtactttatgctggtgttggctttttagcaagcttgtgatcttcatctcatcctctggtttcatacatgatgattaaacaaaagaagagactagcgattaaacaatagaagagactagagtagtagcttaatttgttgtttgccttagttgagcaatctcgtgtcatcaaattgcatcacatagagagggatcttgtggtaattacttctctctgtgtagttgtgtttcccgagagtacaattctgtaacactgtctggaaccattaggctaggtctaagaagagacattatcacgacactcttcacatgctttttttttttatctctggagacccaagaagagtctagtgtaaagccatgtgaagaccatttgtcatctatccatttcctctgtacatcaatcagatgttttcagtttaagaaggaaaaaaaaaaaaactcggtagtcgtatgtaaatgtaagtcggtgtcggtcggtggagttgaagccaaataatcaataatgtttaggacgaaagtgaaaaggtcaataacggtcaattaaaagtaaagtttatttttctggtaatgtgaccggttattcccggtaaacacacgagccaccgacacatacttccatgggtcacgaccacgattgcagtccgtacacgatccatgtttttatttatttaaacgcaccataacttcccgcattcggatctcccatagcaaagacagagagagaagtaaagtagctttattatggattacagataaaagacaggtaatctcaatgacgcaaagataaagacaggcaatttcacttcagtgatgcaaatctgacagtagacttcactcttgtgtatattaaagtaaccgtcttgaagaggaaggaagataaccaagtgaatttcgtgatggtttcattgtaaaacaccactttttcaaattctctccttctcttggtgctctgtttctgttggagatttcagtcattggtaatctcttcttctcttctctagtcctcatggttgtttcatgctctgtttcttttctttgaaactgatagatagatcgttggatactttagaaaatgcattttattggttttatcaaatcaagttaatttactcgttcttgtaaaatccctatgtgaatgcacccatttttctattttagcaactatggacaagtagctggggcctcaactgctactgtaggatcagacaaaaacatagcaagtgccaattatgtcattttcctcctccattatttgctgtcgttttcaggaacaggaatatatcttagctgtgttttatcctttcgctcatcttgcaaaatggaaatctaaaaatctttacttcttgaagattgattatcacagaattttggtttctttcttgtctttgtagggttacacaaatcttcttggattgttttctcacgttgctttggctgtattgagagagtttcacgatgaaggcaagaacaactaacaatgttgttcagtcgaagagatctactaagagtgtaagaaaagatcaaaagctgcagaagacgaatagccagaaaaaaacagaacaggagaagcacaaggacttggatactaaggaagagtctagtaatatctctacagtagcaagtgattcaaccatacaatcagatccctctgagtcttacgagacggtagatgttcgttacttggatgatgataatggtgtcattgcctctgcagatgctcatcaagaatcagattctagcagcgttgttgacaaaacggagaaggagcataatttaagtggatccatttgtgatttggagaaagatgttgatgagcaagaatgtaaagatgctaacattgataaagatgctcgtgaaggtatcagtgctgatgtttgggaagatgcttcgaatggtgctcttagtgctggcagtgagaatgaagcagctgatgtaacagagaataatggtgggaactttgaagatggatcttcggaagagaagattgaacgtttagagacgaggatcgagaaacttgaagaggagcttagagaagttgctgcactcgagatttcgctctattctgttgtgccggaccattgtagctctgctcacaagcttcatacgcctgctcggcgtatttctagaatctacatccatgcctgtaagcattttactcagggaaagcgtgctacgatcgctagaaactctgtatctggtcttgttttggttgccaaatcttgtgggaatgatgtttcgaggtacacatattctatttgacatgtgagtgaaatttcaggatcttgattcttctcagttgtgagtctaaacaaatgttctgttgttttctcttggttcacattttttaggttgaccttctggttatcaaacatcatagctttgaggcagataatttcgcaagcatttggtaggtctcgcatcacacaaatctctgaaccaaatgagagtggtaatagtgattcagggaagaaaacgaacctgagatggaagaatggtttccaacagcttttggaggattggcaagaaactgaaacatttactactgcacttgagaaaatcgagttttgggtattctctagaatagtggagtctgtttggtggcaggtatatatataccaaatgtcctaactaaaaaaatgagcttcttagttagttgatgaagcatctcacttatgttctgcttcttctcctatctttaaggtctttactcctcatatgcaatcacctgaagacgactcatcagcaagtaaatcaaatgggaaactgatgggaccttccttgggtgatcagaaccaaggaaccttttcgataagcctatggaaaaatgctttccgagatgctctgcaacggatttgtcctatgcgaggagcgggacacgaatgcggttgcttacctgtattggctagaatggtaatcagattttccatatgttttagttcaagccaattcataagaatcatattcttatatcgtctttaaacaggttatggacaagtgtatcggtagattcgatgtagccatgtttaatgctattctccgcgaatcagaacatcagattccaactgatcctgtctctgatcctattcttgattccaaagttctgcctattcctgctggagacttaagctttggatcaggggcacaacttaaaaacgcggtaaacaacacgaaacaaagttcatattttcatagccattagaaacttggtaatgttgattaatctaatgacacaatagttcccttgcagattggcaattggtctagatgcctcactgaaatgtttggcatgaactctgatgattcttcagcgaaagaaaaacgaaacagtgaagatgatcatgtagaaagtaaagcctttgttttactaaatgaacttagtgatcttcttatgctcccaaaagacatgctgatggaaatatccattagagaagaggtttgtttgggatacatatctcagttactctttgtttatcggataagcccatcctatacatatttcagttactctttgtttttaaaacagatatgcccatcaatcagtcttccactcatcaaaagaatactctgcaacttcactcctgatgagttctgtccagatcaagtacccggagctgtcctagaagagcttaatgctgcagaggtacaaataattcagagtttggattcagtttgttctcataatcccaagaagtaaaatttgtaaacttcatttttttgttatatttccagagcattggtgataggaagctatcagaagcaagcttcccttatgcagcttcttctgtttcttacatgcctccatcgaccatggatatagcagaaaaagttgcagaggcttcagcaaaattgtcaaggaatgtgtctatgatacagagaaaagggtacacaagcgacgaggagcttgaggaactggactctcctcttacatccattgttgacaaagcgagtgacttcactggttcagcgacttcaaatgcaagatacaagcttcttcgacaagtgtgggtttagtttggaaccaagtcgaactgtaagtagtatgtatgtggttggtgtttggtattgcaaagagaatttggttgacttataaaaaagttgacttcttcacctaaaaactcataaactcaaatcaaagcttctcgaaagattacatattaaaggccacaaaggagattggattgacaatggtctagacctgtgtagagagagttctttacaatctcaatcatgagcttgaagatgtcgaatttgaccaacttatttgtttattttcaataaaaaacgagaggtacaagaggtattgttacaagccagagcagggaaacaaaatagtaaagctcactatctccacaaggtttgttcagatgcaaccaacagataatccagccaatatatcaacccacaaaaacatactgacttctctaactcagacccgttagcagggaaatgtcgatgctccaatacatttatacatacttcctgaaacaagtaacaaaaagcacaaatcagattaacagagatcatcagaaaatcacacttctccagcttttataaagttgaaattttatcatctcgtaggaaactgaaaagtaatatcaactcttctccgtgatgagaagctattaactctctatccttaaaatcttcaggcacatcttcaggatttccaacagagcatccaaaggataaacctttataaccttcatcaatgatctgttcagtaacctgaaaaacaagaattgcgaatatgcattgtctaacaaagaaaacaacttcatcaatcttgtaaatcgttatacaagtgactggtcaagccaaagtatacgcaaactcagatgcctgcagagacaaaaggtgagatttttttaactgtcaataaacgaattatgatagcaaatctattcgtaatattccaaacccatgaattctcctggttataccagtgagtgttcatattcaaaccttcatatgttccaaaacacagcttgttctgctaatgttcctgaaattaggatactaattatacgattaaacaatggacaatatgaggactcaattatcttcttgacaatcctagagaacgctcaccaaacagtacacattttctacaaagaaaaacacagaggggaaatagagaagtcgtatgcaaaattaccttcttacttccttattaggggtaatgtttcattgttttccagtaacagcactatagtgcatcttaagcaagctgtcaagatcaacaggaaaccaacgtccttcttcctgggccaacaacttagagtttgctgagtctagtaacacactcacgttcccgaacctatagatctgaagaccgttgtgcattctatgaggtttaggtttcaacagcaactccttctcctgcgcaaacaattctactgcttctttaaaactcagctcctccgggtcatccacctgagcctgaaccttagcacgaccctcagactgcctctgctcttgtgccttgtggtaacttatgttttcccttgcccctggctgagacatttccatccgttcaactgcttccctcgccatatctagaccacgcttgaactggatttcgatcctcctgtttgcagaaagctcctgtgggaatgttcctttccaacccaaaaaccatttcattatctcatcgaactttggttctgaacacaaccagtgatataaaacatccagccacttggggaaaaagaatctctccatcaaatcagtcattagatgaatgggtactgaagatacccaccccataaccaaattgaactcgtctaagttctgatctgctgggtttatctggaactcttgcaaggccacctgtaatttaggaactatgtaacgacgcataagctgctcccagcttgcagcatcaaaaacagtcttccaaggggaaaggatagtgtggacagacacatcactaggatgccaagcatcaagaaggttaccgaatttcattcgaatgatctgatacgcactttccaacttctgaccaagtactggcagccacggatgtacccaaaagtggatgggaacagtttccaaacgtggttcccaagattcaatagcgattgacaattttggcagcactactgtggtcaaaatcgtttcgaaaataagtgagggtagcattttctcccatgtctctagcaatctcaacattggctcaggatctctaggttcccaagtattgatgcctgatactcgcacagcaggtaaaattacctctgagacaagttggctataaggcgtcgagatactttgattgtcctcaacttccagcagcattttccaggaagatatagcctcgataccatgctctgcatcactaagagggtcccaaccctgaaacatcctgataaagagaggcaaggccagtgaggaagcaatgcatgacaagttacaacacttatagtcatcaggatagcttgaacgcaagtccttgaaacgattggcaagtgaatccaaggttaaattcccagacgcaatctccacctcaattcgatcgatttcctctgcaacatatcccaagttgtcaaacagcgttttctgtttctttacccccatcttaaatttctccttctcttgctgcaagctcaaggctaatcctttctcgttcctcaaatccttatcagtcttcagaatcccatgctcgagtgatttaacaataaaccgcaagttatgctgtaactctggctgttgaacattagcatctgttgctttctcctctgcgtataaatttctcaaactgttaacaactcgatcttgtggtcctcgcttatcaataataagctgatcacaaccaaaaccctcttcctgtttcttcccaagaaactcttccgcggtaatataaacttccttcctcacattcttctttttccaaagatccctccttccatcaccatgattctcactaacagtgaccacaacactcttcttcttctcctcaaccttgtttaaacaaggaaacaaaggtgcattcttctccttgaaatcattgtaacccatacccatattcttcggtctcaattgtacttcaataggagctacaattccctgctgattctttccaagccctcttcctttatatcccattttttcaagcaatttcataccaatccctccactaaacttttcaaagttttcctttttattattcttctctctcacatgtgccttgtcagctattttcttacccaatgcaataggtaaaatagtatcatcattctcatcaattttacagtttccccgattctgtttcagtacttgatcaatgttaccagcagaagaaaatttgacaggtttggttttacgcctcttcttcctccgagagccgccggaatcatcagagttcgaatcactttcgaagacgaatccataaacagcgtcctccttagtctgtctcctcttctccttcttcccttcgtcacccatgataaagccacgaaagctttcaatttagggttcctgcaaaaactgaaacaattaggaatattatttcaattggtaaagaccttggtaaaaggcaggagtagggatcacgaaaaaaaaaattgatcacaaaggaaaatttgaagaagcgtacctgcgaatttgagacggagcaaagatgaacaaagcgttttttactctttgaccaattcaaatgaagacggtttattctgatttacttaaaaaggactaacagcgtttcggaattaaaagcgagcaaatagtagctttgcccgtttgccgtacggggtcaatatgacctcgttttatcaaaaacactctccgaatgtttcaccgtctttacgcaatacccaactaaatattaatgggctttactattttggcccagagacactatgtcatgtcttcgaaatcgtgagacttcttaagaaatgtaccgtgaaatattagggttatttgcgttgagcataaaagttctttgtgtcagaagctgacaatattattttcagaatgagtgagcgtataaaagttttagacaaacgggtaagaagatgttgggatgttgtcgctttctctctcgtcgagtctgactcttgtttttctatatgctttgcgtccatcatgaattctttacatgattgtttttatttatgccaccagttcatgatgcgtttattttaaaatctagacatcgaagatctcagtaaattatgtcacggaagatgaattacaaagaatatgtttaaaatatcactaaaaagcaccaaaaaatgacttattgcgattgtttaatcgtgtcaataataacttattcttacatctaacaatcttttaaccgtaatctaatacatattccgttttgaaataaattcaaactatttattttataataataattcgaaatattattctaaacactaattttaattttacattgctccatcttaacaaataagagctaaaaaagaaaaagaaaaacctacatgtcaacctcattgatgatattaaaattctaaataataatccataaatttttcattagctctaatactcatcgatcgttagaaatatgtgttctaattcttcgcgtagttcgagtgatgatggttcgcacataactcgcacacaagtgttgcgaagataatcctaatatttatatagttttattaacactcgagttgattgacaataatcatgtatcaatatagtcgtaagcatgtattgtagatgtcaaatttggcatggtttgattgctcaagaatcggtagtgaaacttctatagcgttttcaactattatatacttccttcttattttcgcatagtgagaacctgtcaaattcaatttactttgcatcgcagatggcatgccttctacatcgttccagtcagtgatatgatcattcatttgctcaatcaatctctcatctaccgcctcaattgtttcagcatcagagggatcaaatccttcggcttgtgctaaaagaaacaaaagacgaagaaaaacagaagatgtttgatattaaagaacacataacatgttaactacatcatattacatcgtggctagagtcatgagttggtatggttgaatttgcatgagatcatttgtctttggcagaattagtcttcagattttcattctcctagactttccggttttgttgcatactgtgatctatcagttcgacggataagcacatcaaaaaatctattaaaaaaattgtcaaaagaaattaacataaaaaatttatataaggatttaaatccaaatcaattgtttaattaacttggaaaaaaaaaccataataaacgatctttattgagtctagacatttaattgaatctagccttaaccgaatggttaaaaaaacaaaagtctcactaaaagaaagaaagaaaaaaacattatttcgtgttttctaaaaaggattattcgggttgacgggttgggcctatttgagtctagccaactgaatggtaaaaaagcccacaaaacaatatatttcgagtatagccgatagcccgacaacccgacccgacgttagtgaaaggacaatctttgctttttgtcattttgcctttgtgaattttgtgactgatttgtagggtaaatgctcgtttttcctttcttaaaacatttttggggctgtgttgctttgtttccttgaagaacatttttactagcaagaaactccatctctgtaccggatagactagagaaagcattttggtgctaagcttaatatattcctcaatatataaagaatatatatggaggggtgttgttcactatttccttatcaacaagtatctcgctataacacaagctgagattcgagtcaaatctccaaagcgtcactggctccttcattcccatcggtttcctacatgcttccttagccctgcttgttcactgatgatattcccagctctcacttgtccactgatattgttcccagctgcagctctcacttgcccactgatgatgttcccagcagaagctctcacttgtccactgatgttgttcccagctgcaagtctcacttgcccagctccaactcttgtagggaataaaactttgtgtagctgtagtacgattttcaacaagtccatagtagttgaaatctccttcttcatcgattcgattgcttcaacatcagcaggatcaagtagttgggattgtgctagaaaaagccaaagacaaacacaaacacaagcttttgttgagaatgaagaacacatgaaacaaagggatgaattaagtgagaagaagtttactctgcagcttagaggcttgtttcttcatcttcttcctcgttgatttactacttacatctgcagcactcggtggtggtggtggtggtggaacttgttgagcttcttcttctgccttaatcaatgacttccaaatactcgcaatctgagactcggtcagattcagattctctgtcagcttagacaccacttcttccagacttttgaaatcacccacatgatccagaattttctcactccaattcgcttcgtccggattgtaatctatgaacaaagaaactcatgaatcatcacaaacaacgagaccagcaaataaacctcaacgcaggatccagaatccataacaacgcaaaaaacggaacaacgagattttagattccaaaattcgcggaaatcaaattgattttcctaataaaaaagattattaatcttcataacactcaatcaatcaccagaaataatcaatttctcctccggaacaatcaaattgatcaccagaaattatcaatttctccaccggaaaaatcaatcgatcaccagtaaaaccacgccaaatccatgaaaacgcaatgaaacagaacggatttacagaaatgactagcataaacgaaacgcagaaaaactcttagatccaaaacgcgaaactcataactgattcgttggttgagaatctagatcgattacctggaatttgattccgagaaactgagaaacagagaacgaacggcgttttctccatcttctgtaactgagagaccttgggatgcgaagaaaaaaacgatcggagaagagaatgagcaacggatttcttcaagctactctgcgtttgccgctatcatctgttttcgaattccctccctctctacgccacaaaatatatgggccttgctttggtgtcccttttagcccattttaattcacatcaacccaattagcaaccccacaattaatttcggttttcttttttttttatagatttatttaattctattatatttcttctcaaaccattttagttctactatccttattcttgattattataaaaccaacaaccaaacacacttttaacattatatatacttatcaaaactaatattttcgattctcaaatatttttagtttatatttatatgcattgaaaatttcaattcgaaagatattactttctaatctactaaaaattaaagtaattatttatatgacagaatctttataaaaatctaacaaaaaaaatgagttttgacatcccaaaataaatgataacatattatattttcttattaatcattttattataattgggatccaacaaacatcaacattttattctttgaattacaatgtttattataattatcttcagaaaatggtaagaaacttataatatatatatatatatatataagtatatttattaaactaagttgtttatacatatatataccttataagatactcaaaacctataaaaaaatttacccacaaaaaaaaaacataaaaaggataatcaaactacacctgattacgggaaggtttttggtttcatagttctttttatgtacataaaaaaaatgagacccaaatccagtgagatatgaaaagtacaaatatcttaaatgagaaaaagtcattatttcattgttaattataattttaaaaagataaaatataatatgttttgaagatatatcatcaaaatacaatgacttttttcctacaagtatatacaaggaaacaaaagagctaacgtgtggaaaaaaaaaaacaattaaaaagagagttgaatttttaatatattcacacaacttgtaatagattagcatgtttgtctacttcgaatactcttcttcaagtcaaaccatatgattctcacacgcagcctcgctccatacctcacgttataactttaaaatttcgtattttcttgactatgctccatttacattaagtcctgtcatattattgggagaaattgtatcatcatatatctagaattctcatatacactgtcgacatgttatgtattacggtataaagaatattgcaatcctatattattattttttgaatttccaaagtttaatttaaaattaagaaaatgataacaaatccgagtaaagtcaacaatttccttcgaaaatttatgagtattctgctgcctattttctcacacccaccaatcatattgtatgtcccttgaatccaagtaatagctatgaagaataaacaaaagtagaaaaaataataaaaaacaatttaattacacaacatgagatccattcaatctattagtaacttgttattagattatagtaaccactttctgtctcttgttctaccaaaacaaaacgcttcatcatgagctctaacaacaaaactgatgattccgacgaccgttctttctggcaaaactcgacttcttacgatgccagcagcaagattttcctcgtcaccaccgtttccttctctattattatcatcatcgtgttcgtttattatctctacgcaaaattcgttctccaccgtagatcagccttccaagacctctccttctctgtcgtttctcagccgccaaaacgtggcctcgattctctagtcatcgcttctctcccaacgttcgtggttggaatcaagaatgacgtggcgggtacggaatgtgcggtttgtctaagcttattggaggagaaagataatgcaaggatgttaccgaactgcaaacacgtgttccacgtgtcttgcgttgacacgtggctcaccacgcagtccacttgtcccgtttgtcgaactgaagccgagccaagtcatccaaggcttgagcctgagcctagggaagggccagttggcgactttgcaccgccgttagatttcgcgggggttgataacaaaaccggcggatcatcggtttcgaggttagactcgttccggaggattttgacaagggaaagatcttcgaacaggcgggatcattctcgcgttgaccaagatcgtgaattggatattgaaagacagtgaattcagtatatagtatatacacacatacgccggttaaaaaaaaaaaagtataaacacacatgcatccataattaatccttaattcatgaaccataatacttcttcttccttttaactttttattcttgtactgaaatcttttgtatgtgtaaatatgaatggcacactttttgtatgttacagtaattacaaaaacattgttgcttattgcttaacgtgtgaaaaggggaaaagaaaaaaagaaagttgaacttgtaacatacaatcgagacaattttgttattaaggtatatctaatgcgtgtgtgccctacatagacgactcttcttcaagtcaaactttgtggttcccacacgtatcctcacaggctcacacgttttaacctttaattttcgtattttcttgactatatatattatcattttttgttgacaaaataaattgtattatcatattttaaaattttgatagcagtatcatatgtaactctaacattctatgtttagagatgaatttatctatatatatctacttggataaaccaatttgcaccatactatttgcagcatatgagactaactaactcttgatacactgaaatgatggtagacaattcagtctatatatgcgagttaactcctaataccgtgaaatcataataggcaaattcagtccacaaattttttacgtaggattttgatattttccactctttatatatacagtctataatcttcaaacctatcacctataaataatctacaatctaccatttagtcaacaatggtgaaatttctaaaccctcgtgaaagtctacctatctcccaaagtttctaattctatctacttcacatttttctccacccaccaactaaagtataagccttggaaaaacaatcaaaataagaaattctataagtcctttattccttatataataaatcataagttagtaaactcttttgttcacttttcttttgcatccaccgaagaaaaaccagcttcacaatgagctccaacgacagagatcatcgcaggttcaactctgaccaccactcattctggcctaatccgtctacttacgatcttaacagcaagatcatgcttgccgcagtggcttctttatctggagttatcctcatcgtcttcgctcttcatctttacgcaagattcgttctccgacgccgtagagaagctttccgtggcctccccgtcattttccgccacccttttgagatgcctaagcgtggcctcaatcccacagtcatcgcttctctccctactttcactgttggagccactgatggcgtggctgcctccgctactgaatgcgcagtgtgtctaagcgtgttaaaggagcaagacaaggcgagagagttgcccaactgcaagcacatcttccacgtcgactgtgttgacacgtggctcaccacttgctccacttgtcctgtttgtcggactgaagttgagccaagaccgagacttgagcctgagccaagggaaggaccagtcggtactgcaccgcagttgttggtggaaaccaggctgaacttgactgtagaagccgcatcctcttcttcctcagataacaaaacagttgtatccccggcttcgcgattaaattcgtttaggaaaatcttgacgagggaaagatcttcgaacaggatcaaccattcttgtcctgaccaagatcgtgtggcagatcttgagagacattgagtcgacatatagatacatattatgcatataaatcatatacacatatcgataatctttaatttatacaatatcctcctttcttttttactatatcatgctctgtttttggttttagatagttttgtgtaacggaacactaaatatatgttagtcaaaagatacatctggtgcagttcatgccattcaagttaactattcacagtggtagacagtacatatcagggctccataaaagatgcagaaccattttagttacataaaactgagggagaagagagatcataaaagggttaccttcaatcaccaatcggaagctaaacctgttggataatcagtgtcattgtcacaatgtggcctaaaatgacgaagggtgacaaccagctgctaaacatccgccttgctcggctcaatctgagaattctggtgcagttgctccctgcattgaagtggcatctgcgatacttccattgctcactcccttactgcacaccagatttcaacagcatgagtgtaactattactatactcaatgaaacgaagcctcatggagaatgagaacattttcaaaaaaattgctttaatagtttttgaaacttcttctatgttctgcagtaactgcatcatattgataatatgaacaatataatcaccaagatcaaaatcaattgtcgaggagaagtgaagtaacttcatccttctaagccagaagctaatgaaaaaaacaaaaaaaagatttcatttcactcaaaagttcaaaacccatcaaactagaaatcattttctaaaagaacctatgatggatcaaaattgctccaaacagactataaatgagacacacacacaaacgctaattggcaatacaaatgtggattacttaattaccttgaaggaaacttgcatgttccttgacctgaaaacgaaaaattgcagaaaaagcatcaaactttcaacattttcaattagcaaaagtcataactatctgctagacattgatcctgaaagaaaatgtgaacttactaggattgagagaagtaacagctgcgttgttactaaagttgcaagcttcatctgcgagaccattccatcagataatagttattgaatacatacgaagccatcttcactatatccaatggatcgtagcaggatccaccttgctgaatctagacgcaatcagctcctctgggaccacaagcccagtcaatggccgtttaaagtgttgaatcctcaacgttgttcttcgccacgcaccaaagctccgtctctaatacctccccaccaaactccgcagtagcagcaaccgtaatgaggagaaatagagagattcattaggaagcagtgaggctgagagagagaatacacgatcattttccgagagattgatcgattttgtactcggagatttcgaagaggaggaagagtgtgaatttgaaagagtcgaatagatgttggagtttgttgtgattaatgtaaagatttgggtgaataatgtaaaatattttaattcttaccggttattgaactcggttatactgatttgggccgtattaaactccggcccatatacatatgggcctctaatgaagtgtttttagctgctctgtttttgatgacggagcatattaattatggttaattagtaaacaaaaagactctttagctccttaaccttttcaatttctgaaagaggaggagatcggaaaacaaaacccagtcatggatcctccggcgaatccttttgcatctcgagagcaagatacagtaactattttaagaaacctgattaagcaagctactttggaggaagaagtctctgaagcttcagagacacattctgttccgaacaaaatcagaattttagagtcagtgtcggacgaaatgaggaaatcgcaggagaacggtagtgatcagaaacagttgagtgaggaagacgagattgatattctggattcaaaagccatgagcttttcttttagttgtcacggtggtgggccaaagcggaagaaatgtaacgataagaaacgtaagcagcaagaagagaagtctaagaagaagctcaaggtacttgttgaaacattaaagcttgtacctttcaagccattaaaaaccctagattttgcttgttatgagagtctcttaaagactctcggattgtgggattttgtgcatttggaatttgatcaggatatggattatgatcttgtggctcaacttatagcttcctatagtgctggaggtaagtgcagctatataaacgggtctaggattaaacttagtcgtgcggatttggctcgatctttgaagttgcctaataagaaagaacgtgttgtcattcttgatgaggataaggaatttctggaatcagatgaatcaatcagtgttgttgaagatgttatctctaattggatgctactgcattgtgatgatgcgtggatgatgccagatgaagtggtggaatggatgaaaggtataaagaaaaagcaattggataagctggactgggctggactgatgtggtttatggttgagaaagagttgaaagcggagcctccactcggggattgtttctatgcgtcgcatttgcagatggtcattagatcacagaaaatagatctgtttaaggagagggatttgaaggtaaaggatgatattgctgctttgaatctaggaatggatgatggagccactgactcaaagaaagaaaactgtgtggaggaaagtacgaccaaactgaatcttgggcaagtgattgtgtccgaaatggctgctacgatggagctttatcatgaggaacaagcaattgatcttgaggaaaacaaggaacaaccaatggatcttaaggaagccaaggaagaaggagatgaaatggaatggagacagccatgttggctcacatttttttcaggggtgtgatgttggttgtgctactgtaggagatgaaaagaacggaacaagacataggaaagtgggagagaatgagatacttgaagatgaaattgagaaagatggagaaaagcaagaaggagggtttttattgtttcggaacggtaaaacactacaccaggaaaatctgatgttgggagatacatctacattaggttataattctgggctacaggttcatggcagttctacttgtgatttcctggcacctagagctgtcatgcatatggttccaggtcgttctcattttgggaatgataacaagagagagtttggtcacgagaatgatatttcataccattttgataaccctgctagtactaagaggttgaagacaccatcttgggatgacaagccagttccttttgacatttgcatggagcagattaagcacttggcagataaggctaagttatcatatgtcgagaaagaccaagcttgtggagaatcgaacatgagggaacaaatgttgcaaaatgaactgcaaaggagggaagacataattcagcaattgcacaaagaaagttatgaagagctacacaagaagaacgtagagatctataagcttgaaaatgaacttcgtatgatgacaagtgtattagcctggtaccagaaagctttaaaagaatcacagaaggcatgtagaaagcacaggaaagtttgccctttgcttgataaaccgatatacatagatgttaaaggtactggaggtttagtattgagcactgctgaaatcgagaagctaagattgaaagaagaaaaagaagaggggatgagacgagttctaatagagagacaagtaaaagaagttggaagtctctggattaaagagtatgaagtgaaccttaagaaaaaagtagagttgcttgacgggaagctgattgggtttcaaaataagatgaagctcttgaaagaaacaatttcaagacgcgaatctatatctgcaagatttgatgcaacatcaaacacttgagaaggtacttttctcttttagactcaaaactttcttaacttattgttgtcctcacacaattatgtaaataacctatggacgattgaactggaagaagagagcatgagtcttgtttaataagtccctattgagattctagtcatcaaatacttactggcttcttcttttgtaggcatttgcagaaccggcatgagtccaagaagaagattcaagaactcaaaataaagtaacgtcggatctttagtagctctgtagttttttggtagatatttttgaaatctattttgggtttgtagacaattagccagcgaatgtagccaatagcgatcaaagcgtcttatgaacactactctcatcaactacatttcagtcatctctctggtttggtcaaaattcgattagtaattacagactagaacactaatggctttagtgtgaatttccattaactttggaaggcttctttgttgctacttttcttctttcaccaaattcaactgtggccgccttgtatcatcatttggtaccaaatttaatttaaaaatgaaataaataattaaaatatcattattaccattggtccaattctataccataccatttgctgaaagaaactcaaaaccccaaatcttgaaaataaatattaattcttttttaggagaaataaacaaaaaaccaatcatgtaacgaagaacgtagtggtccagtcaaggaacacatcacgtgaataagcttaagcctttcaagatgtgtccacacgcgtttctcttttctcttctttcattttcactgcataagctttttcttatcgaccacaatatacttaaacggctattattcatggtaactcctaaacataaacgatcacaaaagttaccaaatatcagtgattattaaaaatcccagagttttggtctgctattacttatttctttatttttagaccacagtacatttttgtatactttcttcatttgtctttttcttacgtgagtggatgtaccatatgattttaccatctagattctgtatgacgtcaacatattgttgttttattacctaaaatagttcaatgtcgttaaatgacattttcctatgttgatactactatttttaaaaaccgttgagacagaaaaagggtgtaaacaggcgtttaatagctatagattacttttagccgttcaaaacaattatttttgttgatactctagatcactttagaatagaaataatcagagatagagactatttttttagtgaattaaccatagttcttgtttaatctgtcttattaaaatcaatataatgttatgcgagaagaaatatgatttagagtagacaatgatggaaaataaactactgtattccgaataaatcttaattagttcacaaatctctgtacacttcccaaaaaaaaaaaaaaaaaattcaactagttctttgtacaaacaacaattgatgattcccttccatcaaccccaagaaaaaaagacgacataaacaaaataaataagatacatcaaactgaattcatcacaacttaaaaacaatgtgattagaataaaaaatgtatatctcctgaatttcttacccgaaagagattttatagtcaagaacttttgccaagaagctaaaagagagaaatgttgatgatgatgcatgatggttaatttatgagacattgaggagctgctctgtttcaacggacgacttgatgtcgacggccggagtagcaccggctccggtcgccgataaatgatttgcattttccacattcgtgaggctttgttgattatacacttgtcgaagtctctctatttctctcttcaatgcttcttgatgtgctgcaaaataatattagttttttgatgttatattagctagtgagagaaaattattgggcgtgctcatatattgtcagtgataattgaatgcatcgacgagaaaatgaaaaatctcataaacacacatatattaattccataattatccaaaaaatttacatgagaattaaatccaaaagttacatgagattaataccgtctttgaaaagcttgtcttgagataaagcagcgattcgttgcttgagagcgctgttgtcaacgttaagaagcaaacgttgatgatccaagaatgcaactcttggcgataacactgacacttccgcctttaatttcagtttttttgccacaaaaatgatttaaggtcataataaatttataatcatgaaattatttgaataattaaaagattatgatttatgaatgtttgtataatgtacctgcaacgaagtgacgctacgttcgagctctgatatgtattgcagtttcctcacccttgatctctgtgctgattgccgatttgctaatattctgtagaaacattcagaaatatttattttatttttgttaacaatttaaaaaacattatatggttagtgatgtgacgctaatcttcagtaatcatatttttcaaaatatttggtgcatcgtaatcaaatctgatgagttgatatttttacgtgcatgcatgttcttgaataattttgttacctcttaacccttttgggatcgagaatccggttgccggagctatcaccggaattgttattcgacgccgtaccatcttctggctccatcttgcattggctttggacttcatcgttatagttgttgttgatattattgttcatgttatgatcggacggtggtaattctttgttatcgtcgttgaagctattggacggcgtggatgtgttcgaggaagatcccgtgggccccacattgttatttttgttgttgatatgggaaggattgctatgaaggttgtcgtcgtcggtgaacatcgacatgaactgttcgtcatcgaacctgtcgaattggtggtcttcgatgctgactgttggagcttcgaggaatgcgatagagtcgctgatggaacgacggtggttgccacggcgagacgctgagaagtcgaggaattcgtcgacccatgaggggttttgtacggtggttgtagcggtggcgacagcggttgcggttggggtagagaaaggagagagcttttgggaagagaaatcaggccaatgttgtgtcatgttggggattttaggagggagttgtgccattgaagaaaaaatagatggatcttgatccaaaagattaccaaagaaagcaaatctgaatttacaggattgaggaaggaaaaaaaaaaaaccttaattaataagtacaagataaactaacgtaaatccaattcagaaaaccaaaaacctagatgaaaaaacaaaggaaagaaacgaaatgtggagacaaatgggaagtggaattagatcaatgtcatgaaccatatgaagaagatagagaaaagaaaaaaggaaggagaggaagaaagaagaaaacggaacaagagtaaccaaaatggctatgtttaacaaatgatagttatataaatagaaggaagtaaaaaaacagaattaatgaaggagataaatagagatatatatatatatacatgagatatatattatgtaaaatcttatgaaagaacataataaattcgatgtgatcaaagtgtttaatttatctctctgagtagggccacatggagggagatattgagatcggacagctatgaaacagctgtcttgagaagtgaggctaaaggtctcaacggtataactggaaattctcctccactggtttttttctttttaatctatgtaaagagatttggaggaggaatcaagcaagcacgtgttcttgtgacctttcttttgttgaatggttaatacgtttctttcttatgaatggtttttcgataggttcatgtaaatgcaatatctcgtatttgttgcaaatcatatgtgtcaattaataattttggtacatgtaaacctacgtcaagcaagtacaatgaatacatgagttaatagcacacagtatcatctatatatagaataatagaattaagtcgagttgataaacatgacttaatttattggaaaacaaatccgacgacttagcttatttatcacatatctttcaccatggtaatggattatcttgttaccatcactgctatgaggagggctaaacaatgcatggagaaagtagggtagtggacgagtggagagagagtgaagagtataatgttgatgtgtgagtccatgtgatttgttttctgtactctttttttcccctctatatttgctttgtcccagaccacacccacatgtaggacacttgctactttttttttctctcttaaatcgtataattttggatattttgtctgtccaattttttacttttccggatcgataggaatatttaacggaatctatatttttttgttttgttgaaatgttaaaattataaatcaaacttgagaaagttatatgtacatgtatttacggaatatatagtcagtgaattatttctctaaatgtgtgtcggacagtaatctcatagaaatattttcatgattatcaaaaccaaacgattttgttttaaaggaggaaatcacacatcatctgttatgtcatttccaaataattccttcaagatcatcatccctaatataaccattagcatcttcagtttacaaatatcttagcgaccaacctctagctaaactccatgagctactcaagtttttcttttacctctaagtctgtccttaacagtgtgaagaagttccatcgccttgtctagtacataagctttaagtttcacctttcgacctaacagtgtgaagaagttcttttaccttcaagttgcactggggacttgattcatacaacatacgttgacatcaggctaccattgctagttcttgtttcgagagagaagcggcctatttacgattcaatacacatccatggaggtaatatattacagctaaatttgaagctttatgacagaatcatgcatttgctctgtatgtgtttacctgtgacactctttgtgttaaggcttggcatattgctgtttatgttttagtagaatgaaaattcttacagaatctgcactggcgaaatcttggtctgcttcactcgttagaggtgaccttaaactaaactatgtgactagttttccgttgagaagtgaagaaagcagctgtcgaagtgcaactcaagaaaatggaggtaaaataaacttagcaatagagagctgatactgtttcaatgtgattgagaacaatgagaagtgaagtgtttgtgaatttgtttcactgcaggaggaactagagaagaagaaagcaggagtatgcagagaggatgaattaggtttcagtgactcacaaggaagcagaagaaagaagtgcaatgattgaaggtaagcgtggagaagcaagaagaaacggctgctaaaatactgggccattagaattgttccaaaggcaacttgtggatgtttccaatcttgagtttacaaatcattttttcaggattttttaactgtaaatttctctcttctcttcaatggcttgtaatgttttttgtatattgattttgtctgtgagaaacaaacaagagttcattttcataaaaccttatatcagtcgaataattcaccatgagatcattcaaattgtgaatccatccattttctagaaaatctgcagatcatgtgactatcttacttgtgataagactcatcggtacctactatggtctgaggatctgaaggcttaataaacatgaagaccaagacaattatgtaactaggaacaaacaatctcacactgaataagtatagctagtaatgacacttgacatatgtggctttaacactcaggttccacgtaaaagcttcacaaaagtataatacaagttccagggagttagttagctgatctattaatgggaggtacattcttcagcagatagcgtcgtctcttagaccgagcacgactcctaagcatccataagatcactaagaaaccgataaaaaccatctgaagagcgaaaacaagcttcatacctggaaacaacaacaacaacaattgtttttgtatcagtttgctagacaatcaaacaaaacaaataagcttcccaagaaaagttgcaaaaccttgtagattcttgaccatgtcctgaagatttcctatagtataaaactcctttggatgaggcgttgaaccgagttgcaagtgtatagatttaaggttggctctaggtttgtagatgtagttaacgttaccacccattatacaagtgttgggacaatgaatgctactttcgtactcgtcgcttccatcgcagcaatctgagaaacagacaatgtcatgctgcttatccaatccaacaaaaacatgtagattactagcatacagcaagagacagctgaaacgagaatcatttagtcgaattcagaacattagtaactactgaccacagattcgatcattcacacgagaagagtaaacgaactttggagaacttccaatgttcctacagtaaaatttgccatttggacatgccgaagttcctgtaatgcaaaatcagaaattcagaaacttactcacaagaacacatttttcataattgaaattgtgaaagagaataagattcgatcaattctagtcctaaatctttttatctggaaagaatttaaagtctcatgtcatctcagctctctggattctaaattgagaaaaaagtgtgtaccaggctcatcggtgccgtcgagacaatcgcagaagttgtcgttgagacgatctcttgtgaaagatttggagccatctttgcatttgataacatctgagtcgaaatacttttcatctgcctcacaacaaagaagtaagtaagaatcagagaacaagaacatttttcagatttgtcgatataataaagataagagtcatcgaagaagtaacctaaagggtgaacaccaacgaggggagaggtcgaagcgacggagatgacgacgacggcgagtgacgaacacaacacgacgcattgcagcagcatccgttgactcgcatttggttaaaccgacgtcgttttaagattcgagtggattattccgaccagattctctctttacgatttcggcttttaagtttcaagttaagaataagtggagtggccagatatttgattcgatgggctttgaattatattgggctttgagttttcatttaatactacagtgttcagtattcgactattaagaaaagaaaaaaaatctacaattcaggttattattaaaacttgatttaattcttgattaataaactaaattaatttgattattttagtttggttcattttttcttctaagtttttttttcaatgtgaatcaaaactcttactcaaacgttcttaaattgtgtttgtactacggagtcccatcacctcttggctcttgttcaagagcaaaaagttgagaaacatccaagccttcaagaatgagaccatcaacaccattttgaaatcaagtaatggctggagaaggcataacaacttgaacagaagaagtttgaaccacgagtgaaagaagtgtaattcgaaagacttcaagtcacggttatttgcggttagctggtaatgaagaatgaaccactctaagaagcaaccaacttctacaacataaaacagttgtgagccgttgtgattttgtagttaagttgactgcttttcttcttatataccttcttctctagactatgtccattttatctcacaagtgatttttcacaagacattagatcccacgagtcataagtaacacacagagccaacacttagcacctaaaccattaacctaaacaacttttagttcctccttctagttctccctctaaaaatcatggactcggacaagaatagaccaacaagactgacttctccattattacccttttgcatctcctattcatttgtcctagtctggtccatacacccaaagcaatggacctcaaaatatgataaaaaaatgtgacaatacaagtctatttcttactaaccagtaaaccaaaccaaagaatttcaaattagagcaacctaagcctcatcctcctctgttcaagttgttgttgttgttcttgccttcattcttttctgagattctctgagatatgcttcagcttttctaccttttaaaagttccctgaaaacctttgtcacagtggtttgttctacaccatgaatctccttcatgaaattgatcatctcaggaagagtgtagaaattttcacagcagaacaagtagctatctctcactttctcctcttccttgctcaaaacaggttgactactttgctgttcatttacgacacaaattgtatgaatcagtgagaattagtgaattacaaatacgtaaaatcaaatacataattcatcagccagaattttgaattacttgtgcttcagtagtcgtcgtaacacactttccctctgatttctctgcttcaaacgagctaccagaatttttcgccattactctctctgttggtgatttgcttgtaatttagggtttaaagagaacaaggatgctcttgtcgtctgctgtctccctttttctagcccaattttataaacggcccagtaaagcccaattacataatctgagagcattagtgacttgtattggtttcaagtttcattcacacacacacgtagataagaattggaataaagaatcaatggtgttgcaaatgtacctttgaaatatgaatacaccacttcgttaacaaaatccttgtggttttaaaggagaaaaataaaatgcaaaaatttacaaacccatctacgattctatcaagaaaaagggcaaagaccagacttgtccatattaacacaacacatcaaagatcctatctcttcataatacagtcagaaagaaaaaaaaaaagaaaacagaggtggcgatggctcttttgtagaatgctggagacaacttggagctattgttgcaggagtcttgagttagattaccaatagctaacttcactccttacgacctttggttggaggagagggtttgtctgaagccactttaaactgtcccatcttcttctgcagatcagccagagggtcttttgaaatctttcccttaggactcttctttccatttcctactttaagttctaggcgatataacgcacatgcgtcagattcattgatttggtattcaaagagatgccactcaaagggacctggaggttgtggatccatatagtaagatctcttctggccttcttgttccttcatcagttgttttcttgattcatgccaacctcttccactgtaatctggaagtgatctttgctttcggtttccgctatcatatgctcttctaggtttgtcaaagaagagccactctctaattgtttcgccttcaaccagttcaagatgaaatagctctgcaagtacaaaaaattaagggtcaggcaaaagtaagaaactcacataaggcttctgttttcaaagaggcaacgaaatgttgaactaaaacaaagagagaagcaaaactgggctctagtgggacaatgctctcacctgctgcgttccatgggcattttgtgttaacagctccttcacacactgggatcccaacattcttaccctgagtctttgcacgaagagcatcaatcaatagattatctttcaaactgatgccccctggcctcaatacaggtgctgtgccaggcgaatcttcattcagagctagagtcccatggtagttactgcagtaatccaggtaccactcggagccctgagcaggccttgtgcaatcccatagtgcacacttaggtcccagaaaagcagatggaggcacacggacacttgatggagtagaaaattcagcaaagttgtcaatctcttcagaagaatcaagcttagtggaagggctgttatctagttcctgacgcacttcggagaaaatataatcatactgagaagttatatccaagttgctgctgagtttttggtcatggaaatcaggagcggagtttatgcttggatcaaacccttcatatccataatggagttgctggccatgtgtttctgtgctattaagagcatcctgagatagaaaaggtgaacttgtacataaggaaacaaaatcaaaactaagacaagaatgaaaaagatcaaaactcatagctgaactggaataaagaatcaacggtgttcaaatgtctaggaacatctaaccaacaatcaaaagattatagaagacaattttgacgcagaaactgtatctagctcacctcaaagccgcaggagaaatttccgttgaaaggactttgactaaaattctcagatgtccattcaggagggcacaagctttgagaaaaaccctcaggatcaggctttgctccagcatgttcttttagcgtactagttgcatcatcctcctcgtctaatttcaacagaggagcaaactcctcaaggaattggctaataccttcaccctgcaacatgttaaagaccaaaagagctaaatctcaaccaagcttacagattcactatttttcaaagaattggaaccataaaccatagagaagtatggtaatggagtaggacgaaccaacagagaagattcaggagaaggagcagtgagttcagcttgccactcccgaatattctgagagatttgggcttctaaaagcgcaaggtcaccatgccgcccttctttcctagcagcttgaagatgacagaacctctcctgaagttcccttagcttctcctccacattctgatgcgccgatgtgatcttcgggtggtttgacatctcctctaaaccctgaccaaaaccattctcaaaaatcaactaaaatcttaaccacaaaataccttaatattccgattctcatgaggaaggaaacaaacacattaccttaaaaccaaagcaacagagattggtatctctctctccttcctccgatctctggctattcatcacaaaccaaaactgattacttaatggaaggtattgagcagaattcacgacaacaacaaagcaaaaaagcatttttttagatcaacccaatcctaaaacaaaccatcagttccattagagtctatacaaacaagcaaaatttcaaccctaaattcatgaaatcgaacaaaaccctaacatgagtctgactaataaatccataaaattgagaagaaattcggataaagttcatactttttcgatatggatggatacagagagcttcttcttctgatggagacgaagaagacaccggagatatcgcgatgaagaagaagaacaaggctaagttacgccagcaaacagagagcgacgattttgattttctcgtttttatttatgaaacgccgcgtttcatcttctattgaggggagggtgtcttttatgattttcccaaaaacaaaattaataaaaaaaaacttttaaattttccaaattcaatagatatgcattaactagatgaagattattttttcaattcttagagattggtcaattgagaaaactttaatgcttgattaaggaatgagaataaaatttgataagttaaaatttgtcacacaatatatatttgacaaccgaaattgagttcctcaacccataaagttgatatgctgatagggttataattctatatccaccaattttgtttacacttgtctagatgtggcatacgattgttagcgttactggtttattacttagttttaaagtaatatgtaagttttcttagttatggatataagctgcaataactctgaagacatcagggacgtcattgtctatgtccttaatgcatacacaagccttgtttctttcctttacagtttcttctaatcaatgtcaaaatcaattagtaatagttttggtttcttttggccctccatcactattcactacaatctctccatatcaaaaaactaaacacatgttcatatttttaggctatcttgtgtgtatataatagatgttcaaatatatataatgaagagatttgtggagccagagatggaatatgatgaaaatgaaatggcaagttatctccctgcaagattttgacacaaaatattaatgcaacacagagttcccataccacaataacattggtctcaagtaacttccaattatagtaacaagcagacacattgcaggcatatgagcatcatgagttaagtagcctctattcaattcctctttctctccctcttaatcatgaaactacctctttgtctctttctttctctctttttattttatttttttaaataatttccactcatgatatctaatcgaacatagcctagcctatactcattattctccaatatatctgaccaaacatgtaacagacttaaaccctaataaatgatcatccgtacatgcacctccttcctcaagtaaggataaaaaccaccttctgtttttgtttcccttttgactctatataacacatagtaactcctccgtagttacattcttccttagttcctcatcaaactcaaaaatctctatctatacggttttcatcatcccccactcttattctttctcacttttgaattaatatatacatacataacatcttagtttatttcatgcaggggagtatcatactatcttcatcattcaccaccagcattgatcatcatctgttggaaaatatgaagagaacacatttggcaagttttagtaacagagacaaaacccaagaagaagaaggagaagacggtaatggtgacaacagagtcatcatgaatcactacaagaattacgaagctgggctgatcccatggcctcccaagaattacacttgcagcttctgcaggagagagttcagatctgctcaagcacttggaggccacatgaatgttcatagaagagacagagcaaaactcaggcagatcccttcttggctcttcgaacctcaccaccacacacctattgcaaaccctaaccctaattttagctcttcttcttcctcttcaacaacaacagctcatcttgagccttccctaaccaaccagagatccaaaaccactccttttccttctgcccggtttgatcttttggacagtactactagctatggaggtttgatgatggacagagagaagaacaagagcaatgtatgtagcagagagatcaagaaaagtgccatcgatgcatgtcattcagtaagatgtgagataagccgtggggatctgatgaataagaaagatgatcaagtcatggggttggagcttgggatgagtttgaggaatcccaaccaagttcttgatttggagcttcgactaggctacctctaaattcttttgattagctagtatttgtacttcaaaattatatctagtataatcatgtttagctgagcagtacgtgagctagagattgtgattgcattcaggctaatggtattaaatagtattaggcttaaatttattggaagtcaaaatgaaattaaagttgaaaaaatctccatatgatttttttatcaagagtgttcaacagtatatgtgttattttcctagttttttcaatcaagagaagatttttaaaagaaaacaacgatgttataattttttaactttattaattgtgttattattggttataaatttgtcaatttcaatcatccctaatgttgttatacaatatgaaactgtgtagtagaattacgtgcagtatagaagctagaaattaggattagagaaagtgggttgcatgtgtatgtgagtattaagaaagacaaaaagtgataaagattgcattattatagagatgggttgatgagacacagacgcatgcgacaaagtggtactatgaaacatataaagatggatgatgatcaattgactcatgaatagttaatgttttcatcttttacactcaccatcacatctttatgtataattacatatatctagcatttctcatgcatgtcgtgaaagcacttaatggtatgtgtgcgtgaaaaaaatgaaaacaattttctcattgttgagaaaaatgtctttaaattattccacattcagtttatatatagtcgaaagcctgaagaaccgttggaagatggagaattcagagttgtgaatgtgactttgatcaaattcgtgtgcctaaacaaacgagagtttgttaatcaaattaaatgccaggctaatatctaaatatgcctcagtcaaattcaaccactcatattgaccaacaaaatgttactattaaattaaaacaattttatacttctttgattcatcacacgtgtgagtgtggatggatatgtagttcaaaaagagacttcatccctagttatttcttcaaataataatgtctcttttcgaatatacaatcaaaaaccattaaatttgaacaatattcaattttgatggcatgtgattatactactttttttggtcatggaattcaataccatatcaactatatttatactaaacatgaatgaatgtagagagtacagacagatcaagagccaagagtgtaggagacaagattagaaaattagaaaacaagtgatgtgaaaaggaaacaagaaaatggaatgtttggtcaatacatttgggatgtttgtggtttccccatgaacaaatttaatctgacattttccatcttccccaacaattttaatttaatatatacaatccatcatcacctttccttttttagaatcgatcactttccactctaatctctacgttcccttcaattcttcccttttctatgaataataattacagtgagtttatttgtgtttgggtgatgtgaaaggtaagagattttcatcatgcagcctaatatttttctacttcttacaaatgtatccccaagttttagtgtttcttacaataatcaccttccgttgcaattcactgtcttaaatagatttggttctaattctaagttctaacttctagttatggtgaggaatttatttgagcaatcctagagattatttggctaaaactgtaaacacttataggttttgttaactgtccaatcacattgacttctgtctctatctcaaaatcacatgtttttagttatgtcttctcaccggttcattccaacccaagaatctttttattttgtctgaggtgattgttctgatggaaccgcgtgacatacaaaattatgttctcatatgaattatgatagagtaaaatgtgatagagtttgtcatccttcgaccaaagaatacaaaagaaaattgagatgtatcaattagtgtgcgaggaacctataaatttaatctttggaaacgcctggacatcgaagcaccagtggtctagtggtagaatagtaccctgccacggtacagacccgggttcaattcccggctggtgcaatttttttaacaaaccaacgcccaacatcgtaatgaacctatgtgggctttaacggcccattttgcttttcagtccgtaaacactaggccttttttatgtgttatgttgtccttcctcccaaccacatgattacactccttgagttcaaaaatttctcttatgtttcttttaccgattgtttcatttagttattcttaccaacatctactggttaaaatttgcatatagccatgggaattcaaatatctggaactgaaattcgaaagcgacgatgcaatgcaaataaaatataggatttatttgtgaactaaaaaagtattttaatgatatttggaaaaatcgagaaagtccgaatgggaattgtaagttttaaacacaaagagacatttttgctttagtcaggcgtgatggagaaaactcccaagggatttagttttccctcgagttaagttattatgtcattaaacattcttctgtaatttatgatctaaaccggaaaagaaaaacgggttagcgcaaactgcaattatctcaactaattcttaaataacagtaattatgatcccattgctcaagtgttttagtagtcttttaacgtttagttatgttacttcactgttccagtaatacgtcctaaattatctcgtacttcaatttagattaccatgaactacaatgttaaattgggattatgggaacataattactaagatgttttgagacaattaaaacttttaaaatattgacaaataattagtatattctttcagccgatattgatttgaatttatctttttttttttctggaacatccaataaaattaaaacgattagaaaatggcttagcatggttcatgcacataaatgaaatacataaaaatgattttatttcactaaatataattcagctaactcatttgcaagtttgataacatgactgtagttgagaaaaaaaatgaaactatagttaatttggtcttgtttctcaaattttcggttgcttatttgatttttttttatttacatgataacaaacttaccaactataaccatatccgagtaacttttaaagtacacgagcactaagtgaagaaagtcacatgcgtacactaatcctaattgaatcacacgatttctctcgtgtgcaaaatccgtaagtacataatattaatacttttttttgtaacatattaaattctaataatctcctcaggtgatttgaatcctagtctgtaccagctacatactcactccatgtaaccaaatattcctaagccacctaagcagatccagcacgatcaatcaatattacgagctttagtgtttgttttgtcataaagggagtttaattagcttataattacgcatttaacaattatacttacataaatgggcttcaaatacattcatggcattagcatttgtcggtacatctttaccggcatttgccggttcatccggtccccacacttcacgacaaacagcagcagttccgatgtccggcgttcggcggaagaacttataaaataacttttctaaaattaaaataaaaataaagaatgaatgaaagaagatagacaaaattgattattaattgagtttgctttgaagctccaagaaccaaacgtatccgggtataaaataatacgagataaagtgatagaagacctaagactacctcattactaaaaatatggatatttttctatacaaatccacgaatgaaaagaaaaagaagttggactaattaaattgaaatccaataattgtaaatataatattaaaacccaataaattagaagtctcatgttgcagtctccattattgattgtctccttagaatccaacatgtgaccctccattgtctaccattcacaccctttggctcactcgataaatttggacattaattgcattcattttatttgtaagaaccagaatctcagtagatgttatttgtgttgagtaaactgttgttatttatagactaggctattcttcgtatacactttgatactgatttttagttcatcatctatctaccgactaaatatagtgtttctatgtggcttctcctcaaatgtcaaatttatttctttaatgttgtttgagtttcaaacttgcaaagtgcaaaccaattttggttgttatactaaaaccacacatataattaaagacacccactatagcataaaattcgtcgtgtaagcaattttactatagtctaaactccataaaaggacgtcgaaaaatattgtgatattggaattatagtgtcagtttgtttttctttgggcaaatggattgtagtttcattatatattacaatttataaacgaaacgataagtatggctcatactttagtgatggagaattaaagtattttatattcagagatgacacaatatggtagaccaaaaataactaattaaaatagtatcatattagatatttatatgtgattgtaaatttgatcattgagtgaacattttaaattagtatgcccaagaaagaaaagaaaaaaaaaaaactctttctctctcatgataatgttccttttataaaatccacccaaagacaccaaacacttctccatcatcatttcatttcttgttctttttccaccatcaccatttcctagttcgctcgtgcacatctccgacgatcccaattctaaaatcatcacttcttccaatcttttcaacatctcttcaaaatatccagtcaacaaaaaaaaaagtacttaaaacaaggaaaccccttctttctttttgtacatataacataaaaatcatcacttttttgttcgtttcgccgatggcatcttccggtaacggtacaacggcggggacaggttcaccatgcggtgcatgcaagttcttgaggaggaagtgcgcatccgattgtatatttgcaccgtacttctcatcggagcaaggagcagcaagattcgcagctattcacaaggtgtttggagcaagcaacgtttctaagctcttgcttaatgttccaatccatgatcgatgtgaagctgtcgtcaccatcgcctacgaagctcaggctcgtcttcatgaccctgtttatggatgtgtctctcatatctttgccctccaacaacaggtaattgaccgagtaaatcggtagtgctccatcggtctttatagactttttgtttagttactaacggaatttatgtggtggttgactcgtatgatatttcctgcatgagatcgaatgttctctgaatcttgatgaattagctaggaacaacttcttttcccatcatttcttttgttttcacattagggcttttcttcctttttgctttgcctaatttttttttaaaattaaagtttgagattttaataatttagttttaagaaaacgttacaacgataaataatcagttttccaataaatatttgtcatgatgttttcatttcttatgtttgtcattttcgattcgccaaaatcttgagtaaacgacactgtacatgttctttccgtttcatgaaaattgatgttttgaatattttttgcatattaatgaaacgcttacaaaagtaaacatatttatactgatgcatttactattctaggaatatgaaattatatatgtgctaacatttagatataccaaatagacttacataaaaacatttcattttcttttggcacaaaacatcaatttcaatgaagaaaaatagactataaaacatacatattcacaataaacgaagaagcctttactaattcgtctacatatgatcttacaacttttttttttctttttagtaaatgatcttacaacttatgaatagaattggaatcaatcttgtttaacttagcgtttgatgcgtttatataggtggctttcttgcaatcacaagtcatgcaaatgaaggcacagatagctggccaccagacgtcagccgccggagatctaagacacagctcggaaagtaccaaccagtttatgacgtggcaacaaactagtgtctctccgatcggtagtgcatactcaacaccgtataaccatcatcaaccttactacggtcatgtaaaccctaacaatccggtctcgccacagagctcgctagaagaatctttcagcaacacgagcagtgacgtcaccacaacagccaacgtgcgagagactcatcatcaaaccggaggaggagtatacggtcacgatggaatagggtttcacgaaggatatcctaacaagaagagatcagtgagttattgtagtagcgatttaggtgagcttcaggctttggctcttagaatgatgaagaactaagataagttggtaagttatgtagacagtcagagaacaaatgagatgtttttattcgaagaaaaaaaaaacaagacaatagaacattccatgttcacatgctatcatcaataagatgtctactacacatccatgtttgctttaagtcactggccattgatcaatcactgaaatatttgacttgacagtaatttttttaatcggtttagctgaaccgataaatctgataatttgttttggaaagaataccaattgttgaacggagaattgaaacagaaatgatcatttagtcatgatcgatcaatattacaaatcttctaaaagaaaagaaatattcaacaatcatggaattcatatatggttttgtttagttcatatggctttatttgtttatcaatatagatgtttatatttgactaatctgatattcacgtattcaatgccttatcataagctttttgattacccacaacaaaaaaagagtttataagtaactaatcgaggtcactcgacattatatataaatccatattcgatggataatataaaaccaagcaaagaaagaagtaatgtcacgcgagtaaagagaaaataatatgtaggatatataaattttataggttagtaataaaaatgcttctgtgtaatgtagtagactgagctccatcaccttgtatgactttgtttaaggattcactaaatttcctttcctaataattgtagacgtgtgcggcgcgcatccaaggggttgactttattcacaagacattaaaatcattaaattttttaattttaattggtatatgattcattccataaaatagtttatttggctcgttactaattatgtctagtttctgtggaagttaaaagaaaatcttcagttagtgttgccacaaacgaggaagtaaggaatatttgagttttcagaaaaaatgacaagatgattaattagatgagtgcatgtcgtctgtattattgtaattaaatctaaaccttgcaaataaatttacccacatctctatgaatcgatattcttatatgatttaatggttgtaactatgtcaactaaccatttctttttagcatctctatgaaggcaaaaaaggcatatggtcttaacgataaacataatgtgggtacaagtcaacttttattttcacaataaaatatgtattttttataaatgaataaaaaaagaagttaaattgttgatatagaaaaaacaacaattttggaaaacataggagggatggatgttatgattgtctgtcagagcagcaaatcatcgaaaatcatttcatctattactttactagtaatatataaatggaccacgcattaatattacatttaataaacatgtttacctaacattaactaagcaatgtcttgttaattactatggtaccaatccaccatataaattgtagtggtcctattagacaaaatgttccctaaattgtatgcaatctttttaattaaattcaaaaaaatgatctttaattagttctactttgcaaactctaatcagtctcatctaattctaacccgattccccaccaagaagcttcgattgttgtccacatccaaaatcacaagtgctcttttagtctttttagaaaggactttatggtttgtaatctcgaggtaacctaatcaaaaacaagttattaatagaagaaaaaaacaagtttaattaagcacatgatcaatatttcacctagacgcttaaaaaagatcaatagtttcacctggttagttagtttgacagtcattaattaatttgatagtctgtcttcagtttaacatttggtagactaccaaaatatcaagtaaagttgtatattgtgtgatacatgtctcaccttattactttattattaacatgttagaatgttggtcacttcaacatgtaaagtgaagattggagaatttggacaatttaacatctcatttttgtggggctcagaaagacagacaatttacatttcattatcactcacaactaacagtttttttgtttgaaattttattcacttttcagtgaacagtaaactatataaactgattgtggttaatggaatgcatcacgttaataataatttctgagtatgatagtatgatttaggtgggaaacatcaaaattgtttaaaaacatatatttcgaagcaaagtttctaatctaaacttaattatggttgtgagttatgaacaagaattcggcgatcgctgttcttagtcaagccgtttatgtatgtgcgtatttattatgtttattatataatatcaagttcttcgagcccattaccgaagacaaattgtattcaatctcttcttttttttcgtcaaacaattatattcacactctctctcgttttactagttattatataaaacagatcaaaagcaggtggtcaaaacatgatatcaccagttacattcatcacgaacatatatggttcggaataatattaaaaacgacatatagagaaaggaaaaggtaatcatcgataattaattggatgtataaaggtaactattattatcctaagagagaaatgatttagcaaaagcaaagtaagtacattattgtaaatgcatatatttgagtacaatgacgtgtcgactgacagggaataaacacgaactattgtcttcttgtcaaaatttcttaattggtaaaagggattgaaacggcaagagttaacgcacgtgggacccgtggcttaagtacacaatcgaagtctttgaccgttgaactatctatctatcacacgtgcggcctgctaaagtcgtttgtttataaagatggcccacctctctatttctttccccaggccgtgtataattagtttatttgcatttcttgaatcagtgcctttggaggtgtcatgtgccatactgccatgtggcacatttcagtgactagcgagagttctaggcccatttctataaaactcagaccaatacactttgtaaatgggccttatagtttttaggttcattaaagaattatcataatgtcaatgatgcttttagttagacacagattttgggattactgtgaatagtctaactaatttatatactgaatatatgtcaagtcgtgattgatgaccatattcttttatttcgaaaatcatgtgttataacaatttgaaaattctccataccaaaaaattaagagaagaagttggaattttcaacaaactaaagatgtttttcaactccatttgagtgacttatataattttttgataacttagaattagcaactaactagtatctaaaccctaatcgataagaaactcacgtgatttaactatagataaaacctcctaactgtagccaaaatattaaaattatagattagggtgtagataataattagttgctaattcttagttttgtttccaagaatagaaaaaggcggaaatcattagcctagaatgtctaaaacagaattttccaacgagttaagtttcgctgcttggggatttttcgtttgtgggttccctaataatatattcgacgacttgactccgatgttatgtgtatatagagaaaaaaataaaacttttaaagcttataaactaatatcaaatggaaactaaagcactaaaaagcatttcatccataggatttataaacttaatataaagtaaaaaatatataaaaatttatatcggttcttgatcgtgttcattgatatgattgatatcttcacaaaagcatcaagaatacgtgatgtaccctaaactctcggatatcagattattgccgccatgacgatactgattaaaagtgttcgtcaagtgctgatccaattcagagtatttggaaaattcgccgttggtggagaccgatttaagttcttcgctgcagccactagaggagttgtagtagtaactccccgccatggtatctccgccagctcctgtgaacggcgtcgtttcgatttccatttggtggtagcacgacgtcatgatgttcttaagatcagagttttgctccgtttgacaattcgaagtggttagatgatgatgatggagatcatgagattcttgaagatattgaggcttagtgtcttgatagtaattagggttttctatggagggagaatcaatagccatcatgctttgtgttgcttgttgctttagaatctctagctgtgtttgtaaattcacaacctacgaataacaccacaagaaaattagtgatccgtatttacaaattatgcatatatcatatgatattcacattttgtcatatccaaaatcaagactagggttaaatagaggaagttttatatatttacttgttgttggagggaaaagatatgagaaacgcagccatagatggggtcttgacggcgagcttgagcttcataatagattgtagtagcggcttcacgtcgatcctccatgggaagatgagagagcaatttagaagcattgctggctccaaacacttggtgaattgctgcaaaatgggaagctccttgttcatggcaaaagtatggggcaaacacacatccttttacacatctccttcttaaaaacttacaagctccacaaggagagccagagccagtcatggtgatgactattatgtgttactaagtatttaggtctttgatgattaaccttgagtagctttaagaatggaggagcattagcttagggggaatttttataaagatgtagatgaaggtgggtttcatatactctttacattatttaatcacaatttgtcttcttagtggcctacacctttctcattgtaattgattttcattatttttcttaaatttctgctaagaagattttacaatcgatctggattttttttttattgctttttaatgatgtagatatttatgataaaattggatattaactccaattatatatataattgatatatgcaagaaaaactaagctacagttagtaaaaagtaaactggcacaaaatcatacattcatcatattataccaattcattaattactggaaaatctcatggatttgcgtttaatataagcatgacatgcatcctaaaataaataagtgccttagctatcttactatactctacatgaacgttcttttaaaaaaaatattttttttaaaaaaactgaactacaccaagcctaaaatccaaacgctccatctctattctctagctagaacgttctatttccatagaaataaacatcttaccgtataactggatttcattatcacgaaacttgaatgagaccgcttaacctcttcattaatatttaatttgtgtataactcataaccatagttccaaaaatattgtagagacaacggagacattgtatggtatgtgatacgtcatatagtttgagtagagtgtgacacagtttttttttttttttttttaaaggtatagcattcagtgtaattgtagcatactaatcaatctaattatatataatctggttcacaattaagcttttctcgcattttaatggaactatggatcgacaattctgacccacacacgacatattgcaaatttaaaacgtatttttttttttgtcaacaaaaccagtttttgttttgaagtattaaaacatgtatatttggcagtattcaaattatatagctatatttatgataatgatacaagttacatgataatgatagaatttacattcacaaagaatgcaatcagttctattaagagttgttgctctctgaaagaagttacgataagctccataaattttcgaagatgttaatttggaaaatatttcaaccctaatatatatatatatatatatatatatatatatatatatatataggtggacaaccaatctacgtacttaagatagataagatcatgtaaatagttgaatattgagtttttaatagatggacaagaaaagtaccctgaaaagaatgttgttgtgtttattttatatatgcgacattaattatcatttccttatcaaaaggttacaattaaattacttacatcgttcttaacttaaatggattagtttaataattttcttgttaaagatgaatagatgatgggtgagtttaatattacttgcatacaagaaaatagttaggcgtgtgtacttagtttgaacgagagacaaaatttcaaattctaaacctcaatataagggaatggtttactcaatattaaaattagtgttccacttatttcatgtttcgatttgtatgtacatcgagtttatctagttggccaaatcaaagatatgccaccactactcacccttaattcgttttcttgagctgtattagcaaactcaactaatatcattgtctaatattttttttcctcacatgtgcgtagttccgatataaacaatatacaaataataacaatgtattatgtataatttcaaacaaatgatgaattatgggggaaagtaattagtattactaatttattagcttacaaagggagtgatagaaagacatcgagacacaaaagcggcggctaagggaaagacaaagttgaacactacctaatatgcaagtaaatggaagcaaacgcaaaagacgtaattctcattttcttttcttgtgggtctatgcattgctcttaaacccactcttttaactcttagtgcctataactacaatcagtagctaccaatcagtgactaaaacaaacatttattcattcacttcatatgaacttattttcccacccgttcctatataaaattatttttaaatagtaaatcgagttttttatggacttttataatatagaaaattttgaaaaaaacacaaatgatttagatatacttgttgggatcggtgaagtgaatagtgtgagatccgacaaatgagagaatcttgtagcaacggagttaaaagaacaatttttagtgtttagcttaagacacactatataaagtctaaaaaaaggaggagactttatgcaatgtactatacaaaaagtttaaagcaacccaaatcggctttaaactatacatttaggtatcgtggagcatgattgatacataacagtttgtttaaacacaaaccaacactaatgatctattgttacatataaaagtagaaccaatcagcaatcacagccagcttttcattaatcattcaaaatttctaagaagcataattttttcatgctgggataaactgatcatttattcttaaaaaaatgtttgcagacaaactcacaaactaaaacattacgttctatccagagatgagattccatttcagtatttcacttcttaaagatgctttcgttgatgaaactgggaaatcctttgagcacatctcgcagagcgtagtaatggctatcacatttatggtctgtaatgaaattaccggagagaagtatcctctgaaaatgttgtcctggatctctcttccatagactatagtactctacttgttttcctgctgagcttttcggggttcctcttaggctcctcatcagatagtaaactgcacccggtacatataactcttctggcaatttcacaacatctttagtagtagagtcagagattaatatcccagactggttgttcttggatgacgggatttctgataagatttaagaaagatgagattcatgaagcgttaagtacataattaagtcttctaatgatacacagaatcacgcgaaagaaactcgtgctcaagtagtagttacctggaacttcttttttgtttccgaagtttgcataatcagaaacttttctagctacgtcttgcacagaggtgacaacttgttttgcgtttgttaccaaatccaaaacgttcttccattcttccttctcaattacacttgtcctggatttacaagtcacagtggtaaacaaactgattgtaaaaggctagtcaagtttcaagaagagaaggttgtttgcttaccaatctgtctgaaggatttcattcctcaatctcgctagagaagctgcactgagtctaggtataatgtcgtcctgaaatcgggggaaatgctgtgagtttcaagaagaaagtaatctcagtaaaatttgatcaagagaagagagtttttttttttgttctgacctgcattacaatagttgttacaaactcagagcaattctctgcaagctctttggaaacacaaggaggtgtcgcatacccaacggctgaaataatttcagcatcgaatcccaattcctcccttggcattttcttgagcattatcgccattaaggaggctatagcaccgccgagagaatgaccaacaagccgtagcttgtatccctatggatgcgttcattgcaataaaaatccatccttctcatgcctcacaaaaaaaaaggaacaacaaggattatatcatcacctcgtatttcgctaagcatcttcttatagtttgcaattcgtggttaaggaaccatcgtgcagcttcagcagttccaaagtgtgttgagtagccttcaaaagtgacttcttcatcgcttgaagagacaatgtcagtgataagatcgtaaattgtatgtgtcccgcgtattccaaagacaacaagtttccttcgatgatcaactcctatgtagtatccaggcctcataacacttgaatctttcacaaatttaagaatgttattctctcgaagcatggtgttctttgcaagaccactcacactatccctgtaacaaccttttgctaactccgcattatatatcagatcataaacctgaaaaaaggaaaaaaaagaaagctacttagaatgtagtaaaaggtaagttatcaacatgacaatgattagaataatgttcttactgtagactctgaaacaacttctacgcccttgacgtcctcaaatggagacaaggatgcttgtctaaggtatataagatagagaccaatagtaagatcaccaaaagtccaaccttcaatcccaagcctactcctctgaatactagcaattatctcagacagagatcgactaccaggcagtgacttctctcctagagaaagaaaacacacattaaacattgccacagcataatggattttaagaagcacaatgaatgcaccatatgatacaaacctgttggaagagcccatctacgtaattgcatagctggctcaagtgctttagtgagccaagctaggtctagtttccactttccatcacctgtatcttcatcactagagctatcattgtcgattcctgattcaaattgtcttcttttctctaatccggacctcgaagaagtgacactactaggccttctcttctctgcctcctgctcttctaactccttttctaccttcccggactctgataaatgagactgaaaccgtttgattacattgtaaacaactccttgatacaatccacttctcttcctgaatggtgaactttctacaactgaaaaacaaaaaaaaaaacaaaaaggttgaaacttgtcaagaattcttactaaattccaaaactttcatatcataccatattcaattgccaagctaaaatcttattagagtaaccataaagagattgtttgtttccacaaaagtcataaaacaagaacagaagctaagtatctatcatcagtgatttctccgtgttcaacactctatcgaaaaagggctttaaatttccagagataaaaggtaattagagcttacagaaattccgtagaagccggttcaatgctctgttagccattggcgagctcagaattggctttctccggccaaaaagaatccacctttcaaagagaaggatccttccaaagccgacggcggaagagaaaaagctttaagtaagtgcaacttcgaagacacggcggagcattaaagtcggagattatcggcggcaagcaaatcggaaaaccaaaaccggaggaaaagaacgaaagctcaccgactggattcatccagacttattcagcaatgagtaatgggctttattgggccttttcttatcagtccatttaaaatccggtgaattttaaagtaaagaatcagggtatttacgtcttttggtcaaagaaacagaggatttgctagaaacagaggatttgctctgtttatttcatagagaggggttaagaaacagaaaactttagtctctgtagacgacgtttagtgaaacaaggataccagaataattaaaaacttgaacaatgaatcaacaaaccaaatatgtcataaacttctttagaacttaacctctcgttaactcaaacattttcttggaaccataattctgtatttgtaaggcctttgaaaatccctgattggtttcttcctatacaagtcaaaacccaaatttagggcttggttgagttacgtaatagaggagaataaacacaaatcaacaaagttaagagaaacaaagagactcgaaaatttaaacttaaataaaatgatcaaattatgcatgtttataaagtaaaaagcttttgttgcaaggaaactatgtttgggtttcattgctttcaatcaaaacatttgaactaagaaaagtggtcaggactaaacagaggatgaaacgatcaacataagttaaaaacatgtcattaggaagcattagaaacgtcatcgcaataaactggctcgttggattaatagtgaaattgacgatatatgagtatattgctaggttgtctttttggtgttatgatttcggttcggtttacatggttttgaaattgaaattgatttgggtttggtttgcattagagttaatatggttttcagaaaaaaaggttttggggtcacgcgaggctcttttggaatcaaaacgagtagaatagaaatagacatgattttgtgggtttacccctatagaaattgatgacacgcgctcaacgcgaggttggtgcgaatgggtatggaattgagcgcgtgacgtgaagtaggtgcgagtgggcgtatagaggagcgctgtgattggctgaaaaaatgaaaatagtagtgatgttcctcctctataatttatgtttcgtcattcttcttctgaaagttgtgtgattttagaagtcacaaaaaaactattttgagatactatgaatatttcgttttgcattttgttgtgcagctatttattacacaggttgaagcttataactgaaaactggattcaaagagtaatgaaaaatcccagagatatttatgaaacacaaaacttgattttgatgttaaacaatgtcatcaaacgacaaaggttgattagcagcagcagatctagtcttctcaaattgcaactcatctttgagttccgacaatgtcaaccttcagaattttgatgcgttcctccacttgtttgacacgagaaccatcatctactgcattcttcctcttcaaggaaacctcctcaagctttttctttaaccaatccagcttaaagcccgcttctgtcagctccctcaacgtgctgttagccttgcttaactcaatatcagaaaagctcagtggaggccttcgcaacgtctcgatgaggctgaggagaagactcatgtatgctgtcttcagacctttgccatttagtttgaaaccagttgcaatgtctgggtgtttcatgaaaagctggctcacagaaataacctaccaacaacaacaacatctggttatccagaaaaagcaagaaagaaaaagaatacgtgaagctccttaacctacctgagaagaaggaacttcaaaacctttgatttcaaacatctccttcccagttaaatatccttcttcagctactttaacttccactctaatgatcagtttgttattctccaaaaatccttcctcttgaagcttgctaagaggcaatgtcctgagcccaattccgtacgtcggtcaccttgcaagtcaagacaaaaacagaggattagcagttacagatcagaagctgtttggagctgtaatgttgatactgcttacattaatggtaaaaaataaaaagagacgttgaaacaaaaaaaaagaagtaaaaagccttattaaggaatcaaaatggaaaaattctcataacttatttccatacaatatatatacttttttgtttgtttacgtttaacttattcatgagatatgatacttgatgaagacgtttgaaatcaaggaaaaagttaattaaaagaattccaaagaaggaagaaaatcaaatgaaaaagtcaaaactcaaaagtgtttagatccgtgctttagttaattaaaaaaaaatgtcgttaataaactcatcatgtagaatttcataatatttttaactgtcgcatgattgctctgttttatcataagaaatctttagttttattattcggattcttgagattgagataagaaaaagagaaagttaactgaaaatcaaggacttgtgacgcaaggcaccttaggagaagagactaatctccgtaagcctgtttcgaatacactcacacattgtctcaagccctttttagtgagaggggacgtaaccatatatatatatatttttttttttttcttaaacattatttgctgagttcttagagctccttcgtttgtgataagaatatatttttattccaagcttaaacttgatctctccacctatatatataccacatttgtacgatttggatcgagaacagaactaacatacactttgcaggagataaagggttcctaatgagcttaattgtatgaaaaccaaaatgggtttggttttgtacttagagctactagctagtatgtgattctaccttcgaactaatgatgaatctatctttagtttatattctctaacacctaatttagtttatattctctaatatatattctaaaggaaaacttgaaagaagaatgcaaaaaaagaaacgatgaacatatattattgtctttcagtctttctcttaatcggatctcttccttcgtggaatccaaggactcacaggggaagcataatccttgaacgataacattttaggttcaacatgagacttggttttctccttgtccagttcaacttgattcttgacctttccctcgagctcttggacccgagccgcatcagcatcaacttttttcttcctcgccaaggaaatctcatcaagctttgacttcaaccacttcaccctaaagcccacttccattagatcaattaagctgctataagccttgattagttcagtctctgaaaagatctctggaggcttgtttactgtcttgataaggccgaggagaatcttcaggtatactgtcttcaccgctttgcttgttggtttgatatcatccgcaaattttgggtacttagcgaatatcgggctcaccgaagcaatctgccagcaacaagaaatatataattatgtgaaccaaatccaaactcaggttgtatctactaaaacacatcagcgattcttaacttacttgagaagaaagaacattgaaacctttgaaatctaacatatccttccttgtttcatccccttcatgaacaacttcagtaactttaatgtagacttcaatgaagagagtgttgttctccaacaactctctatcttgtaacttggtaagaggcaacgccgttcgaaaaccccagccagggatctcaggaccaaacaagccatatctttctgcatgcaagacaatcaaaatataaattttaagctttttcccttttcatcaatgagatatttatatagtttctgcctcttaagaattcagacttggaagataagatatgttaccagatgttctatggacctctttgcctgattgattcaatacaatgaagtgcaaactggctcgccttttccatccaggttgcaatgatttagggttcccaacgcatagatacagagataagtaatcttcaaagccatctcccttgggacgaattagaacatagctgagagaaagaaaaacaaaaaaagattaaaccctatttagagatacgtacaagtttatttgcagaatctagacaattgagtttaaaaaagcttatgatcctatccggttcttctaagttaattttaccattcgcagccaccgcttgagaacacagtagacgttattggaaatttccttccggagaaattttctatcttccaggtaaaagtcttctgcaaatctatctccatcatctcaagaacgctttcgtaattttagggtttggttcttccagtgagggacaagagacttgtttggttcttgctttataagtcagacacggaaagaaaaagactttataattccttttttttttttgttaggcttataaatcctattttaatagggaaacaaaatctaggggtgtagtcaaccctatattttaaatgatttgatttttaatgtgtttttatatgattttcaatgaattcaagaaagttaaccaagaaaaatctccccaaatcccacttaaaaccatgtgatttagatatttgtatttttaactaagaaaatatctaaatctttaaaagtcattaaaaatgaaaatgtcttaaataacattggatttttaagtttttttccagatcactaatttaataatattagatattagaagacttaaaaaaatatatgatatgaataacatatgatttgttataataacacaaatcattccaaatgctttgctttcatgaggcggatgcgaatggcaaacacacaatcaagaacagagtaatgtctgtttataagtttgatataataaatttacatttttgatgtgaaaaaacagaacacgagattaatgaaactatcaatgaacataaacagttatttcagtttattcttttgtaggcatttgtcttctgctgaattcctaaacagttagtatgtgaaaataaatcatcatcatcttcccacgataaaacattagcagttgtagcagaatttactatcttctgatcatccagttcaactttgagatcagacaaagcctctttcaacgacaaaactttagcagcagcactagtagatttggctttctccttctccagttcaactttgagatcagaataagtatccttcaacaacaaaaatttatcagtagcagtagcattctttgccttctccttacccagttcagttttgagatcagacaatgtatcctccaacgacaaaactttagcagtagatttagccttctccttgtccatttcaactttgagatctgacacagtctgctcaagattcttgacgtgttcctcaagttgttgaatccgacacccatcagcatttgctttcttaaacgccacgcaaacctcctcaagttttgccttcaaccactccaacttaaaacctacttccgtcagctcggtcaattcgctatgaacgttgcttagctcagtctctgaaatactctgtggcggtttagccattgtctcgatgaccctaagaaggacactcatgtattctgtcttcactacttggttctttgatctgaaatcttctgctatatctggatgctcctcgaaaattcgcttcactgaagtaacctgccaaagaaaaatgaattttgagtttgaatcttgtgtggtttttatcaaccagaaaaaaccaaaaaagcaacttacctgagaagaaagaaccttgaaaccattgatatccacagtttccttctcagacttatctggatactctaaggaacttcttaagagcttattagtgaatgaagctggaaacatatgatatccttcaacaacttcaataactttaatatagatttcaatgttgaatctgtcgttatcaagaaagattttgtctagaagcttttttcgaggcaatgtctgtggaaaaccccagcttagtgagtcatcacaaaaccattgatcacctatttctgttaagacaaaaacaaaagtgtaacttcaagttttcttcatcttcaatcagataagatgtgtgtagttctcttagagacacagtcacacagagagaagatgagttaaaatacgtaccaggtgttcgatgaagttctttgcctgattgattcagcaaaacaaagtaaaaattagctctccttttccaattaagtccaagtgatttaggatcatcaggggacaggaacaaagacaagtaattatcatcagcacttcccttgggataaaatttaatatacctgacaaaaacaacaataagattattattgttgcatgcagagaagaaacttaagaaagctagctaaagagagactcttaccaattgcagccaccgcttgggaaaggaggagagtttatcggagagctcttttgggagaagttggttaccgtcaaagttaaagctttgcggaattgcgtccccatctgtttactttttaaggttttggtagttcttcgagggaggagaaaacagacgaaatacttggagatttgtttgatccttgaatcgtaggcggagatctagacacacacgaaatctgattagtggaagaaagaaaacctcaaaattaaatataaagataatccttatctacgaaaaagggggaacaagtattaatctgattatatttacaatccatgcaattacaaaatcttgaaaaatcatattcttttatttaattggctgataagtaatttagtaatttggagatttgttaattaatgaaacctttttaagctttgacagaaaacatagttaattaatgttttgagattgagaaacaagagagaaagaatctctttatgaaaaaatctatgaactcaaacgaaaaaactttatcagcaacgatcttctccttttctagttcaactttgagatcccacacagtaagctccagattcttgacttgttccttcagttgttgtacctgagaaccatcagaaactgatttcttcctctccaaggaagccttctcaagctttgactttaaccagtctagcttgaagcctacttccgttaacttagtcaactcgctgtaagcattgcttagctcagtctcagacaaacttagaggaggctttctcagtgtcttgatgaggcagaggagagtattcatatgtgctttcttcaccagtttgttctttggtaagaaatgtactgcagtgtctggatgcttcacgaagatccaactcactgatttaacctgcatgcacaagaaaaaaatgtaataatgttaactagatgtaacatctaattctcagttgatttttcttcatgaaacaacttcagctactttaatgtagacttcaatggttagtttgttgttctccagaaaccctttttcttgaagcttgctaagaggcaacgtcttagagaaacaccagtttgagacctcggggcagaacaagttgcatgcttctgtaagaaagatatacacagagggatctttaatcaaatttttctatttctttcagatattaaacaagtgggagattataatgtcattaccagatgttctacagagctctttgccggattgattcaacaaaacgacgtaataactagctctcattttccatccaggttccattgattcaggattcgaaacaccaaagtacacatacaagtgatcagaaaaaaatcccttggcatataccccaagaaacctacaagattaaacacttttaacttgtaacaacatgttattataagaaatctaaagatctgatgcttctcgatcgatttaccattcgcagccgcccattgagaaggtttccgagtttatgcatgatcgttcctttgggagaagttatcaatctcccatgtaaaagccttcttcaattctgtctccatttgctaaaagatgctgctctctcaactctcaagtttaacaaaatggtttcttaaatttttactcttaatataggaaaaccgaacccgtaataattaatcaaacgagataactagaccaaaatcttcatataaaaagtttaatacaattagtcataattatattaactagatctgtaacttattatcttatttaaattccaaaacttacagatcagttgtatgcggttttttattaggataaaagtaacttttgcttcttttttttctcttagataatattttcaaaaaggtttaattataaatgaaattgcttttataaataataaccaaattatggttaaaaatatggaaaacataaataaaaattaataactatggattttctactcctaaatagcgattgtatttatttcattttgcaacgtttgttggaaagtctatttttgtagcaatatctgtcactcctcttctaataatttacaaagtttaatttggtgggacgaattcttgagatagaagaagagacgcaatcaattacctatagtttgtttcctctgttttgcatttaaaaacttgtgtttcaaggcaccttaggggacgttttgatctattttaaaaaaacagagaactatcaatgaacttagtaataatatagttgtgtagtgaccaaatacaaagagtgagactgcgttggttatatacttctattatgtaaccaaaaatgatataaaaaaaaacaagtcagggaatggaaaaaaaaaagactaggtattcaaacttgcttgaaaaaagtgataagaactgagacaaagaattattgtccccagctatgagatgtttaggcaaaatctctttggatcaagaatatattaaccaattttttcctaaattgaaaaactagtgacttagtgttttgagattgagaagcaagtgagaaagaatctctttataaaaaaattatgaactcaaacgagaaggaatctgcagctggttaacgagaagtgggaaggaatctgcagcatccttcaataacgcaactttagatataggagatttggctgacctctccttgtccgatccagttcaattttgagatctaacacctctttctccaacaacaaaactctttcagaagcagtagaagatttaatcttctcattgtccagctcaagtttgagattcttgacatgttcctcgagttcttccacctgagaaccatcagaaatgtcattcttcctcgccaaggaaacctcctcaagctttttctttaaccaatctaccttgaatcctgcttctgttagctcgctcaactcgatgtgagcgtctctaaggtcagtctctgaaagactccgtggagacctgtctagtgtctcgataagaccgaggagaacattaatgtatgccgtcctcaccaactggttctttattctgacatctactgcaatgtttggatgttccacgaaaagccagctgacccgagacacctgacaacattaagcaaaatcaatgttaacatgatcgaaaaacaatccagaggaaattatgagctctaagtactaaaaaagaaactaggggatacttaacatacctgagtatagagaacatcgaaaccctcaatattgaacatctccttctcagttgttacccctccttcatgaacaacttcaagtacttttacttggacttcaatgatcagtttattattttctaaacaaacttcttgaagcttgttcgtaggcattactttgggatgacaccattctaataattcagtacagaagagaccttctacttctgtgaggcaaacaaaaaaacaaaataaaattctcaacctttcttcttcggcaataagatacatatattatatatatagttgaagttaattaccaaatgttcgttcgagctctctgcctgattgattcaacacaatgaatgaatacttggttctcctttcccatccatatcgtaaggattcaagattcggaacgctcagagtcacagccaagtgatcttcaatttgccaaaccctaataaacctgagaaagaaaaaaatacaaagattaaaccctaaacatacaaactaataagatacatcgatcttcgagaacaagtttttgttgagtctagtgaacgagtttaagaaagctaaagaactgattctgctcgttttaccattcgcatccgccgcttatgaatataggagatatcgcatctcccttctccaagaagttatctatctcaaacgtgaaactcgtctgctcatgattctccatatctcttccgagacgctttcttaggcttttgttacttggaagaatctcacacgtctgtttaatatttatagacattgaaaataaaacaaaactttttaaaaccctatctcaaaagatataaggaaaagctgaaaattaatatttttaaaacaaagtcagaagcaataattaattaaccaaatataatcctattcctctttataactaagtcatgaacattttttttttctttcataaaagtcttgtgtggttagttgtgataatgatgcatttgtcacaattactaataattttaatgacagatatgtatttcaatttagatacatatgttaatttcatctctaatacataaacaaaagatcaatttaaatgttatatattcttcatcaaattaattagataaataaagaaaccagttacaataatgttatatttaaatctaaatggatgagttcgtatcgctgcatccttctttgagaaattatccatctcaaacgtgaaaatatggtaagtgtaaggataaacgatttgttggttaatgttggaacgaaaaaatatccagaaatgacgcagataaactaggtcttttgactattagaattcataaaccaacataaaaacgaaataaatgaatcgataatagtgtctattaaataaaatctataaactactaaccacttgatctctctacattaagcaaactcgtcgaccaacaaaaatccatcatcacaagatttgtcctttttcttgtccagttcaactttgaaatccaacaccatcagctcaaggttcttgaagcattcctcgagttggtagacccgagacctataagcatcgtctgatttcttcctctccaaggaaacctcctcaagctttgacttcaaatcgtccaattccatcagctcaagtttcttaacacgttcctctagtcgttggatccgagacctatcagcatctgctttcttattctttatcgaaactaactcaagctttgatttcaaacagtccaaatccattagctcaagattcttgaggcgttcctctagtcgttggacccgagacctatcagcatctgctttcttattctttatcgaaacttcctcaagctttgatttcaaacagtccaactccatcaactcgagattcttgaggcgttcctctagtttttggaaccgagactcatcagcatcatctcgtttcttgtccttcaaggaaacctcatgatgatttgacttcaaactgtcctgcttcatgtccatattcatcagctcacaattcttaacaacttccttattttgttggaccccattgtaaagatcctgtaattccttgaattctaccatctccttcccagttaactctcctggatgaacaacttcaactacttttacttccaccgtaatgatcagtttgtcgttctccaaaaacccttcttctttaagcttgataggaggcaatattttgggataactcgatgacaactcagtgcagaacaagtcgcatgaatctaaaaaacattaataaacaaacagatatatcaacttaactatattttactccaaaacaagtttaagataagtttattaccagatggtattttgacctctttgcctgattgattagacagaatcaatgaaaaatgagctctccttttccatccaggtcgtagtgattgaggattcgcaacgtgcagatacacagacacgtgatcgtagttattgtcttttatcggataaactttaacaaacctgagatagaaaataaatacaaagattatttaaatccgattttcttatacaaactaatataattagataccttaataaagttttttttcgtgaatctagtgaacgtatacgaatttaagaaatctgaatatccttaccaatggcattggccgcttatgaatataggagaccatatcaaatatttcctctctgaaaagttttctatctcaaaggtgaaactcgtcttctgatgattctccatatctcgtttagacgctttaattcttagggactgttacttggagcaaaaaaagtttctcacaaaacttgtttttgatacttaagatttctcacacgtaaacccttctctatctaatatatagcaataaccaaactttatcttgaccttaaaaaaaaaaaaaaactctataaaactctatctcaaaaccaacaagaaacgctcaatttttatttattttttaatagataaaatcaaaatcaactgttttgtaagatttctcaaactttatcttgaccattaaaaaaaatatatattctataaaactctatctcaaaaccaacaaggaacgctcaatttttatttattttttaatagataaaatcaaaatcaactgttttgtaagatttcccggagtttcgtaaactttatctcggagtttatatcctacctatcaatgatgctgattcttgcataatacggtagacaaatcaaaaacagagatgttaaaacgtccattaaagcatcctccaaagctcgtgtacgtggaaatcgtggccgtggctagttgtctccctcaaaaatttcatcgaactaaaccaaagccgaagattttttttttattttttttttgcttttacaaatcttgtaacctaagctatttccctaactttatgttcttctaattaaacaaataaatcgaaaaacaaaatcatataaatcgttaacaaatgaccaggaacagagtaggaagacaagacatgggaagataatataatcaatggtggaattggaaaggttccgcatgcatgtagagtttgctagagatagtccttctggaaagtgttggatctttttcttgaatcaaaacatggaagttaaattggttaccagatgtatatatggagctcgatctttccagattttattcaacataaaagaacattaactttagaaaccccactttaaacaaaaacgtccaaagcgacgcatgtaaaacagagaatgaaagccaaaaaccaaacataaccaggtctttccatttagccgaatctctactattagaaaacaaaataaaaagtaaaaaggaaaggaactaagaaaacttgatctccacatcaagcaacctcctcaaccaacaaaaatccatcagcagaagatttggccttctcgttgtccacttcaactttgagatctgacaccattagctcaagattcttcactctatcctctagagacccatcagcatctgctttcttcttcttctccgaggaaacttcctcaagctttgacttcaaaatcagctcaatatccttgactcgttcctcgagttgctggacccgagacccatcagcatcatatgatttcttcctctctaaggaaatttcatcaagctttgacttcaaactgtccaacttggagtcaaattccatcccctcaagattcttgaggcgttcctcgatgtcttgctcccattcatcataatcatcatcatcatcatctgctatcttattatccaagggaacttcactaacctcatcatttcgtttctttatctccaaggaaacttcttcaatctttgacttcacccagtccatctttacttccgctagctcactaaccttgcggtaagcgtttcttaggatattcatgtattctttcttgaacacttggttctttggtttgaactcttctgcaatttctgggtgctctgcgaatatctttctcactaaagtaacctgccaaggaaaacatgtttttgttactcagaaaaagacgcaaagacgcaaccctagaaagcaaggcatttattcaaaaacagaaaaagagacggatcctttgaaacttgcctgagaagcataatcctgggaaccgataatctcgacagtctcctcctcctccttctttgatacacctccgccttctccatccactgcttcaaaatttttgatgtagacttcaacgatgagtttgtccttctccaaaaaccctttttcctcaaacttgctaagaggcaaagcctttcggataccccaggctagagcctgaacgcaaaacagacagaattcttggctaactgcaaatcataaacagaaaagacataaaacgcttgctcatgtataatttcacctcttcaagattcaaacataagtttaggctatttcctgttgcaaaaacatcctatataaagttcagcatggcatgaccagttgataagagtcggaatcaaaccaagtctaatattcttattagtataccatcaatctagagaaataaaccatcttcacagtcaatgctgctttgaaatctatactagatcgtttaaaaatccagacacaaatgacaaatcaccaaaaagaaagaaaaaaacatgcaagatatataaacttcattactagttgatctgtagagttctttgtcagattcattcagcacagagaagtaaaatttagcactccgtttccatccacttcccaaggatttactatttgcaacggacagatacaaagacatgtgatcatcattaagactctgtcccttcggatagaggtaaaggaacctgaaagaatataaaacaaagaaatatcagtttttcaataaaacgttattcttgaatataaatagagaattgaataacaaagctaatgaaatatccaattcttctcgatttaccattcgcatcctccactcacgaatgccttagacgctatcacatctttcttctccgagaagttatctatctcaaacctaaaacacggcttttgattccacatagctgaccaaaaacgctttcgtagatttttgttagtttgagcaaagacgaatgagtttctgagaaaatttatttgttagtttcacgcataaaagtcctctttttatagaacaagaaaaaccttctcaaaaccctagctcaaaaacaaaactgacaaataaatcaataaataaaataattgataaaccaatacttaattagactaaaaataatcattcctccaaataaagaaatagataatcattcctctcttcgttaatatctaagtaaaaaacaaattttactttatctactaatgaaaaaaaataaaaaaattctacaatattatactttttctactaaaataaattttacattttcaattaattaaggagaatcttctcagaagtctgttggttgtggcgggggcagacccgtggaagaaaggtgggtcagctgaccccgcataaaaatgggagcaatgaatcatttgaacatgaactattatggtttggttggcttaattggttagttgtttgtgtcttgacccacctaaacccacgtttaatgattcattcctcccaatttttcctctattttttctgttgggccatagcccattctttaaacttcaataattgttttcaaagtgggcaaatgacttcttttcatttttcacttgttttctcttttcggtagatatgtcatatgtgagactggattcaccatcaccacgaaaaagggagagagaagggctaataaaatccgcacaagcaaatcggagttactatgtggaccgtgaaaccggcggcgatgccgaatcaatttcttatgagacccaccgtagcaacttctgtcggctattcacagccaccaccaccgcataatgttatgatcgagaattcttctgaaattttctgagctcaatttcttaatttgtgaattgatttgtggcaagagcgactccatgggacttggagccatctcgtctctgctacatatatgtgggcaagagcagtgctacttatgcaacaggtaactccagtgtttttctttgggttttagctaagatttttaggctatatgaattgcatttggtttggactatatgttatctgtgtggaatcgaatcaaaattatcaatctggttcgtcggagttggatcaattgtggaagtgacaattgctagtttgtcgtttgtgtttttaatttcggttcgatttacatggttttgaaaaattcaattgatttcggttgggtttgaattggaattaaaggagaaaaacactgaaatcacgcactcgaggcttttttaaaaaagagcgagtgtgtttcaaaacaagccatttggtgggttagaaccctcagaaaacgtagacacgccctcaacacgcgattagtgagagtgggtgtgaaatcacgtaaaaggtgagaatggggtatgacatggagcgctctgattggcttataaaatgaaaatagtagagatgttgctcctctcttccaatgtttatatttatttgcttctcttttccaaagtatgaaactaatgcaattcatagaagaacacacacaccaaacacgaaaataaaagattcaaatatgaaattttaatagaaatattccaatgacaaaggtctttttagtcttgcaaacacacacaccaaacacgaaaataaaagattcaaatatgaaattgttcttaaccaacagcaacgcctccaattttttaagagatcaaagaaagaaaacaaatgatattcatattcttcaaagctttgaaagtaaaccagtctgaagagctttcggtgctacaacctctttgacttcactctccttagtctccaattcgcatggattcggtggcacatctactgccggtgagcagttgaaaaatccatgtggctgtattttacccaaaacccaaaacattttttaaccaatcctttgtaaggttttttttccattgaaagttacagtcaaagatttaacttaccattagtgtgaaaccaatatgttcgacgggcataaccggccaatcttcaagtctaggaacatgtgtgatcccaaacacgtacctggtgacaaatgaaaattccacattgaaagtcacataatttggtaagtagtagtttttaactgaatcagataagtaaaacaaggatacagaccaaagaacgacgtcagattcttccaaggagcgattctgtttcacccatgtggcaagaccttcaccagcccgtgggttttggtttgggaattctcctccaggaaacttctcgtctggggcgtaacgggtaacccagagattatgcttcaggaaagcggctcttcttagaaacttcgcctcgggtcgagctaatggcaaacaatttgaacccggaacaagtttgtatcccgttaattggcccgtcctgtttacagtccttgtgttccttacctgataacacattacaatgatttgtgttgaatatacatcttgcgtgagtataccatctatacttcagctacaaatcatattcaatgaaactctgagatgattttttggtaaaggaactcaagtatgagactatataaacacatgactgaaacttagggatgctcaggtgatctcttatcccaaatccagtctcaaggatgagactagtagatagtcaaggatgaaagaaatataaacaaggatattacagagacgggtacgagcactgacaatgtgaaagttaaacatgcaataaatggacgagaacatgcaaggtacggtttttgcttacaatccaatggcgagcagaaagagggtcacagtcacgcatcgccactgcctcagatttaagtaacttctcttccgcataaaacgcattgttgtggacattgttctcacctcgctcgtcaactctaacatttacctcaactacctacagataaaagtggattaagctgactattgagcaaaaccagctgacaacatgtatctaagattttttttcaagaactatagggacttctaaaattcatatgctaccaatgccattcctaaatactgagaaaataatccgcatatgtaagtaaataacaagaagaagagcagcatcataaaaaggtacctgattaaaagcttcagcaggtttacagtcaacagacatatccatgcgagcgataaagaaatgttgatggactggtgcatacaacccaggagcaatagtagtaccgtactttcgagtttcacctggctgcagagctcctaaactgaggataccagtaagttttacttcagcttcgattttcccatcctacagtaagacattcaagacataaaatgatattggtcttcaaatatctagaaagatgaaactacaaatcagaaaacaaatgaaactcggattcagcactgtaaatcaatgtcctcaagtgaaaaatcacaagcaaagtgccactaaactcaggatttattctcatgcggagacacatcatttgtcttccctatagaaattagatgcaaatatgactaatatctgctttactcaagaaatgaagaatcacgtattccactaacctggtagaagtgccagtaaaacccatactcgtagttggcaacagtacatagaaaagagacagttagtctcctagatcttcgcacttcggctaatcctgttctccagtcctgatgtttccacaaaatcccatgatcttcttcatgcaagcaaacacagttctcaattgtttcaactcctccagtgaaatttgtgaaatgggcatcgaagtacttgatagatcccagacagtcacacccctataaaaaccgattgttaaacacaaactgagatctgagtggtaagaacaccaaaaaaaaaactgatgtcaaaccttcttaagcgaatgtgcgtttttcccgagaccatcctcccctgcatcaaaagcatttttcctgtaatgtggctcattaggatcgccataaggcacaaccatttccacaaaacttagcctgtgtgcaacaggccttcgacctcgactgccatcaacatatgctaccgaatgtatgactaaaccttcccttggagtgaatccaatacgaaagttccactgtaaacaaaatgttgagccaatttagaaataagcttaagcataatcacttggtttcaagtaggctattactggaaatctaccttctgccactcgacaaagtaaccccttacacgaaaacttggaccttcaggctgaataatctggagaggcttaacatcacttctatcaacaccccctctactttcacctggggtataattcctcaaagggtcaggtggggggagtggcacaaacttacggtcttcaaattcaatcaccaccatgttttgcatgtctacaagtacataaatgccctcaactggacgagcatatccattttccataggggaatcactatcagtccgacagtatataaggggctttgcaagcctacgactaggagcgtcagcctcactgtgataacccacacacctgcacaatacattaagaggtaggctcagagaagaagtacaccttaattgtcaacagaaacgatgatgttgttaacataccagggatcaaccatcactagatccatgtcttcaatacctctcctcttcattgcctctatgaatggtgggaagtctttgacaatcgcttcacattcagcatattcagccgcatcctaaaatcaaaagaatctaaacttagagactggcaaacaacggtagcatctaaaagtcacttagagatccaattccttaaaacatagtttaacataccatgggtggctgaacatcaggtataacttgtgaggaaacaactcttcccctgtgatgtccaccccgagtgacagcatgaacttcagacaatgccacaatccatacacttgtctcattagacttttggttgtaaacaacaagtctagctcgccttggagggagcttcatcggaatcacaggtccagatttagttcttggaagtagtgatggctggaacggtgggaaaaagtaagcatcagcgagcgccacaacttgtttatctggttccactgatgccacctcaatgaaacgcatgccatccctaacctgccaaagaaaaagtaaaacagtttcagtgacaatgttatcaagcattctgcatttgtcaagaatcaagtaagtttgcgcacctcaggattggcaccagctgcgcgaacagtcgccacagcaactgatatttctgcagcagaaagaggatccaatgggtgcttggtttcagtccttggcatcacagaaatccctgcattggtgatcacaacagaaaatcaacttcacagaaaccacaatagtgatcacaattagatctcaatcagaagccatcaagtagacaagaaccaatttcacaaaaagtaaccatcatcaacaaattccagtaaacaagaagtcaagtaattcaaacgaatcgcgagctaacatcagaagaatgaaggacgatcaacgatcaaatcaaacctttgttggcaggtttcttggcagtattatcaggaaacgaatcgacagggcggataacggattccaaagaaactttagaggctcgctgatcgtcagcgtcggaccatacagcaacggtatcgggagcagcggagacgagtttgggaggcggaagagagccaccgtggtgaggacatgccgacgtctttttcgaagctgaggccattgaatagggttcacaagttctccaaatccaccaaaatcagtttcaacacaatccactgacatacagcaaaacctatcactatccgtcgcttgatcttcccccttctctccacttctagaagctccaagaagaagaagaagaagaagattccgatctccgatgatgacacaaaaatccacagctactactactagtacagtcttctctctctcgacttgagctccgtcacaagaagttggattcgtcaccggatcttgagttctccgtgatcgtataatcgctcttcaatttgtttgtttttttaaagagtttgatttttgttggagagtccaagcagaagcggccaaagccttatttgtgggctctcctactttttaacaagtacctatttatatttttttttaaaggtctaattatttgttttagaaagaaatccaacttggataacgacgtggatgcactattgttcatgagtttctcaatttgtaatttactatttggaaatatatattatatgtgtctaattagagtcaaacatattttccatttgaattttttaagtactaaatatataaaactggaaattaaaatataggtaaggaaaatattggaagttcttatctaaggagttttaacaaaggtaaagtatataggatgatggaaatagaaaaatatgacaattgacagactacataaggttatatgtcactatccgaaaatttatttcaaaataaaaaaaattgggaaaaaattaaccaaaaaaaaatgaaacatatatgttttgttaaataagtttgacgtgtttcaccaaaattctacacgcataattattattcttatcaggtttatgctgttattggacactacattgttttaagaagtaagcagaatggaacatagccaaaaaaaaaacatgaatacaaccaaaatagtcttattaacttgagtttgaggtgtttcaccaaaacttggagacaattgatatgatatatacttttagagcagtatattaattattagatcctgacagatattatagaaaatatgtatgaaaacaaaaaaaaacgaattggtgtcgtttatgttttatcacataaaaatcacaagaagcttataaaattacaaaagttactaatcaaagtgttttgatatgttatggttttaagattgtaaaatacaaatatagtgcatgatatataaatatatgtatatagttgtaataattagatcgtggagtggaccgcataatccatgcaatatcgaccaccaaagaaccgctgtctacaactagtggtattacgaggctcacattatttatgaaattcacgaaattaaaaactcttcattcgtccatgactccataatctagtttagccttacatagtccatgactccatattctgtcatcacagtttatatattattgtcttcggtgcgaaaacacgtcatgttaacgtagactattgaattacactttgttttctagtctttggtttgttttgtttcttgtgaaaccttcaatagtaggcaaaacgtttagaattccaatataaactgttctcttttgatgaatgaatacataagattttggtctatcacattgttctcaactatattgttcattgtttttttatgttttttggctaagaactatattgttctttgttgttaagcaaatgtattacttatcttattatttcttagatatcttttgtcattactatggatttgcctttgtatgccttgttgcgtttggtaaagatcaaactcatactctctggttttgttcagttactgatagaaacaagcaccaattcttgattgaccaaagaaaagtcccgagaaagtagaatgtgttccctttacaacaacctttaaccttctacttcccacagctactttgtatttagactggattacgactctatacattaaaacacttgtctatccagctcagcaccaactcaggagctttctcattgagctcttcatttagaggtctatcaatttgctccttccagtctgcactgagtctcaatgttgttctttatttatctcattctcaatgcaatagccatgagtacaacaaagccttcaatgccgttagattgcaagtcaagagaaggttcacagtcgaacattttgagtggctgatctgatgcgttcagcgactattgttattatatcaagctttgaagaacaaataaacataacaatttcaaggttctattcaaaaatcagagatgttcaagaacgaataacgtgaaataaaattagaagatttctcacatgaaaccacattctgatgcagaagggagaagaagaagaagctaataacatcaacaaaacaatgttcataatgggtatcttttttcttttcttggttatagaggaagataagaagccttcttcgcctataatacacactatattccggtggtgggcactaagttgaattttaaacagagcaacctgaacacaatgcataggaccagaatctagagttagccaactgtgacttttcacttgtgggtgcctgcagctgctgattgagatgagtctgtgtccagtgatcacaggaaatagtctggagtccttcgggtgacgtctggttctcctctcctcggtgctggttcaaactgcactcacattttatatactcaagttagctttggtcattcttctacactagtttcattagcagacaagacatgtgggatttggggaaagacctggatgaaggtgtggttcctgcagtcgtcgacctcaagaatcgaggccatgttcccacaacggtaacaatagtttggtgcactgaaaatagtaaccactttttgctcctgtttgatagggaagacagtaaaaatgagctcagaatcttaagccttgcaaagctatgcaaagaaaggtttatagtttcattattacgtgagcccagttgtatccatccataaccaactggtgagctcgggcgatcagctttaagttgtttgtgtgattgaattgttcagatatatcctatggaaacaaaatgaaaaaagagaaaagtcaattcgacacttgctttaaaaacagagagaatcaggactgtttctgagacgtaagacttgtaattacctgaccaaatgtatatccggcaccccgaggagagatgccccaaccacatcggtcatcggggtcagaccataataagtcacacatcggcccttcatggggcacttcttgaactcgatcaaaattccttatgttgtcaagggtctcgatagatggagataatccaccatgaaggcaaaatatttctgactcaacctgcagggaaaaaacataatgatttgatgattcccaaaaatttgtgtagaaaataccaacgatttagtcagataaggcatacatgaaatcttccatatataacagatctccattctttgcatttttcagaatactaacgtcttgcaattgatgtgacactagcaaaagaaatacgacagcacagtacaaaagtactactttggttccaaataatactgccagcacaagacaaagaactgatcatctatattaattgactaccggacgaggatagacttatatgtgaacccccactaacaaaaaaggaagaaaaatgtgagacatgtatgataggtactaaccaaggctgtcagaggaaaatagtcgaagaggtctgtaaagattttccaaacatttgcgttgccgtacctaaaaaggaaaacatggtttgttaaatttattgcaaaatctatatcccaaataagctgcaaactaggatgtgtaagattatacaacatagaacaatactataagcaagtaatcataagcccaaaggattaacagaaacaggaagtaaagaaagaaaagacaattttggacaggctaccatacacacatacaatgcaacagcaaaaatataaggacaatagtaatgctaataataattaaaaaaattgtttaaatgcattagaaaataaggattttttttccagtataaggattttttccaggagactcactttcgtagacattcatcataaaatccataaacctgagtaatctgcgagatggaagaaaaagaagaaaagcctgtgtcagattaaaatagtaatatgataaaaaaaatgtgcacaaaacgaattttgtagacaaaacagagacttataaaaaaggaaattgtgtgtcaaccaagatctcaacgatggaaaagactggatacacaatgaagtactgtatttaacatcagaaggtgaatttacaagtggaaccagagtaataaaatcataaagcattagtctacctgacgactttcatggtttcctctaagaatagtgattcgctgaggatatcgcatctttaaggcgactaacagctggaaagagaataagaaagagaaacagtatcagcatacttcatagtcacacccaaaatatatacattgtaaagaaaaaaatatccgtcaagttaatggtatcttgttaccaatataaaaagacaatgactggcttgccaatcagcctactcttaaatgaataaaaaaaggaagtctaaatatttcatcttcgtaccgtaacagtttcaacagaataataaccacggtccacatagtctcccataaacaggtaattggtatcagggcactgcaaaaaagagaaaattaatactttgtaagattggtagagctatttgtagagctctgtatattttatagatgttaccattccccctatacggaaaagctctgcaagatcatggaactgtccatgaatatcaccgcagattgtcacagggcttttcacaggctgcatgcaggaaatagaaagaactaataaattcatggctagtagcacaatctaccacactgaaaatagaatcaccaagtgtggtgaaagaaattgctcaaccaaagagatatgcaagaccaggaactaacctgaacattgctttcatccattaagatctccttggctttctcgcataatgctctaacctaaggaaaataaaacaatgctgcatatgattttcacctctttaacactctcaagacatgcagctaataaccactatcaaacacatgacatagaaatatatacttagagaaatcaacttgacacaggcaacaaacaggagcatcaattaagaaaaaaaaaaaaccaacaagtattgatcagctattgatacgaaaatattaaaaatttatcagtccataagaatcccgattgacattaccaggcacataaaaacacgagcttagatgtgattaatcactatgctaagaatccaaatcagccaaaatttaacatcaaaccatagaagcaaagccaattctccaacccatagaactgcggtgacaaatgagcttccgtgagaacatacatgccaagatctaataacatttcctgaagatgttcatttagaaaaaaaaaaaaaaatcgaaactttccaaatcaaatctgataatctcgtacccaaagaaacctcaaacacagaaaaaaataccactccactcaaaaaaacaaaaaaaacagatccaatcatcgataaaaacaaagtagagaaaacgtcaagggctaaggtctaaagagaaagttgtaggcacctgttgctccgagagaggcttgcactgcatgagctgcgagatctgctcatcaagatcaatggttgcgtccgtcggaatagaattcgcgcccattttcgttaattcgtctctcgtccgatccggaaaacagatcaggaaacaggactaggtttccaaattaggggaagtcctaaccctaaattggatggaatctgcgtattcttcgccttttttcccccactttctctctctctctctctctctctctctctctctctctctctctcttctttgtctcttcgctttgtgtgcagtgaaagaagatcgaattttgagaaggcgcgtgaggagagaagcgagtggtttgtatctttcgagctctttcttttgctattaccataatacccctctactttaattggtgcaatagccatcaccggtttaatactaacttctacggtttaactgaaccggtttcagcttatataatcgtctcgagagacttttgccttcgcttcataaagctctctctctctagtctcacagtctcgctctctcttttttatctctgtgatggcgacgagatttgataccggtgaaagtattgggtcggggaaaacttcgatttctcgggatgaatttgcagaagactcgctaaagatcgtttctttgccgccggttgagaacgacgactctgttgaagagatgataagcccaaagaagcaagtaaagtcttcgccttttacttctgtttttgagaaggatggagaaatcatccattcggattctattgacatttctttctccgaaacgactcttgaagaaaccgtggcgatgaatgtggagtgtcctggagtagtagtagtctctgtacctgaaaatggttccacgattcttgaagagaataaggttggtgaagagattaaggaaagctctgagatttctactacagaaggcgatcgacttggagatgatgtgctcaagataaaggatgttgttgagactgatgggttcgtcgtatctatctctgatatgaaagaaagtttgaactcggagaagaagggacaagattctgatggtcagaggattgtggaggctgagaagataatattgttcgctgaaatcggagatggttccacgtttcttgaagagaataaggaactgcaacagattaaggaagtctctgagatttctacagaaagtgatcaatttggagatgatgtgtacaagatagaggatgattgcgtcggttctatctctgatatgaaagaaattttgaactctcagaagaagggacaagattctgatgttcaaatactttgggagactgagaagaagaatgatggggacacgctcgctagggcttctgatatccataagatcgaaaagaatggaaatgggtctaaagatcagcgtgagaaggtggaaagagtgagagttaaggataatgcatttgttggaagatc

SEQ ID NO: 367 - DNA, 96685 bp, Arabidopsis thaliana
gaattctctcggattttcatgttgtctagcgtaatcaaggtgaagactaggaacaaaaacaaacacattcttccacctcgtagagagcgatgaggttaaagcagcctcttttgtggagagaaaggataaaatgtgctcaagaatctcatctggtaaagagctgattctatccataattactctaaacaccctcaaacacagactgaacaaaaaactaaattttcaacagctagaatcaggaacggcagcaacagagttgataagcttcaaagtttcgttctttttgctgttccatccattgtctatagtgatcaagccatcgatacccaaagaaaagagatacctttgctaattgcaacagaggcggcggcttcaattcacgaaagctctccaaattcagtccccaattagggttttggcaatccgaaagaagagacgtcgaaaatgtaacatgtgatgcagtgcaattaaaaagactcttcgagtatataataaaaaagacgcgcctagtcgtgtgctactactaaaacgacggcgagtcgtatgactattaaacgacgccgattcatgtgggctaataacggctccgattcatgtgggctactaaacgacacggttcataattaaataaaacactcgcgaaggcgtgggcttcattacattgattatgaagctagaaatcataattgccacaactttggttatagattgtgggtgattactcttatctgaaaggatagttgtaacgggaaaaaacacacaaggggacaaaaatttatgatgttttattcaagtgaagggcctctatggaaagtggatgataagctctcaaacaacaaaaacaaaggagaaaaggacagaagccaattcgatcaattgagcaatagactacctaagagacaacaaatcataatgttttcaaagattcagcatttggaaaacagtaaaaaaaacttttacgggatgattaagattaatcttttggactccactagctcacttgagctgcaatttggtatggaggtccgctgctctggataacgactgtatcgatactggataaccctttcccatctgcaaaaagcaattcttttaggtttaatggaatccaaaaatgttactacaaggagacgttgggtttgatttgtaagcttaccgtactgcataagtggaatgcattcacataaccagcatattttgaagctgcaggagaaaggtaaagagcaaatcagccaaacaatcatctctcaacaaaacttataagctcccggtatgacttactctttttcaatccagcaggcttcgctagcaaaagggcgttcataaacgcaccaacattctctcgtaaagcctcttcagaaaagctcatctggtggacgttttttggaaagtagtctttattaagaatgaagttaatgaaattcaggtaaacttcaagtctttgggaagagatgtcacctttccaagtggcacatgaagaatagacgttttatccattctaaatttggtatgtccagcttttgcgtctttgactgctttcgtaacatccttggtcacactaccttgctacaacaaatataatattcgttcaaattcatttaagggaaaaaggtaagcatacttactgatacattagagtaagatgctgagtgaaagaatcaaactcactttggggtttggcatcaaaccatgattgttaagaattcttgatatctgcaaataagcacaaaccatatgtatgttatgtgagaagatatcgcaacatcatgttccaaagaatttaaacaagtgctcaaatccaagaaccttgtaaacacggggcatcatttttggagttgcaagacatctatcaaagtcaatcttgccactttctgcagatagagttaaggtacacagataaataatctaccactggaacataattcgataaacaaaaagattgctcaggaaatgagataagttgtggcagagccaaatgcaagcatgttcaattagatgtcagaatgaattgaagtagaatgcattggttcattactcaagatctcttcaataagctcaagaccaccaacgacatcagctcctgcagcttttgcatcctctgcatcagctccctcggcaaagaaagccactttcacatcctgaacaaggaagatcatttcttgtattatattagtggctggtaaaatagaaattccgattatggattacaaatgcatttcttttaccttcttaacagagtggggtagagccaaagtaccacgaactatctgcaatttaaacagtgatagcagtcagtctagagataaagccaggggcaatcaaccaaaatgctaagaacgcgatctttttattaagaataggatagagaaattaatgtatttccagagaaaataaatgcatcacataccagctcagatcttcctttttcaatgcccaatctcacatgcgcctcaagagtttcatcaaatttcgccttggcattgccctgaaccattgataaaaacagcatcagaaatgaaaaccatacgaacaaaagggatgcattgccctcactcactcaacttgtaaatcaactcagcaacaacaactattaccagtttacagaatccacaaatctcacagtaccaccattacacaaaacttgcatgatctaaactaatccacaacgtctaacaattcttccaagactccttatgtttcacattatatagtcatatgatcctaatcatcatagcttcctttataatagtcatttgaaatcccctaactacgaaacaagcaaaaaaattaatcctttgacacaaaataaataaattaaaagaaccctaaatagtgtagcttccattctattacaatggcagctcatattaagaatcctgaccttaatctctctaatggcctccatgagatcgaaaataggtttctttccatgcttcaactctggtttaagcaaagttggcaaaggaagtgaagaagtatcttcttcaacagcattagctcttaaaaaccttcttctagctcgattctctaattcaatcctcttcctctccctctccatctcctctggagttctatctccttcattctcaccggcgacacgatcctccggaagtggagccacacgctgagcgtaagaaaccggattgatcgaaggagagtctttcacatatcggatttcttcacgagtccagttcgctgattctggagactgaaggttctccgtcgattcaacatttttcggttcagatttctgatccttgggtttggccgcgtacgatactggctcgattgtaacagcctttttgcgagattcgtttgaatcgggagatggattcgaatcggatgatgaagatgaagatgaagatgaagatgaagatgaagagaagagtcttgggatttgttgaaatggagacgaaaagggtttgattagaccttggcggcgagcttgagagagtaggagcttcatagctgccattgtttcttcactcactcgaggtttttcgtgtgaaatgtgattttgggggtttaaggagatttctgatttttaacttaaaagcttttctgtaaatgttataaaactttagggaccaaagatataaataatttgagatttttttttgaaaaatctcttattcacaattaataaccaatcttttcttatctcttgaaaatggaactattgttttgtagattttaacattcgatcattaatttattcatgggtatttctgtttcttctaatgttacaagctaacaacagagattatgagagtgaggtcagtttgcaagatatcaaaaatggctgaattgtcccaacaataactcaaacatgtcgtcgggggttagaagtgtcgttcctccaataaccaagttaatgtctggtcttccgctctctgacacagcctcttgagcttccaaaaccttaacaatggaggaaacatagacagttataaaaaatatagccctacaacgtgaatgcgaggtgacttttgtgatgaagaaactcacctctataccgttgatacctccaatgacaaagacaagaatgacactctggtctgccaggcttggttttgcctgcaatagcattgccaaacattaatgtatatcttgtgtaggaaaatgaaagtcatgggtagagagaaaggtctaactaacctgaccaagaccaaaccttccaaatccgcttttaataaatcttccaacagttgaagaatggtattctaaaccgggtatctcttgtttgctcaacacttttgttataagcctgtagactagccctttgtttccagaaggctcgccaggaaagctgctctctgaagccaatgagccttctcttaatggtagattccttgttcttagactcgataacttgtggaggaacctaaataagctgtctactctatcacgcaaatccagtttcagctgcatatcgtcataggactcgtctgctttactattgtcaacttcttcttcttcctcgtcaccccatttcccccatggatcatcatcaagagcatcaatgtctaattgatcatcagagggaatttctttggtttcctcagacttgagacgattcaatctgccctcaagctcttctgtcaacccattaagaaacttgagatttcctgctgatggattctccagaacagcatcgacaatggcttcttttagaaaatgctcttcttgccaagagaaaggcccacctgagccagatgtagggaaattttcgccagcaagaatgtaaccaactattgtaagaagcagggcatcacgaaaagatagcagccctcgtgatgaggaatctggtttctcgtttttcttcgcttgaagttctgccacagcgcttttgttgatcaggtcactaatttgagcagccaaaccctgactcgtatcaccagcacttacgtttaacatcatctccgcactgctaaaagtatcccatttggcactttgagattcatcaagagcagcggctgtagctgcccctaactgaataatccctttatttttcaacaaagacgactggctttgggacaatgctttgatcatggcctggagctccggttttgtagcataaccaggacgagctctcacgttaacagagatattttcgcgacgcaaagcctcttgaagccatttcttcaccagtacacttccatccttcgttttcctatcaatcatggcctctaagtaaggtgttcctctaaaacattcagtagcgacaagagatccatttagtagttcagtccagttggtggtagatttcttgtcacattcattaaacaaacctacattttgtggagcagaggtatatgaatcccagccacgtaaaaaagcttcaattccttcaggaagaccagaatcccgaatcttgcttggttcttcattaagcagttccccaagcggcacttgaacatcaagagaaggacgattgatgcttgggaccccttgtttaagctgtgcttgtgaagaaaatctttctgcccgaggcaaagatgaaaagatacgatcgaaaagtgaatccccgtgacagcagggagtgataagatcaagtgtgcggtcaacaagtaacaagccagcagatcgcttacgacgcgctacatcataaacacttgacatgtctgttagaatcttcccaacattcttcgattggtcaccaagtgaaaatatttccaacttcaactccatctacaattttaaaaaagtgacgacatggtcacaaatttaagaaaaacgtacagaagaaattaaattattgacaaacaagggaaacagatatcttctagtgttctagctcacgtacttcatgaacatcgtgaattaagttcaaagcggttactgcagtgttagtttaccttaagggccagctggtaaagaaaatgtgcggtaagagttgcaccaggaggaacatcatcagtgtcagacatagatccagtacttatgggaggcaaaccaaaactaagagaatcctcatgttgacgggacaaggacgcttctgcgactgatccttgggaaggtaagacaaacgctcgaggagtgaaaggacaaataatcaaggggaagtggtgaactgagacaaccaaaccttgtgcaccacctgatgaaatatctacattttcgctttcaataggctccatagtaagggattcaagtgcagaagagaacttagaaacccctttgtctttagatattttgtcgcttttcttagtatgttcattgtaatcctgaacaagtaaggtttcatactctcgatacgcgtctggacctagaggtgaatcagggatagctgagtgagacccctgtacaacgttcagattaatattcaatgacgcaagaaaagaaacaaatattctgaagagtctcttatagatggaaaattattttgaagaaggcatagagaagcagaactgctaaattaagttagagaatacattacaatcactttgaatttgattatataacgatcactagtgttgataagtcaaatagcttgtgattgttctagaaaataaaaaagccaatatatatatccagagaaaaaaaagagattaaataaagaatgagaccaaggataacgttaaagaagagcacctctgaaatagatgtgaatacggtgcagcgctgaacaccttcatgggtgcttagacaccgtagcatataccgatgagcatcattgagaagtcgagatgtcataatcacaattctcttggcacaatcagactttgaattccaatcagccacctagagcacaaggcatcaaaagtcacatcatataaattaaatcagaagatttctcactttctaggtaaaaagatccccttcataccaaaagtatgaggataacaatcttcctgttctttatctagatcctcaattaccaacactaaccgttgattgataggatattccttagccaacattgtgcaggaaaaaaagaaacggtaacaagcttaccgcatctaaggaagtcatgttttcaagactgcagacagctcgagcacctagttccaagaacaaagggaaagctcctacaaattgaaaactttctgtgcagccagcatcgatatacacaatcgcatcttttacatcctcttctatctacaaaacaaaacatttccaaaatatctaaaccttacttgttcaggattacagtaaggtacttttacatttcccaagaacacacaaaaacgagcaaaacgagatcatggagaaatcgtaatgattcaggtgcagcagatcaaaacgtgtaacaagatgagaccagatgaaaaaaaaaaaaaaaaaaaaaaaaaagagaattcggatttcttacttcgcggatcgaattgagacaagatatcgcgacatcgatcagagccattgctctcagctacgagaattggatacaattggtcgagctagagtgaaatcgccagttagaatcaaattactatgagatgtgttgtctgaaatcagactgatgcctgaaccaccggagaaacactgctttcgcttcgccgggaaatctcaccgacgacgaacatgatagcttaacttgatatcgttcgtcgtatgatcgtcactttgttgggcttttttacactttttgggctttgaattatctttgatttattatggcccatcatatattagttaacgggtctaggatgcaatgttatcaaagggggatatattggagatgaaagtgattaactgaaacataacattggttaacaaatcatttgcactattgaaggatgggtgttggtggggtcgcgaaaaacaaaggcatgctcaagaccgaggctggtgattgggtcatggccattccggacgacgaagacaagcctgtcgtcgcgtttgattagttgcaaacaaacaataagtctcttttcgtgtgtatcgattgatttggttgaattttcttctctctatttgattgggtttatttttactcttttttgtatggttgagaatgatgtgcaagtttgtggataattctatatgccaataatattcccacaccagtgataaccttttatcgctttggacataagtgggtcagacagcatcatcaccagtccacaaccatttgtataaagttaaacaacttaagagtcaagagtcacttattatctccttacacacaccatttctctctaatggctacaacaaccacatcatgggaagaactcttaggctcaaagaattgggacactatcttagacccattagaccaatcacttagggaactcatcttacgttgtggcgacttttgtcaagccacctacgatgccttcgtcaacgaccaaaactccaagtactgtggagccagccgctacggcaaatcttctttcttcgacaaggtcatgctcgaaaacgcttccgactacgaggttgtaaacttcctctacgccacagctcgtgtttctctccccgaaggtttgcttctccaatcacaatcaagagattcttgggaccgtgagtctaactggtttggctacattgctgtcacgtctgatgaacggtctaaggctttaggacgccgtgagatctatatagctttgagaggaacgagcaggaactatgagtgggtcaatgttttgggtgctaggccaacttcagctgaccccttgctgcacggacccgagcaggatggttctggtggtgtagttgaaggtacgacttttgatagtgacagtgaagatgaagaagggtgtaaggtgatgctcgggtggctcacaatctatacttctaatcaccccgaatcgaaattcactaagctgagtctacggtcacagttgttagccaagatcaaggagcttctgttgaagtataaggacgagaaaccgagcattgtgttgactggacatagcttgggagctacagaggctgttctggccgcctatgatatagctgagaacggttccagtgatgatgttccggtcactgctatagtctttggttgtccacaggtaggaaacaaggagttcagagacgaagtaatgagtcacaagaacttaaagatcctccatgtaaggaacacgattgatctcttaactcgatacccagggggacttttagggtatgtggacataggaataaactttgtgatcgatacaaagaagtcaccgttcctaagcgattcaaggaatccaggggattggcataatcttcaggtaagaatctgtgagaagaatctttcaaatttgactcaaacgatacagagtagaaacttttacatattttttccatgtatgtgtgcaggcgatgttacatgttgtagctggatggaatgggaagaaaggagagtttaaactgatggttaagagaagtattgcattagtgaacaagtcatgcgagttcttgaaagctgagtgtttggtgccaggatcttggtgggtagagaagaacaaaggactgatcaagaacgaagatggtgaatgggttcttgctcccgttgaagaagaacctgtacctgaattctaaattgtatttctgtatttttctctaaggtcatgataaatcaacaataagcagttcaactatgtgatgaaaagacccaagttattatattgatatgagtttatgagatagagattccatcaacgaaacaaacattcaaacggttttgctttcttacaatcagaaaatattcttcttggcaaagttacggcattagacgaaagcattgattcttgttacttgctacatcagtagaacttggctcacttctttccacgaagcttagctccaagcgctctctccagcttagaaaggatttgctggttgggtatagctttgccagactcatactcttgaatcacttgtggcttctcattgatgatctacacaaaaagaaacaaacactttgtcatgaaccgagttacaaaatagggtaataataagggacatatagagagaaggataatatacttgagcaagttgggactgggttagcttcttgtctgtcctggcttgcataatggctttctttagctcagtaggcacacgttcatctgaattcacaattgcataattcaaaacatgaagcttcagcatccaatacacatcaatcaataaaaagttcctctcactataaccatcaaagactcacaggcagaaagatagacagactctactcatataagaacagttttccaatacgttgaacactttgaaacaagaaatgaacacattagcctagatacagagcctgacactaccatattctagacactagggaaatcaattcaccattaataaaccaaatgattaaagataagacttacgagtaaggttctcagtgtcatcatcaagcatttttgtgttcagagatgtgccgcttgatgccgccttgttggttccagcattgactaaacccaacacacacacaaaatcaatgttagatggaagccaaatctagaaattgcacataaaaaccaaaataaaaccagcagaaattatcgacctaatatgaacaacaactaaatcagcaatacagatacaccggaaatttcaattgacaacgaacataaaccctaaaaagatctccttatcatgaatcacaataaccccaaggcattgaaggctagttcaatcaaaaacgaaatcgaacctccaatagcaaaatcaagtaaatattatactagagagccctagatcaaaccggataacatcaacaggagctaagataggtctagaaattagggaaaggaaagaagaacgaacattttctgacggtctcgatatcggcgccggatcgacgagcggcgttgacagttttctcgtcgcgcttggcagcggcgttagcgggtttcttacggatcaccaccggctcccaatcctgagttatcggtccaattccggccatggttttttgttctgcaaccgccttttgacaaaatctagggcttctttctttctctgcaggtgacaagttagaaaagaatatgagagaaaactgggaataaaatagcaaaagccgtgcgtgagcttcacgctactttttttttttatttttctaagataataattggtttaacaaaattacataaacctttttatctaaagaatcaaggggaaagtactatcaaaaatttgtattttgaatttttatcaccaattttaagctttgtacattaaagtataacttccacgctatttactaaaagagatgcataagataagttatcatcttttgttctaaattcatattgtaggtcgataaccaagaagtgtttgttggtattagaaaagagttggtatgtcgtttattttgcaattttagttaccaaggggtgatttagtaaattagtaaatggggtccaagttgagaagaaatatctcgtggcacaaatggcaacaaaattaaaaatattggattctcttttaattttttactcttttttactctagagccttgttgttcttcttcttcttctttcttcgtcttcaacttcttctaccgagattgattctatttcttccggatcttacgcaaccattactctcacctcaggtctattctagcttaatcattctcttctgtgtttgtattcaattccgtttggtttttgctctgttgcttgccgttttaactctcgacgcattcgttaatttgagaaaatcgaatctccgattttgagctcgaattttgtattgatttagattacatgtccttcatctgtgagattcttaagattagtggatggtaaatgctttaaaatttgctgattatatagctcaattcgattatatccagttttcaaaccgaaatggttaacgttttgatgttctgaatttgtatatgtgcgattcatttcccaagttcgagtaataatgatgcttttatgattcactgattatgtttggttccgaatcctctgtgcacgatgctcatccgagtcgcatttgattgagaataatttgttgaatcggtacatttttcttatatcaagcttgtttttacttttctttggcttgtttcaggcagaaatgtttctatgttgaagaagaaggaaatggttataagtcttggaagttttagtatcatcagttgtgtcttagaaaactgggaacggctcttttcctctgttaccatagctgagttagcttgagaaacttttgaattggattcagatcatgccttactttgctcagaggctttacaatacttgcaaggcgtctttctcttcagacggaccaataacagaagatgctctggagaaggttcgcaatgtcttgggtatgattatacgcacatattgttcaatgaatctttgtccactggttttcagtttatcgcatctgttatttggccgatcattgttatctttttgagtgcttgtgacaaggacttttttttttttatgaattttgtggcccacaacatgtgaattcgtttatctgatcattctgcaaattacctaataagagtgtattagttaagggtgttggtggtactgagtaatcatatatatctcactttagtcttcaatgcagtggtcccctgttgcacttaccaaccttatttgtaatctatgtttcagagaaaatcaagccatctgatgttggaattgagcaggatgctcaattggcacggtccaggtctggtcctctcaatgaacgcaatggaagtaatcagtctcccccagcaataaagtatcttcatttgcatgagtgtgacagtttctctgtaagcatactgatttgaaaactctatggctgattggtcttgaatgctgtttaaggtttgggtgaatcttttgtgatccactttaggatgattcagatacaaaatagcataagagtcccattttaacttcctaggtttaagtagcaatggttctgcttggaataatatgcaaataccgttcaaggttaaaacactctatagccaatcctgagacaaaaattttagtggatatttaatcttctccttttccgcatattcaaaattaggggaataggggggcatccaaacatggtccttgagagaatctcaggaaccaactattcaagccatgagcctgaagtctgcaaaaaagcctatgacaaatggtctagaaagtatgagtaaacacagttcgagtcaattctgagtctgtctctagttgggtgttttatcttcctgatactgccaccaatgttatctctcacttggttcattttgcctctgttgtcaaaacagataggaatcttctgtatgccaccttcttctatgatacctcttcataaccatccgggcatgaccgtgctaagcaagctcgtttatggttcaatgcatgtgaagtcatatgattggctagagcctcaactgaccgaaccagaggatccatcacaaggtaaccgtcttctttctgttactctctcagtttttatccaatcactcttctggtctaattgtaaactattttgattcataagaagcaagacctgctaaactggtgaaggatactgagatgacggctcaaagcccagtaacaacattatatccgaaaagtggtggcaacattcactgtttcaaagccatcacccattgtgctattcttgacatcttagctccaccttactcttcagagcatgatcggcattgcacttacttccggaaatccagaagagaagacttaccaggtaatacaactaagctctccaaaaacccgatcccagaaccatattagaacctttagtgatattgatttggattgtgaactggagcaggtgaattagaagtggatggagaagtggtcacagacgtgacatggcttgaggaatttcaaccgcctgatgactttgtgatacgacgaattccgtacagaggtcctgtcattagaacttgatgatgatctaatctttacttgtcacataatttgggcggcttcgggtttttattttttatttatattcctttcggaaataatttggggggtctttttatattgcaaacgggattgtacatactaatttgtgatacaccgtgtgtctccgtttcattatattgcaaaagacttctaatggtttttagtcttcggtactagacttctctaatggttgtgtttacaaaatccttaaacctcgttttgcatagttgtgtttcttccttcatatggtaaggtcacaccagcatagaagttgccccgatacgcccaatttgtaggttgtgcagttggtaactaagttgggattgatttggaaatcggagtaaagttcatgggatgtgtgatcttactgtttttaaaaaataagggaatgaaatggcgtcgttggctttttctaagtctaacaaagcaaaactgaacaaaaaacaaaatcacattctggctactacgtaagactaaatcccatctccctctaccaagcggctggctgagtctttattacgtaaggacttagtggatattatcataaaattagtggatacactctatttgcttagtggatttcaatggaatttcattcctctcgttttattttttggtcaatggataaattagctctccactttatccatttcggttttcatgaagaaaatcagaattatcaattatttatgatgatgaagttgaacaaccaaactaattcatagaatcatagtggtttatatgtagttgaagcatgggcttagggactaggatccaaaaaatttgcattgcgatttcaatactagacgtcttaaatggtaagaatatccgatttgtaatctacagggcaaatgagaatagtctagattttggtccagattctttggttataaaaaaaacaaaatgtttaacaacgaacattgatatggtcccaacctagacctagacctagacccaaagaccaggattataaagagaataaagaaagcatttcggggtaatcatggttgaaaattgaaatagatgagcccgttccttcatgagtaaagtttatataatcgtggaaatttttaacatgctgattgaggtgtgataccctttgatcccaaccgctttgaacgcaagtacgcaaccacgaacaaaagtaagcatggaaacaacttagaaaagatcaagagaaaccattactatgttacgttattaatttgttaattgttactcttcattataatgcatttttcttatgagtgtataaataaaacttttgagaaaagaagatcgaagctaataatcatggtcctaaagatacgtaggcatgtgatgaggaagaattcaaagacggtgcctcattttgcggcgattctttagggcaacatgcagaattttttagcttcttgcatgcataataaataaatatatcaactggatcaacgtcctttttacatttaaaaatggttttgtgcatataaaacgtcctttagggaaacagttgttatattttttgtcaaaaaataaatggtttgtacatataaaacgtatctagtaaacattcacaaaaaaaaaaatcctctgaaatggtaaaatataaaagaattttcttggaagaagtagaactcgacaaaagattctcttaaccaaagaaattcatgtcgtttaaagaaattcaagaactattgaaacaatttgaaattatatattccataaaaagagagcatgggaaatggaggaattgtgaatgaagtgtcggtacgtaaacaggttaggacaaaacaaagtttcctcatctttcttagtgcccacatgagcctctacgattccttctctcccatcaatgctctcttcaatcttagttaattacttcgaatgtttgtcctatcttctcttctctctcatctcctatctttctttctctctctatctgtccataaccctagatttgaagatcgagggcgatcatggtaaaagacttcatagaaattctataacattcaagctgtgtttatatgaatacgagcgttgaaatttgatcccatcgcgttttcatatatgttccaaaatgcttgtatagatatgtgtgtgcatagacatagagtgtcggaaatttgcatcgggacgatttataattaatttggtgtagggtttgaggtccttattaatttcacataaaacttggttcaattttgtaaaaagtgtttgtacttatttttcttgatttgaaacttattttgagaatttatgattaacgacagcttatctatgtttacaaatactaattcaactcacaagatgacaataaagacaaagattgcactctagaaagaaagttgctttgcctaatttgaacaattaaaaaattgcattcaaagataatatacccgtaattatttattagttacctctctcgaattatatactgattggtaagttggtaagccctacaaaaacatatagttagccaattctcgaagagaaaccaaatactaatatatggaggtgtgtaacccaatgcccattgaaaagggtcaccaataataaaaccaaaaagataaagacaacttctgttttgtacatacgtgaactcaagaatctttgggaatcacatccttaaccatttgacaaaactcccttctctcttaagtttttatttaaattctgttttcaaacgttgggattgaagaccgtcatgtatttaacctaagtatatgagaaacatgaatatagatcaatagccatcatgataaaaccaaatgcgtagaaacgtaattcattccaccacatagtaatcggttgagaggtagacaatagtttgtaccttttgtctatcagggttcgaatcaatcggcttagatcgatagttctcatgttccgtttgagttccccaatgctaatctgatttttatttttttaagttgttttggagacactcaaaaacgtggtttaatatgacaaaagggtaaagcgtagtctccggcaaaggtcaacttaattggaaattattaaagagaaaattgttagaaaaacaagagtggtttggtcggattgaaatgtttgatacatcattcacaaaacaacaattctaatgacacaaaatattcgactgccaattgtgtatacatatagactggactatttgaaccaatatgcttgatatcaaatatatgattaattaaccaatttaaatagcctagccattgtcacatgatatatatcaaaggcacgttaggtaaacagaagatgttttaagaaatggtatagtttttggaatctgaattcatattcaaattcaccatatttaaatcttgtttaaagaaagatattatttttaagaagtaaaggagataagtttacatgtcattgtcactaaaagaacaaacggatatttttctggtatgttaacaaaaatgaagcaaaacctaataactaatgtgatttcaccaaacggaagattccaacacacttttccattaaaaaaaaacatacaattatacgtaaacatgcatgacatagataagaattttatatatctatataattatatactatagtttacgacaaataagactatattatatacttataagtgtatatatatgattatagctagtattattgaagccaacgccgaaattatcatagagatttaacctctctcatgggtttttttttgtttgtttttgagtaattgatctcgagagctagctaaagacactctcgccggagagacatggccgggagatcttcgccgggaaaatgctccacgtggcttgacctgaacagagaagaaacagtggagaagaacaatgaagaagagtcatcagtggaagacgaagaccaaatcacgaataacgttagacagtatattcggtccaacatgcctcggcttcgttggacgcctgatcttcatctctccttcgttcgtgctgtccaacgactaggcggtccagacagtaggattcttgttctctctctccacgtctctttctctctttctctctctcagctttgtaatgtaattgttgtatgattttaaaggagcgacgccgaaattggttcttgagatgatgaatctaaaaggattgagtattgcacatgtcaagagtcatttacaggtaatcttcatcgtctgttattctaagattatctcagttttgttcatctttttcaatgttttcatgtttctgatttcaagatgtatcgaagtaagaagctcgagccgtcttctcgccctggtaagttagttttgatccgcagacatttaccattccttcactgggtttcataattgatggaaatgacttttgaacaggatttggagctttcatgagtggacaaagaagctatttgatggacatgatcgactctcgatgtatccctcatagcgatttaagacatgcctataactctaaaaccgttccttcgaggtcatacaaagaaacaagttccagttactaaaatgtttcacatttgtatatccgatccgaccaaggaagttaaaattgcattcttttctgtagggtactcaatcaagacgcggtcgttacaaatcttggaggtaactttcttatgcgaccttcgagctggtttagcgggttatgcagaaatgaccgagacagcacagagaacaagactctgcctctactcgaggtaactacctactttcgttttaagagttatagaggaacagttttgttaaaaaccgaggaaggtactgtaatcttggtgaaatcttatgcagattaggaagaagaacaatgagaaaagagtccgagatgaagaagtatcatcagtcaaacgattgaaatcaatgtccggaggtgggatacagttgcctgagtttggaaattgcaggcaaaaaccaacagatgatatcaacacaatgctctcgctctctctgttgtcgacatcatcagaaccgtaaccaacatactagagagatgaagtttaactttaaaagagattcaagagtagagacttttgttttccttagccgtttcatgggatgagtacttagccaggatctggatcaggcttgagtcagatcctgcaagtacttatccttagcggtttctctgcattcaatacaacaccaattctggaatgcaacaaaacacatgtaataatatgtttcctcgtcaaaaccaccaaatcaactacatggcaagtcactagtttgatgaaatagtaaacgataataaaagtcctaaatatataagaatcatgatgatgataccataataagacaaagtcataatcagtatccaaaaaaatcactcaagcagaaagaatagaatacttagttataacgacattaatataaaatcttcttttcttggttcacctcctcttagtcttagctttgaatccaccaccagactcatcaatgtccttctttagctttttcgacttttgcccattcttactcttcacaatgtctggtttcccactcactgcagacttactactactcatcttcttcctcttcttcttatctccagaagcattgagatcatcagcaacctcatcttctccaacactcctatcgaattcatcatcaccaagagtctcagatacattactatccatatatctaacctcatgaatctttccattcttcttctttgtcttcacactcttactactactatcatcaacatcacttttagctaatccttcaccattcttaacttcttcaacacctaaaggatcaatcttgagctgcaaataaggcactgtctgatataatggcaaagataaactctcagataacttcaaatgcaaagatcttatgtatttccacctactaggcaaaacatcaacaacaccattcaaagtcgccgtcacattctcaacgatatcatcgctttccatggacaatttcgcaactttgatcgcactacaagacccagtcctcatgaagaacatagcagcaccacaagctttctcaatctgctctttccaattcatatgcttcaaatcaatagccacaggagtcttcttgctctgaaagaacttcttcccaatcaattttggcaacataggaatcactctccgatctgagaaaaacatatcgtatgaatcacaaagcttccgtttcgattcgaatgatccataatccgatttcagcttcgaaagcttaacaactttcgtgattggtatgttctctgatttgatattcttcttcgcatcttcctcggtgagaccactttcaggtctgtcgtcgatgatgagacagagctccggtgagtcttcggtagtgttaattagcggatgcgggagaggaatacgataagcgttcgtaaaattcctctgtggaatcttctttagggctacgactaggtaaaagaatccgtcttcttctagaagctgtggcttctccgtccttgatttttcgtttccctctttgaccagagccttaactgcatcgtccacagtcttgggacttactcttgacataagtggtggcggcggttgcggctgagctgcggtggtcggaggaaaagaaaagttatttagggttctgtgaaggaagattcagggtttacggaggacgatgacttttaaacgagtttgttttgggtttcttaaggcccataatattggttaatgggcttaattatattgttttcataaattgtcctcaagtttttgcatcggagaaatcttttctattaaacgagtttgttttgcgtttcttaaggcccataatattagttaatgggcttaactatgttgttttataaattgtcctcaagttttgcataggagaaatgttttgaagattttttttttgtgtggtaagagaaacttttagaagatggtaattggtaagatttaagatataggaaattatgacaaactagcttattttatcaatacatgaaatcttttttatttcatgttaatgtagatatagatataaatttaaaatatgaaattaattatataaaatatgagtcatgtagtacttggctgtcatttaccatacttgtctaaaacgtacttaccaaatatatttgatgctaatttttatatacaaagaaataaagtatatacacctggacaatataattattaataaaattgttttctttattttcaagtttttattcccttcgcaaaatgtctaattcctcttatagctcttcaaactttaaaaataaatatttctttaagaaaaaagtgagaatcacattaattgaaaatgtcaatatttagataaccaaaacaaaattctcaaacacttttctttatgtaagtactatataaatggagggatttctttataaaccaaaatgtgtgatatcttattgagttcattgagagaatacatgaaatgatagaaatgtcaggtttttgacaaacaaagaaatagccgcactgccaaacactttgatgatctgttgttgttgacgtgtaagtatcataatcaacatcaatattgaagtaggatgaattctcttgagtcattcttattgcaatctttttcgaagattgaatacattcgttgattttctattatactcttttcaaaaaaagttcatcctcatttttcatcaaactcttgttagattcttgttcatttacatcatcctcttttaagaaatctatctcatatgcatgaacaatctgataatatattgtcattcatagtgtaatgactatcaaatatgtatcttgtttcgaagatctttgagatagaaatggatgacaaaaacaatccatgtaggtagaggacaaaattgtacttatgaaatatatcctgtgaataagtgcttctcggcacgtgactcataatccctcgcacgtgacttgcttcgtcactttcgtaaaaccccttgactgtgtttttgcttcttccgccatcaaaatcaaaactttcaaaacctccaaaatccaatttttatctcatgaatctctgttgcaaatctctatgcatatacgtacacatactctatatgtgtgtacgtttagctctttgttgcttgatcatggcaatcttcagatctctcttctgtctttctcttgtttcgcagtgcgatttaagcagattgattgctggattttggaattggaaggacgtttatctgctttctgtgagttttttcataaacccttattcttcttttgctctttagccttttcttatatgattttagaccgtttggtttatgggttcttgtgtgtttgaatccatcgaagttggtgggattttattttgaaatgggttttgaaatctatgcaggaatttgaaattttgcaaccgaggacttgaaaatgggagctaagtgttgcagaggtcaccgaggatcagtggtggaatcaaatggttccgtgatcttgtcgtaagttctgaggctgaattattgaagtgaatctcttctataagtatcgaaaagtccaacactttgaataagttttgtagccagtctttgagaattgtctactagttaaatgctttgataaggaatatatggaatgcaacttagtatgtcactgaaacatttatttctgcaacagtatatccgagtctatatttacttaaccattctgcttttgcctatgtaggttagctgacctagaggtccaagctactggtaagcgaagtttgattcttaatattttggtacctacgttattcgtcttttcttgagtgaaacctatgggctaaggagacactcttgtgattttagaccttagggagatgactgtggtagaggcaagagatgctgctggaccatcagaaccaagacctccaagtcctaccttgaggccttcagaagttgaggagacatccgagcctgtatgtcagggatcactagtagaaacctctaatactgatgatgctggaccatcagaaccaaatccaccaagtcctaccttgaggccttcagaagttgagaagatatacgtgcctgtatgtcagggatcactagcagaaacctctaatcttgatcaagatggggtgtcaagttatgaagcatcgaatattttttggagtactgggtccttatcagacccgatcccaagtggtttttacactgtgatcccggtaagctatctttaggttggtattatctttgtccaataatatttcagttagctttattaatgcttggttacgtgctgctgtttgtcaacaatcattttcttatcttattatgttgttgaatttttcaacaggttgagagattgatgcattttaaaagcattcctacattggaagaaattaatgcgctgggggaagatcgtcttaaggctgatgcgatttttgtagatcttaagaacgatatacagcttgttttgataaaggagtttgtcatcaaacttgtcacaggattggactccgataaagttattaagaaaattgctggactggtaagaatgggcgagcatctttttatcatctcattttctagtgaactaactttggcgacaatgcatgtcattttgttactttatcttatcgctgcatgcaataaatatttggttctgaataagaaaacaaataactgtaatcccatttattagactcttaaggcacatcacattatttcagcaacctcattatattcttttagattatcgggaaatctgaattggatttttccttcttatggcaggtggcaaatatatataaaagaaaaactctgcagagtccggcaagaacgctgcaatattttgacgttcaagggtttaccctgctaggacaaatcaagcatggttcttgtcgtgcacgagcaatcctctttaaagttctagctgatgctgttggtcttgacagtaagcttgtaatggtatgtactgtataaaaacgtgatcagtggctttggttataactccaatttcctcatgtcattgattggttctgataacttggcatttcggttaaatttcttgatcagggtttccctactgatctgagattttctgctagcatcgactcatataatcatatctctgctgtggttgagctcaataatgttgaaatgctagtcgaccttaagcgatgtcctggtcagcttaaacccttctcacccaaggcagtttatatggctcatatctcaatggcatggcagcctgattttgtagacaataacccttgtgcttcaccattggagccaaacagtcccatggaacggtctggtccaccatctgcattacaatccggtttaaggtgataagcatacttgtttagttttcttgattatgtttgtatatttgctaccatatatatcttatgtttctctatagggcaagcaaaagcgttatgcacgtataaaagtaacttttgttgtttcctcagtcgttcactaggcgagccaaacatagctactgaagttttgcggagaaaggtcatcaaggaaccgccacctgctgatttcaggttaaattgttagtcaatatatatttcctttcaacagtggtgtagttttgataaactttttcaatgctaagtagttgtatatagattccatgctacttctctcttaaaacttgggtgtcgtcatgttccctcaaattctgtcaattatctttattgataaaaggtgaaatatggtaaccattaaagtccattctagtcaactacaatgcaagagctatgagttacgttgtgagagtattgggcttaactatcagatgaggtgaattcaatatgtactgcaattgatgagtttgcttcaaaagcatatatgatttttgtagctgcaaaagttcatggcattttcttagtcattattgtctggcttacaagaacgttttggctgaaaaaaatggttgtaatgcataaagaaggctgatgttttcattttttaatgtgcagtggtaactcaggagcagcggaatcggaaagtaagagaacaaatggaaggtgtatgaatactcctgatctaaacaatgacattgccaggcaagtgtttgttttataagacaaaaaaacatgtgttcacagtcatccttatgttaccaaatgaggttgctgtcatttcgttttttattgtgaacattggcctacataactggcggtacaatctcttatggaaattatataaaaatttgacaataggcaaagatcttgcgttattatctttcataaatcttgagcaccacataatataactaaactagcatttgcttgcatcatgtacagacttccacatatggtagtgagagtttgtagcatttgtatcggctgttgttgtcactaatatttgaatggttttatcaattatcttttgtttaaagtaaacttaacaatctgtttcagggcaacaatgatgcagagtgacctcttgaaagagcgaggtgttgatgattcatctccttactctccagatgaaaagaatgtatgtaacagttttcctgaattctcatattgatatataaaggcgtcttgatatatgcgtcattgaaatacttatggtatgtttggcagctatgcgaactacagaacactttctgtatcttttctcttcgcctaagttgaaatgacagttcatgaaattagaaagaggaattttagggaaagtgctggtgttgtgattctttgtttgagaaaacaaaagcagaacatccatttcctgtttcaataagtcgcaataaaaaatggaaaattgttctatgctgttataagaaaatatttgtgagaagagtatggatatctcagaattttttactaaatttccttataagggcttatttctgcttctaggtctctggtttccagcttgattcccatgacctagtgtctggtgaatgttcgacagtatatccgcggaagtcaatatcattgccgtcatctccgcgaagctatcaaattcaattatctgaaagaagtgaacattcacctcaagaaataagccacatttggaatgaagtgctggagtctccaatgttccagaataaacctttgttaccatttgaagaatggaacatagatttctccaagttgaaagttggggcttctgttgggagtggtaagaataagaatcgtttttatatcaagacgtgtggagtgttttcgaattccatctatctgttgtgttaggcatatatcttcagcaagaaaacttggatatggtctgtgagcataagtatacattttcctttgaaaccctattaactcttttttgttgttatatgtcattcaggaacttctggagtagtatgtcgtggcgtctggaataaaactgaagttgcgatcaagatatttcttggacaacagcttacagctgagaacatgaaagttttctgcaatgagatatctattcttaggtatgtgtcctttaattttttctgtgcctttgcaacttatcttctcacctttcttcctgtcttctcttctgtgcagccgtcttcaacatcccaatggtaaacatcatctatttctttttttgctttgattacttgtccaacgatcctcaagcggtcaatttgtaagattttaaaaccatttttcaagtaacgaggcatgtcatgacatcttgtagttattctgctccttggagcatgcacaaagcctcctcagttatcactggtcacagagtatatgagtacggggtccttgtatgatgtgatccgtaccagaaaaaaggagttgagctggcaaaggaaactaaagattctggctgaaatttgcaggtgtttcatttctacactaaatactttccgttaatattttcgccacatttagagctttctagagacactccatagatttgatcaccaagttctcataaggatcaagattcacaccgtctccttttaacataacaaaacttagaaatagtgccaggaagctctcataatcatttgtatttttttgtttcacaggggtttgatgtacatacacaagatggggatagtccaccgtgatctaaccagtgcgaactgcctgttaaacaagtcgatagtcaagatctgtgattttgggctctcgagaaggatgacaggtacggcagtgaaagatactgaagctgcaggaactcctgagtggatggctcctgaacttatccgcaatgaacccgtcacagaaaaaagcgacatctttagctttggtgttataatgtgggaacttagcactctatccaagccctggaaaggagtcccaaaagaaaaagtatgttcgttgaacatgaaaaacacttggtaactaaataaaaacatcgaatctaaacccggctcttggtatttttgctttcaggtcattcatatcgttgcaaacgaaggagcccggctcaaaatacctgaaggaccactacagaagcttattgcaggtttgtgactcctcgaaacctaactgttgcttcttttggaacccttgctatattttagtaaacagatgcttatggaaactttgtcttgttatagattgttggtcggaaccagagcaaaggccgagctgtaaagagatactgcaccgtcttaagacctgcgagattccgatttgctgattctgtgagttgtttgttctttctgtgtgtaatatgttgaggcattagttgtgagaaactcattgagtttgtactccagatctctccggcttcttcatttgagttttatcatttataaaaatggattattgttttatgatatcattaatcatcgcaaattatagtctttgtcctttcctcttacaaacatatacaaaacactcttgaccatacaaataaaatggaccagtttctgaagtcaatacagatataatagtgtaggtaactcactcttcaagtttcagtcaatgatgttgcggctgttcaattggtcctcgaatcggctacacgaaccaactctcatctctgtgctcatatcgttctccggcgccggataatagtctgctctaagctgtacatcccttaagtttgggattctcaacaaaaagttcatgaaatgctcatgagctgttccatggatgaacagcttcctcaaagtcaggcactcttgtaacagacctgctccaggaagcgagagactcctctggttaacatctctatcctgtggtggccaataatcaagctcgctcaagctcaagcttccaattccggtcaagaagaatctttcccataaactcaaatccatctgcattggcggtgcggtcagtgcgaaaccgattgtgtccccgcaatctaactgcatctttgagagctttgggtagagagcgagacaacttaacccaaactctggctcggctggcctgcgtttacctctgcaatctccttctatcttgatcctaatctcttccaaattcggacagtcatctagtcctgtcataggtaatggcgtcaaaaattctccaacattgatccataaagatagatactccagtttctcccatactctatcttcagaacagaatccattcacatcactagttgagcagtgttcttcctcgaatgaatacttgcacctcttctggctcctctcgtaaccatcatcctcctcttcgtggtcagcctcactagtttccactcttccttctacctcctcgtcctctgaaccagaccacacacagtctatatgcagtctcttgatccgatcacaaatcggctcaattgcctttaaagaagcagctgtgtcaagattcttgcagcaagagattctcacatcagtcaaagtcttactccgaagactaaccattgttcttagtccatccactgttacattctcacacccttgaatctcaaacgtagtcaacttacaacatcctctccctatagccaccaaacccatatcagtcaaatcgccggaattcttaatcgacaacgactgcaatcctccacataaagccacaccgtcgagcctcctccattctgtagcagagcaaacaccttggaactgtcctagcttcaatactcttaacttcttgcatttagaattcaatgcctctaaagctacaccactatgcttcacatcctttcctacgtcaagaaccagctcctctagattcggtaaacctgagaaaacttcaattagcgtccccgccgtgacagctgaatctccagcttccgtacctggaatagctctaggattcgccaacgaagctgtgtccaccatgtgtagaagcgttaacttaggggaactggtagctacggcggagagagtctcgtctccgacgaattcaaagtatctcggatcaaacgtacaagctacacgaaaagtcttcaaattagggcaagatttggtgatactaacgatttcgcttgatttgtatccctcggtgaacgacgccgtcaagagatctaaccgtgtaagcctcgccgccacgtcagcatagcggagaagcacaggaggtaagtcttcagtccagtgatagaagttggagagatctaaagactcaaggaaaccaccacagtgttcaaaaataggaacaaaatcgccaccggtagggatctgagaagctcgttgatgccatcggaggagcttgatgtggcgaattctcggccattgaggaagtagaagctcgagagagctcggagatcgtgtgtagacgtttagagactcgacgaaagggaaacagaatttgagacggagagcgagaaggttctggtgatcgattgggagagaagcgagaagagtgtgaccccatggggagaggaaagagagatcgagatgtgagattgatcggaaacagtcggggacgagggagagatcacgagcgttgccacggatagtgaggtgagagcgagtggatcgttcgagagcgaggaatttgtgagagacgagggagagagagttgcgagctcgggaatcggatacgagagaggaaatggtggataagatgacgtcagggaggtcggagagagtagtggaagccatgagaagcggcaaatctacaagagaggagattttagaagaagaaagagggaagaaggaagaagaagagatttgtgttgggcagagagagagccacgtgatgatactgacattcttcttctctcttcttttatgttttttttctttttaatatagatagtactataattctttccttttttgaggtaatttgattgaaaaatcatatgtatttaaatgattaaatctaaattatctttgaggttaattatataagaacatacgatgtcaaaaaaaaaaaaaaaaaaaatagaacatacattctttaattaagcctacaaaatattcatcctcaaattgtactttataaatccttactttatcaaaatactcataaccaatagataatgggattgtgttgtcattggtcaaaaagattgttatgcgtacttatacgatgatatactattttggagaaaccaaaatcatagttgcatacccttttttctctatgaatgtaaatatcattatatcactaatcaaaatgaaaggtttaggatatacgaagttgcatgcttgcatgtaatgtcctgactatttcatttcgttcgtgtgttctcatcagcttttagttgtaatctatgcatgtactttggtatgataaagagagatttacacattaaccgactcaaaagatttcgaaactttgatcttcgaatttggtaattacgggtacatgtatgctttactgtacatgcagtatgtgtcatagttacttaagctcctttcaaatgttttacaaaaaataccttatctttaaaaaaattgtatgagataatagatttgaatcatcgccattgtcacaagttgaccaatacttcatttggtagaggcacagcaaattttgtttgtgagatcattcgtattattatggaatcgccgtaacttgacaattgttcttaatcattaaacaaatatacatatttgatattatataatcaaattgcaagagtcaaaatcaacctatccctctctctcccttatgttcccacttgaattgcatatttttcctgtaaagaacaatccacctttttcccgtgcatgcatctaacatttgtttatgtccctcaagaataataccaaccttctttgttgatagacatgagctttaataggaaaataactaaaactaaacacaactattttgcaagatttagaattcaataaccttaaaatattaagaaaacccccaatattaagttactgactgcaacaagagatgaagtcggaataaaacagcatcaaaaacactgatttgtgtcatgtacagaaatgtatttaaactgcagataattttactataagatcaggatctagataaatcccaaacccataacatatatgtaagaatatcgagtcttttccaaattcataattggaatcacgtaagaatgcatgcaacaactaaaagataagctgaacttcatttccattttaagagaaatatagatccaatacagtgaatcgattcagttcaaagagtatttaattagatacgtttcccgcttaataagcggcgctcagtcatgttacaaattaaataaaatataggttttgattatttctccaacgtaaatacaatttatattttcaaaatagtgtttaacttttaaaaagcttaatggataactcagtgagcataatcacgaaagcaatagtgagaaatttgcaactaaattttatttttcgtttttctctttttccttacaaagtgagaaatttaagatttgtagggcatgcattatctcttgcctactcatcttgccggtcacaaaaacacatacacgcatacatatacatgtgattacacatgcgtcaacatataaacgcgactatgtactaaatatattcaaatccactgacctataccatgtttttgtgcccatgcttatagactggctgaattaacttgggcatatatttggttaatgtaatacaatattatcttatcaaagtgaatataattcaatgaaccatgtatacaattcaaccgtttcaaactatttagaggtcatgtcaaatgcattaaaatattttctaaaaattttacagattaatttctagttgatataaatattcaaaaacatccataaagaatgattttaaattattagaaaaaaggaataagttgtacaatttgtacttgctaaactaaaagacgtctcatggtcctggatcaaaggcacttagttgtgagtagggaattgtgaaggaagatgtcttgagtgacacttgcaccatcgagaaaccatgaactataagcacttgtagttgagtaatttttttcttcacagaaaaggtaattgactttatcagaattcatgcttggttagataaatccctagaatgatcattataataatatgtaattatttatatagcatactttaagttaccttttacttagcacgcatgaaatcatgaaatggaaaacgtgaaacaatggatggtaaaataaatccatcagaaattttgactttttagacgagcagaaaaaccacatacgaagacacggtcccttaaaaaatagtttgtggagaaagagatcacacgttgaagcatgatgagggggtactaatcctatatataatgtatggataagtgactacattatatatatattatcagattataaagtaagaatgtcttatttttgctcaccttttcttttagactttggacatcaaacgcacttcatagctcataatacccacatattatataactgacggacatcaaaacacataacgaatcaacttagatctccaaaagttcaaatattctttcatctcacgtacaaaaacattttaaaattgagtttttgatcgttcttgctactcaagaatcataatattactatttcgttagaacttgatttttttattttttttgttggacaacaacaattagaacttgaatggttttatgaagaaattacaaccaaaacaatgaaactaaaattggaactcctctataacccaaaagaaaaggaaaaaaaaatctaattcgattgggtgtagtaaggtggatcttgaacaagtgggctccaaaaagatttaacttcttaaatcttacatgtcattcaatttttcatatgttatggccactaaaatttcttgaatccgatcttcacttctgttgaaatattagagcacttccatggcacattatggagagtgtctttcataaatattaaaaaaatttgaagttataaaatactaataataaaatgtgatgggtctttaaatttgagacacactctcaaaaatgtctctaacaagacatttaccataaaatgtctttagtttaaagatactcaaacattaaagtaatatattttctttacatatattatattatagttatagaaagaccctctcattgatgtgcaatggagttgctcttatgtgctagctagtgttacttttctcaaactgatgatatgttattaaaatcgtcctaacctaaaaagttatacgcaaacgatacaaaaaggaaaaaaaatcgtataaaattaatttgtagttgtgaaaaaatagaccaattactggaagctttggtgggcctgggcccgggttttgaatttaatgaccgaaagaaaattagttataagagtaatgagaatggccaaaaaagaagtggtgggaaaagagagtgacgtggaagtagataagtggtgacgtgaagtaaatgtttgtgttccgtaacttaaaaatctaatccttcaaagtacaccatgctgtctcactctcacgacgttgccttgcttgtcgtttttctcttttttttctttcaaagattgatgacgtggacgtctagtaacaaagcagtttctagaattccacgtgtcacatgtgggttcgacatctcgggtttatcatttaatgtctttcgtccgatctccacgttcgttccaacggttttgtgtaacgacgatgttgtggttgaaattttcaatgtgtaattatgtttttgaaatcgagatcagatttaattcttgagctgataattttttagtttagtttgatagatatagtttattccggatagtttatagattttattttgggtacagcaaaattggtggatgttttgatttgtcagaagcaacataccatttgaaggaacaattactttttaagaattagatataataaatcgtagctcactaggttaggtaatgacatgatagttgttgacttgtgataaggagctgagaagagagaactgggaaacagtcgagaggctatgggcctagcatattgggttatgttactacaaaattgggcttatttaagttatcttatgtggcccatttagattatatgtcaacaaaatttattaaaatttgcttttcgagctttttgttgttctttctacaaactgtacagagggagtaattgttattgggaaaggagcaaaagattaaacacagcatagaacatatgcatgtttagaaaagagatagttgagactttaaataggagtcacaagtgtcggtgacgtgcgatggagaaagaggcgagaaaacaagtggacaatacgtttctctattggtgtgaagagattgagctcgaagaggggtcctacacgtactcagatgatacgagtgatttcttcaatgagcgaagccagaggccgcgattttaggtttggagacgaacattcctttgcttccatatgaaataaagtgatcgaggtttgtgcttatactagtctcacgatgagagttgtgttgctttaagatgaaggagaccgaagctattgaaggaatccgacgaagcttgttgatgatagcggagatgaagacatacattatttttagagaagaggagtttaaaacaaaaatgtaacataaaactataatcaatattttacatgaaattgtaaatgtaaaaaaaaatgaggttagttaacgggcgacacacaaaaggccaaagccatgttaaaatctagttaattaggcatgaagaattgaaaaatatgctcaattatcatttctatacgggaacatacaaatcattatttttgtggagtatcattgctcttgttattcaacttacaagattctcaaagtgttattcaaaattcatgaagaccatactttccttagagagaagatgaaaactgttactcttacaaaataatctcttcactattgttgagactcagactcataactttgatctattagaaaaacataaattaatacaccagctgagctataggtatatcatcgctggatttacacaatatgcttgataattagaaaacaataaagccaattccgatgaagacaaatatgaacttgccctaccaagattgttttgtaaacgacttttcctatcatattataacaccatgtactcgtcgttttgggggaaaattaataaaatgtaatggtatttctgtttaactagatttattttcctccaacttgtttttgtctttttcatctagacttaacatttacaaacattgttttttacaagtttaaatttcaaggttttctcttatttgttgggaacatcagtcaggaaacaactttttatactattttcaaacagattgttttgaagctaatccattgatcactttcttctctaagttataattacgtcgatccatcaattttagaatactccaaaaacaaaaattataattggtcatcggactctgctattccaccatatatagtccattgtaattttcatttaaatccaatatgttggacttatataagacatagaagtacgctgatccacataagaagtacaaaacacacctgaattcaatatataaactctttacacttactttattcaaaagaaaagtgcttaataagagaataaatatgaatagagcttaataagagaatagatgaagatatttatgacgacggagatctgcggaaatgaagaggaggggacgaagagctgcaaaaatggtcccgaaagatatgttgaagataccagtagatagatttgaggtctcttttacatttgatccctctttgagacttactgatcctgccaagttctattgtatcaagattagttcactaattcattgccagaaatacatgtaatatgcgcttacctagattcacagatgcaaataggataacgtatataaattcaagtttaagccataactatgcgagatgcatgcatgcatgtccgagagacttaattttaacccatacttctatggaattcatcaaaaatatattcttaaattatgtttcttgtggcatatgtcacatttgtataatcgaacaaaatctacaaagctatgcgggggacaaaaccaactttcaagcttttccaaagttagtggtgacaaagatcctaaaggagacgcataaagatgatttgagcaaattatatataaacttaagactgaaattataattgagatcaaagaaaataaaaatgatttaattagttgaattcaaagagacaaacttaatttccacaaaatctaattgtataatctcagaaaatgccaatgcataactattcccaatgatcatgcagtaaacagcctttataaaagctaaaattacatgtcacaatccaagctctaaaatctgagatcctaattaatatgattgtatatgataaagatttggttgaattgttcatattgagatcattctactaagacccacattgcaatagtttaaaaagtatgaattaaaaacgttaaagtattatgtgtgaggtaatttctattctgagataaccttcttagcctttgataacaatcatggaatctcaatatttctttaggttataaaaatgggggtaaaaggttcaatcaactcctcccttgatcaccaatggggaacaaaatctacaaaaatctttaaagagaagccttccaagagccaatcattacttcattgaactacgtactatttatataaataacagtggtacaatgtgtacacacggcccatatataccaatattcaactatacatacatggttgataaagaaaggattcaacttttgagaatcaaatgtacgttttccaaatcttgaatgagttgttcactaggataaacttgaatagtctataatttcacatatacatagcttagaaagtctgatgcattttcaaattaaggttttgaataaatctgtttttagtttactttaatgttagagatttaatgaatcatctattcaagaattgattttacatgctagaaactagaaaacacatcttcctttatattatttcaaaactaaaatcaacttgcattcgaagagctaaaatgatttaaaagaaatcattccaaaacacatctacttccactgaaacctaagatctaatcacaaaccggtcccttaattccgaacccaatatcaagaaaaaaatttagctgatcattcacagaaatcaaaagcctaattgtatctccaattagggtttttgatacatagtataatatatattatatcaatcaaaatctatatgttatatataaatgatgcagatatgcttgctttatatgtaaattatgcaaagtcacatattggaaacatatattaccacaaagtctttcacgacgatggagaatctcttaagagaagctgaaggaagaggaggaggaagaagagtcctctctcccacctcccatctccggcgttggcttcttcttcttcttcttcttgtaaggaatccctctagccttagcctgacactccctaacctccctcagataaacccttatcgctccgctagcgaaagggttagtctccggaggtccaccgttctcctcgtaagccgctctcagccgtccgatcaaagcgtcaagacttccccaagcttgtctgagagggcacgtgcaaggagctggtggctcaggctggccgtagaacatacagccaggcacgtgcacctttgtcttaccgaactggtctaagtacctgaggaaatcaagcacgtggttacagctgcagtgagacatcggcacaggcggtctctgattcttcaagtactgtccgaaagtgttccagtcacgtctcttctgcgactcgtaacggcttggtgtcaccggtggctctgatcctgatgattccatcaaactctttcctctttctcttggagaggacatgatatgatctcttgttgagtgtaagagagatgttggtgaagaaggttaagggatcaatttgttttatggatctgaagaattatgtaataagaaagaaagatgaaaggttgagtgagtttgatgagagggtgaaagtaatagtagcagatgatgttgacgttagagaggacatgttatgggccctttcaaaattttgttttctttcttcctctctctctcttaactaattacgtatcagtatttattaatcaaattcattggctaaaaagatttacatagtttttgttgaaagatcaccaagtttgagttctccaccacgatttcaaaattggatactgtatatgtctttataatggttagaagattcaatgcttacatcgatttcagagagtcagagactatttggacttcagctcaagatcatatatagttttctaaagggattttatacttgggaaatgtgttagttagctcattgtgggttgtatgataacattttctattgattaaaaaactacaaacaatactcttcttgttggacgaagcaatatttacacacacacatatatataaggatgtgaaaaaacgttgtggatttgtctacgagggtttaacacgccgtaggatgaaaaacggccaggttgaaaatacagattggtttgtcagcgaatcagattagagtggatcacttttagactatattttaataaatattaatgatatacaaataatactagaatcgttgataccaatttctatgttgacacgcctagctacttatagtccatccaattttccggacaggcggaatatattcggcgtaccaattataacagtttgatatatgatcgttttcatttctcgtattttacgatatcaacgaaaaggaaaaatgatagttcttttcagtatagatgagttgttcatatcattgatatatcaatttgtttttttctttctataaacagatttgcaactttaatttcaatcaatttttgttgatatagagtgatgctgtttatctaaaattcgttgtagggttcacttcttgtccccatcagatttcaattgttttttaactctagatttttgtttcgtaaatatggatgctttgcatttttcatgtacttgataacttcaaatacattatagattttgttggttgttttgtgtcatctataatttatatacgcatacattttcgaaattcatatcaattatgatacaatgcaaaccagtatattacatgtttccatccgttataattgactaatgataaaatttatttatttgaaacaataaatgaattgcaagttaagataaaaaaatctccaaatatatatttggtaattcaaatagtttattactacttgtacgagtgaaatttcttacgaaacatttcattttatcaaatggaaggagttcagcgacactaaaaaggaaggcgttaagtaccagtcaaaatcattgtcaatttttcattaaatgcttcaacaaattctaattagggatcttgtttttttctccgaaatacattgcacatgatgtttttataaaatctaattaaagcctaatttaacgatagatttagtcctttctttttttccttttttcaatgaaatgcaatataataatattataatgaaaataataattgagcgagatgcaaagtagagtgagcatctatgtccctgattggttcatgaaaactaggtaataggttatgactcactaaccactatatattctacctatgttacatatggtttcttttatcatgttccatcagaattaatcgcttatctttaataggatacttacatatatgtcgctatacatatcaacattcagaatttaataatatagtataattgaactagaataaatcataccatattttgatttggtttaatatggttgaacccattccaattcggagtaacttgcatcttgaaaatttgtcttttttgtaatttctttttgatgggaaagatggttttgaaattctaagttgtaatgatttggaagtaagaaaacctgatatttacgtcatgttgaggagaagaaagtaacacctgttaatttatatttcaacatattattaatttacataatagccaaaagaactcgtttgaatatggaaatatatcatgtaaagcatagaaagttagtaatagatgatgatcgtcattttatggccgtttctaaccaaattgcttccgtgtattcgatcccttgcaatttaagatggatttgtcaccgttatagctatgaaaaattgcaaacagtagcatatatgaaatgttagcacataatgaatttaggctataattctcattggtttgttgacgacgtctagcgacagtgaagtcatattttcttaaggtatatagagtcagcttgaccaaaaaaaaaaaagagagtatgtagtcaaagcaatttaagatttcatcaaaaattctttaattcatgtcttgttctttaactttagagaactagaggaaactaaaaatggttaactaccatgtgaactactgaagttgaagagaaacgagaaaagaacaaaagagagggcatgtgatgtgttacgacacgtgcgtaggcatattattttccaacctgtcaaatttgactgtttaggatatgatatttaatattttttttcccttttgccattatttttctataactttttaaatgtttacaaagttgtctctatatacttaggttttattcgtttgaatatgaatggcattcttaaagtttatgaacccacacgattaataatgcgttggttttatatggctattattatcacattacgaaaaaacgcttgaacacatcatttattcaacatcacttgtgtaaaggatttaaaattgaaaaatgaaaaggatattaacaacagttacttagagttaacgtaagtttttttttttcttttttttggcaaacgacttaacgtaatttttttaatcactgaaaactgacttaaacgatatacacaattgacgctacatgatgtattttttttagtgatatcgatcacaatgaatgcagaagtattattcaaaacaaaaaataactaagttcatggtgataataacgtcacagaaaataaactataattttttctttaaatatgctataatttttaaaacattttatttaaatatttaatgtattaaattattaaaaatacaagtttcacgaaatgttcaattatttcagtttatcatgaaacggtctcattatgaatttaaattgttttttgtgcgtgtggaagatttaatttgttatcaaatttcttgtttatgtacatgtatgtattcttttaatatgagattatatataatgtatgatatgatttgttcagtatataaaacaacgaaactgcttcggtgatttttcttacttcttaaagaaagaaaagcggtgtcggtgtctttgttcattacaagagagataacaaagaatgtaaaagtgtccagaactaattccggtccaaattacgagtttacacacaaataaactacctaaaataaaccatacaaattttgttttttgttaaaatcgtttgtgctgttgttgcattgagataagttttttttcctaagaacttgttgtgagtgtaggtgacatatatcgaaagtttctcaaatggagacgaaccgttcagaggatgttcaacttctgcttgtactataggtttcaactcttcattctttagggttcgctttcgatcacgaatagaaatcgagtacgtaccccaaatcgcttcaactacctcgtcattattgcaagcagttggtacggccttcaattctcttcaacctgctaattaagttctcatggaaatggaataacacctggtttaactctattattggttcaattctgtttccttaatctccaacgttagcatgttttgggctttaataaaaacatatttaaggctcaccctctataacatgcaattaaacagtaaacagaaatgggtgtatagtttaccaaagaaacaacaataactatatatatatgggtatatatcctaaaaattaacttgggaaatatatatgtatgtatatatgcaggtgtaacatactagaaatgggtcaaagatgcaaggcctgccagatttttttgttgtggatctaacttcacagtttttaaagtagatcatgtaaaggtatatatactgtgcatctatagtagttatacacacatacacatattgattactgtttaaagattctattacctttttcaaaaaaaatctgtaagaaattaagtgggcatcgacattgtcagacgttatctagggttttatcacttttaattaaataaaaattggttgtatcaagtggcagtgtacggttcgtttagaggttgctttaaacgtctggttcgtctttatcttacaccttgttaggattaagaatctttatacatgcatggccactattaccatttgtacggtgtgtttatctttggactatagagatgagaatgatgtttcttgtaaactcacataaggttttggactcgttagaactcattatccccaattgcatcttattttatgtgcagtacatagcgaaggttaaaatctcaaaagaacgaaataaaacgaatgtctaagttacttaattttatcttagttttcgaactcatctctcatggtgtgtgatgtatcatgtatgattgatagagcgctactaacatgttgtaatagggtctgtaataggtctggtactaatgtatctgaaaaatcacatataaagtgattagccatatgttctagtcagtactgtctcaaattttgtcttcgatcaataggacaacctatcttaccatatgtggagcaccacttggttggaaagttacgttggtacccgcaaaaaaagaaaaaaagaaaagaaaagaaccctagaaatagatatgatacatatctaaaatcatgttgaatgaagaaacaatgggcaagaaacatcttcacgcatgagttgccaaaaatgtcacagtctcaaaggcactcttatgcattagtcttttgcccccacaaatcttttctttgcttctctttttgttgatagtgattcatctgtcttcccacccaccctcatttttcttcattattgtttctttccctttttgtcaattcatcattttaaccggactcaatctaatttggttttagattcggttatgaagtcatgaaccggttttataacagtttaatttgcgtcggtcgattgagacaacgataacaaataattgaatttcaacagattataaagcattgcatcggtctgtatacagtacatataaaatggggattgctaaggtaatggaaaaaaataaaataatcaataataattaaattgtgacctaaaactttctttattcgagtagatatatcgacaagtctgacaaagattaaaatactaaagatttggaagaagattcggaaaggaaaaaaagtattcatgtattttctttatttatcgtaccattcactaactttacaattttcttacaagttctgaacaatctatctttttgacacataagtcataacataactattcacaagtgaattcgtttcaatgaattcaaaaatggttgctgattatatatacatgaaaaactttgacaatttaaaagtacaattaggaatatgatggtagttttattataccttttgagaacttggctggactttttcatccctatatatatacttcgttgagttaaattttaccggataaactgtcgcgaattctgtaaaagattgaatatgttttcatattttgccggatttttttatttgagaagtttcaaaaaatgattattggtgtatagtggaatttgatggtgaagtaaacgactgtcgatcattaacaatttttggtatatggcgtacacagtacatactgaaactgatggattgtaacaaaactaaaagaatttaaaactgatgtcaatatcttatctgccatattcggaccttacttacatccgatcccactgatttactaacccaaatcagattttgatattgggctgtgattgcgtcacatttatatgggctaatatgatatgagcccaggactatctcgctcaggatttattgtgtttgacttttcaagttctcgtattcgacccccttcccccaccttaaaacgctccgtttcactttcagtttcattttctatgactatttatttattgaaatatattatgatctctgcatagacatatatagacctcgacgtatctctctctctctctcggtaacttggaccactcgaaattgagttttgaagcacggataacgtttggtttgaccttttgggtttgtcataggtcgttttatttggtcggtacactcgtaatctctaaacaaaaatatatcactttagtcacacctttttatttggggtcattgtgcatgtgtgtaataataagtgaatactgaatcatcattctagtctctaatacatcatatacaactacataatagttaactaaatgctaactcgtgtgcgtaaattactgtattactatagtgttactgttatgcatttttgtctgagacgatgcaaatcttgatcatatactatatacagggtaattttagcatgcacaagtttatatttgcatataaatatccgaagaatatccgtagaacagttagaatatattcccactagccaccactatctcaaatttcattttcagatctaaagttatgcttttattgtttcttttctatataactcaatcatataccattaatatcaaacatcacccatcacataagttacgaatgtccatttccgcaccggacttaacttgtttggagaaaatgtaatatcactcatggcaataatcaaccatgtatgcacattgattaaaatgtgttttcccgatggagagcaaatatatcttattcgagtgatcaagttcataaagagctcgaattagttatgcttttattcaaagtagagcaatttcataaaactataatatatcttaactgtaataacagatcagctggctaaatactatgatgctactactgaagatgagattgcaaaacataaaacttgtggcttgatgagttcatatagaagatataataattatgcaaaccaaaatatgtatacgtacgaatcttcttttaccatacggatcgtcgtcggatactgcttgtctttttctctgtttttttctcctaaatatcacatatatattcaatgtgagaaagtatgagaaacaggacaaaatatagatattggttcgtaaagtttttagtggctagagttaaataaggaattaaatgagagcaaatctctttgatatacacctcatatcaatgaaaaaacttaatattggtgtatttgtttctttcgtccgactcttgaagaattaaaaggttatatacaaaaaaaaatttgccctttcacattttctaaagatcatatcatctttgatataatcgtttgatgcatgtttactcattcataaacattttataaaatcttctatattattttgattcgaaatttcacactcaaaacataaaatttccaaggataaccaatgaaatgaatacacaagatataatataagttatcaccataaattacataatcagtatagataaagaaaatgttctgaataccaatttagtttataaatttatttttttcgtttatgatttatcaatggttcagttgagtggtttttaattaaaaaaataatattttgttcaacaaaaattcagaacgatggttggaaaaaataaattaaaacaatgcgtatattggattaaaaataaatcatattatatgattctatttgtccgggatttataaattgatatgatacgataaggtcagtgataaaataaattgataagataaggactttatatgattctatttccacccgttggaatctttggttggctatttattcttagattcgagaatcaattagcgaaaacaaatactagtttaaaaaagaaaaaaactatatgataagagaccgtaatagacgtggtacgttttaagtcaaaggtcaaaaagccgaattatatatttctggctccttccacaacttttggaaaatttccttcgtagttttcacttgaacccattttttaacaacaattcttctacttggattgataattcaaaaggaaactaactctcccatagttaaaactgaatcactgttaaaaaaaaaaaaaagtaaagtaaatatactaaatcaatgtttttttctctggaagtaaatatacaagtttaaaattaaaggagaagagaagctatatattgctttgcctcaccatttaggagataattcatatgaagcaaagaaagcatatcctttggcatattcgataatatatggcatctaatcatctgtataagcttttcatatttttgttagatgctttttcgtacaaatgcattaagataaaattaaacaaaaaaacaagatatgatattcagtttcgtgaaatattaaaagaagtcaaaaaaagggaaaaatgaaaagtcgaattggtggacagtggactcattggtccacttaaaagtcatcagaaccgtacacatgcaagcttggtccattttcgtatgacgacgtacaagttacaacattcaaaaaacttcctaatttacaagtttttgcttatgtttatgggaaatatttttctgcaacgaaaaatcattaagactatatttttctgttggcaaagacttgactcagtccctttttactgcccattagtaatctttggagtgaaaatacgaatttaactaattttctaaaatttgattaaagtctaagagagaaaaaaagatttcggctataaataagttacaactacacatcgaatggactagaaaattttcgcttcttatatttttttaaaaagaaaaaccaaaaaatcctttgaaacttttttagcctgtcgcttctctttccatcgtcttcctcgtgaacgaaacttctcgatcttcttttcttttttttcacctgtttttcggtatcacgagaatactacacttcccactccagtaatacgccactccttctttttttttttgtctcgtttaaatttttataaactccataattttatcttaaagtgaatcttttttgttttttttgttccagctttatcggatatatttccttgattttctccgattgtggtcaatctggaaaattattgagaatctctccctcacttaaccaaaagcgtttttaatcagatagagagagaggaaaaagcatcaaccaaaccatggctgcgagaaatttggagaagatggcttctattgatgctcagctcaggcttcttgctcctggcaaggtttctgaagacgacaagcttatcgagtacgatgctctgttactggatcgatttctcgatattcttcaggatttgcatggcgaggatgtcagagaattcgtatgttttcctccttttctcactctttcttctttcttaaatactggatttttgctaaaattttgaacttttagttacatagtgggttacccatcagtgaatcatcatgtgggtttgttgtttctgcttagattatccataaagttgaatccttttcagtgatatcgagcagatcagatcacactgtgttaagattgttcatgttattctctgtttttgttgggtttgtgagtatatttgtttgcttcagtggctcattgagtttgcatctgtgattgtttctgatgattttcagtttactgaatcatataatgtcttttgttttgtctaaaaggttcaagaatgctacgaagttgcagctgattacgatggaaaccgcaacactgagaagcttgaggagcttggaaatatgctgacgagtttggatccaggggattcaattgttgtcactaaatcattctccaacatgcttagcttggctaatctggctgaggaagtccagattgcttaccggcgtaggattaagaaactcaagaaaggtgatttcgctgatgaggcctctgcaacaacggaatctgacattgaagagactctcaagaggcttttgcagcttaacaagactcctgaagaggtctttgatgctcttaagaatcagactgttgacttggttttaactgctcatcccactcaatctgttcgtcggtctttgctccaaaagtttggaaggtttgtttaacttttttagtgtcttgacattttggattccttgtgtgtgtgacttgactgatgtatttttttgtctcaaatgttttcaggattcgtgattgtttgacgcagttatatgcaaaggacattactcctgatgacaaacaagaactcgatgaagctctgcaacgagaggtaagcgaaactaaagaactcaataaagcttcttttgcatgaattctactaaaactctgtttttgttgcaccagattcaagctgcttttcgcacagatgaaatccgaagaactcctcctacaccgcaagatgaaatgagagcagggatgagctacttccatgagacaatctggaaaggagttccaaagttcttaagacgtgttgacacagctttaaagaacattggaatcaacgagcgtgttccttacaatgcgcctctcattcagttctcttcttggatgggcggagaccgtgatggtacactcttgcttctttcttatctcaaaccattaaaacatgaattggttcttatgagtgaaaacattttctgaatctaggaaacccgcgagtaactcctgaagttacaagagatgtatgcttattagctagaatgatggctgctaatctctacttctcccagatagaagatcttatgtttgaggtagcaaaaattttattcacatcacagcaatttagtttattggttaatgttaaggacagagatcttattttttttggtttgatgtgtttgtttgcagatgtctatgtggcgttgcaatgaggaacttcgggttcgtgcagaacgtcaaagatgtgcgaagagggatgcaaaacactatataggtgtgtgttacattcttgacatttttttatgtgtccgacatgttaacagtttgttatattatgtttgatgtatgatcgatttttggatggatgtagaattctggaaacaaatccctgcgaatgagccataccgagctattcttggagatgtgagggacaagctgtacaacacacgtgagcgtgcacgtcagttattgtcaagcggagtttcggacgttcccgaagacgcggttttcacaagtgtggatcaggtgtgttttcgtgctgtttgcagatcaactagagatgtttaagccatataactgcaacttcaattcctttgaaaattagaatcgtatttgattaaacatggaagctataccatactgatgcatagtttatttggtaactatttttctaaatttgaaaatcccaaaccaaaagagaaccaaaatatggattgaaccactctaagatcaaagctgttgtttgtttcttgtttgattgattttataattttctaacctttgattgtttctgtttctatccaaagtttttggagccacttgagctttgttacaggtcgctctgtgattgcggtgacagacctattgctgatggaagcctgcttgatttcttacgccaagtgtcaacatttggccttgctcttgtgaaacttgatatccgtcaagaatctgaaagacactctgatgtcttggatgccatcacgacgcacttaggtattggttcttacaaagaatggtcggaggataaaagacaggaatggctgttatctgagctaagcgggaaacgccctctctttggaccggatcttcccaaaaccgaagaggttgcagatgtgttggacactttcaaagtcatttctgagcttccttcggatagttttggtgcttatattatctcaatggccactgctccatcagacgtgctcgctgttgagcttttgcaacgcgaatgcgggatcactgatcctctgagagttgtcccgttgttcgagaagctagcggatttagaatccgcacctgctgcagttgcccgtctcttctccatagaatggtacagaaacaggatcaatggaaagcaagaagtcatgatcgggtactctgactcgggcaaagatgctggtcgtttatcagcggcttggcagttatacaagactcaagaagagctcgtgaaggtggcaaaagaatacggagtcaagctgacaatgttccacggaagaggtgggaccgttggacgaggaggtggacctacccatcttgctattttgtctcagcctccggataccattcatgggcaattgagggtaacggttcaaggtgaagttattgaacagtctttcggagaagagcacttatgctttaggactcttcagcgtttcacagctgcaacacttgagcatggaatgcatccaccggtttcccctaagcctgagtggcgtgtcctcatggatgaaatggctataattgccactgaagaataccgttctgttgtcttcaaggagccccgttttgttgagtacttccgtctggtaagttcttaaccagctcaattactcctctcttaaacaaattgtagttaaaaaagagagtctaagttcaggtttgggtttgtattataggcaacaccagagctcgagtatggaaggatgaacataggaagccgaccatcaaaacgtaaaccaagcggaggaatcgagtcgctgcgtgcaatcccgtggatctttgcgtggactcagacgaggttcacttacccgtgtggcttggctttggaggagcattcaaacgcgtgatacagaaggacagtaagaatctcaacatgctcaaagagatgtacaaccaatggccattcttccgtgtcacaattgatctagtcgaaatggttttcgccaaaggagatcccggaattgcggctctgtatgaccgcctcctcgtctctgaagaacttcaaccattcggtgaacaacttcgagttaactaccaagagaccagacgcctcctcctccaggtattacttacttccactataaccacattatagatgtcccatccggtttccatgcggtgtcagaccatacaagctaacttaacccgtgcgtttcgtacctttccaggttgcaggtcacaaagacattttagaaggtgacccttacttgaggcaaaggctgcagcttcgtgacccatacatcacgacattgaacgtgtgtcaagcctatacactcaagcagatccgtgacccaagcttccacgtcaaagtccggccacatctctctaaggactacatggagtctagtccagcggctgagctcgtgaaactgaatccaaagagtgaatacgcaccgggacttgaagatacggttatcctcaccatgaagggtatcgctgctggtatgcaaaacaccggttaaggcagtttaaaacgttcttgtaccattccctaaatctacgctatgtaatgtattatgttctatgatgtgatgaaatctctccaactcctatcccgtacgctttttaatgagtatgataatttcttgtgttattctattgttgttatgttaccatatctaggaaatatatttctgaaagaaacaagaaaagaaatctttcttttcgttctaagatgttgaaattaccattcgtaatatataaactccaaaaattaaacacttaaatccaaaaaataaactctaaattttaaacacgaaaatttggacaaaataggtatgtcattaaattcattttttttggaaaaacagttccttagttattccctaatgaagattaattccttctaatgttatatagtccattatttgaataaaatataaaattgtgctgagaagataaagtacaattaaaatgagtggactggtggatagagagtgatgacatgtcatgatatggttagacagagaagaaccaaatggatcccacgaggaataatataatgaataaaatcacttactgacacagaccattgagtagtaattaccccgtttaacccgcgttaattacgcttgtgtccctacgcgcgtctcaaagatctctctcttctctggagaaaaaataaaacaaaagaacagcgttcgccgagagatatacatactcggatcagtcgtcaaaagctttggaatttgatacttttgatttttcgagaatcttgaaaatcagtcatgggttctggaaaagagcgtgacactttcgtctacctcgctaagctctctgagcaagctgagcgttatgaaggtaaggaatcttcttcttcttcttctcactcgaatcaggtctttttgatagcttcttgagctcgatttctgtttgattttactggactttgatatcatcgaacgggtttcaatcgtttggtttgattgagagtttacgaatggggaacttcttatcaaggaattagattcaaaagtcttgatttttagcagatgggtattgaaaaatgtgaattctttttttcacagaaatggtggaatcaatgaaaagtgttgcgaaattgaatgttgatctgacggtggaagagaggaacttactctctgtgggttacaagaacgtgattggttcaaggagagcttcgtggaggatcttctcgtcgattgaacaaaaggaagcagtgaaagggaatgatgttaatgtaaagaggatcaaagagtatatggagaaggttgagttagagctttctaacatatgcattgatattatgtctgtcttagatgagcatctcattccttcggcttccgagggtgaatctactgtcttcttcaacaagatgtaagctctataatgcttctttacatggtgtttaacttaaggttgtgtgtctgaagattttgttttggtttttgtaggaaaggtgactattaccgctatcttgctgagttcaaatcagggaacgagaggaaagaggctgctgatcagtctttgaaagcctatgaggtgttcttatagtgatttgtagtgttattgatcactggacattcttggtttttcgttactttacttttgagtttttgtttgtttctttcctttacagattgctactactgctgctgaggctaagctccctccaacacaccctatcagattgggtttggctttgaatttctctgtcttctactacgagatcatgaacgcacctgaaaggtttacagattgttaattatactactaagataagaaaaaagactcattgttttggagatttgagatttttttttcttgctcttttctcttcagggcatgtcaccttgctaagcaggcgttcgatgaagctatctcagagcttgacactctgaacgaggaatcctacaaagatagcaccttaataatgcaactccttagggacaatctgaccttgtggacttctgacatctcagaagaaggaggtaatgatcatcactctggacctaagcacactctttaaatatgatgttttgatgtcttacacaattgctctttggtgtttttccattctaggtgtatttgttcattgtcatttcttatgtgtagtgttgatttacttgaaaccaatgaatctataagacaatttaagcatatccatggacattcttgatgatagatagttgaaatagcatctggaagacgattgccagtttttatcaatatatattttcacttggacttcaactgttaattttgcatttgtgtgcaggagacgatgctcataagacgaatggttctgccaaacctggtgctggtggagacgatgcagaggtaagtataagagattcctttactcggggtaaatcaaattaaaataagccgattttgattcaagatttctttgcttatgttgcagtgatatgatatgtgtgcacctggacaatatgtttcaagaactgaatgtgcggtgaataatagtgaaaagtagagtttctctgttccctatatcatgattgtctatgttacttgtactctggtttagccctaaatgtctctctggtttgaatgtattgcatgcctgtctcaggacactcttatttgtaattcactactgtcgtcttactatctatccttatggatccaatcttgaaacttatattccttcatttctgaattgctgagatagaagctgattggattcggtactctctgattcatattctgtcactgattgaatcaacaacaccaaatacagtaaactctgttcagtttctttcactggtgtggtgaataatctagcatacacaagccaagcgtaaatagataatgaagcttgcatttcttgaatcattgcgaacatttacccatacgtaatatgccaaagcaagcagagccaaactccaaaaaataaataaagaagaattagaatcgaataagaagaaagaatgaatagtttgttgaatttgacagaagagctctttcccatctttcacatagaatgctttctgagtcttttaaataggctattcggatcgaatcatagggaagcagataatgatgatagggctttttcaatcataagaggaaatgctttatagagtcctctagaaactgatggctaggacaaaccatctccttcactttatctccattcttgtacatcttaaatgtcggaactttcctgatactctctgctttcgccaacgccatgctctcctccacatccacctaataacatttcattttctcagttaacacattgagaaacataggttatacatataagtttagaagaaaatgtgatataaaaagcatatttggaatgtgttcttgttcttaccataaagaaatgtactaatggataccgaagacataaagtgttgatgaatggagaaatttcttcgcattgtcggtttgatgatgatttgaaatgaaatacagagacacctgaagagaaatgtttccaacttgagcaagacacgcaaaatctcaaccttttgagacaaattgaagtttctcattagacttaccgggaagtgctacggatttcttgaacttatccaaagtcgaaaccgcttcaacttcattattgaaacctaggcttttagattcttggcttctgttcattagcactgttttcgctctctctagagactctgcaacttcactgtctcctggaagttctcttctcaagaactcataatctttaaccgcatcctcccacctaccaagctatatatttcaacacacattgtcattcgaatacactgcaaaattctgtcaataactgattatagtaagttctaatctcacctttccatatgaagcagccctacgtagaagtgccttgatgtaactaggctggcttttgagcgcatggttacaatcttcaacagatttctcccacaaaccgagcttataccaacacgctgctctgttgcagtacaaaaccgaattggagtcatcttgcttgagaccgtctccataagctacacacgcttccgagaatctccccgaactaaatagctcattaccacgagtacgtgcccgcacaaccatcttcacattgtttaaaactgatacaacctcaggattggtttgatcaagcatcgcagctctctctgccttgacaaccgcattctcaaatctgcaacaaacctatcatatctactcactcaccggtggagaaacaaaaatccaaagaatcacaacatttctgagtttcgaaagctcaccttcctaatgccatatcaacttgagcttggatacagagcacataagcttcaactaccataccaaagagtttcacctgcggttgagaatggtaatgatgatccaatcttggaatgcaagatacacaaaaatccgaatcctctatttgcttaagacgcaaaaaggcttctgctttacaagctacaagctgtccaaaccaatagaaaaaacctcactgttagtcaaaaatctttacaagcatatcatacgacaatgatatgtaatcacctgaggagacgaatcagcgccgtttgcaatggctgcatcggtttccttaatcgcggttttccaatctccaatctttcgagcctcccagcatcgtcggagatgcttctccagcgtctgtagccgttggagatcagcttgatccggacattgaccagaaaaacaaatgtgacgtcttgcattctcagcttcacccaatctaaagcaacaattcactccatcatttcaaattctcaatctttaaactaaaaacacagcaacaaaacaaaaagcctctcaagattacctgagatagagagaagcaagtctttggtgagctctggagtaagaaggatcaatcctaacagcttcaagacattctttaacggcttctcctaaccgcctcaatgccgttaaagccgcggcacggttgcttctgtaagctgcatttcccggtgaaatcaaaattgctctgtcataaagcgacagagcttcagagaaactccctctcctatacatatcattccccattctcttcaactcctccgggttttcgccattctccgccactctcaccgcctttccgctggttcctcctcctccgccgctgcgtacaacgtttccatgtccgtaattaccagttcctgtgcatagagtctcagtcctacttgaagtccgagacgccattccagttttcaagatccgacccgacggacaaatatttcccgccggtaaaacgccagtattgggagacactgccgacgtagcaccgctaccacctccttgtggcgaggtgtgactcgttgctgaagtaaagctagagccagagaagatcaaaggcgtgccagtagaagaagatcttctatgacccggtttaagaatccgggtcgtggtcggcattccggatccggggctagaaagctcaccggaatgactcttgtaagcatcatctaaccgtttagccatctgagaactcaccgacggtttaccagaagcagagccagaagagccagagctgctagtaggagtcgcagcagcggaagaagaagcagagccacgtggcattaaggtagaaacaggagaacctagatcgagttctcgaaaatcaggtttgttgacgtcatcatcatttctctgtaaatcacgaaatcgaccagtgattgaatctatagcaggttccaacgaaagtcttctagaatgagacatcgtcgtcacttcctcgtgagctgaatctaaaatgagactcagcttccttttcttcttctcagagaagtcaagagaccaccaccgaagcttttaacgccggacagaaacaagtactgtcttcagagagaagagagagaaagaagaggaaaaagaaagacagatctcgtgataaatagaaaaggaagacgcaaagaattaagatgaagaaaaaaaaaaggattaaccttgattaataaagattacggatttatctccctgaagattatgacattgatcttcttcttcatcttctgtttatctctcttcgctcccgtgtcttcacggctacttgtcgttgaagaaaataatacggtgatttatcgaatttattattaattaataaactctatagtctaaaatagttgactttttaattttgagcacagtgttcgaatataaactaattagactttttctaacatttaatgaatttaagttttcttaataaattaaaacatttaaccccttactaactaactacatcttttttttttggtgcacactaactaagtactaaagtacatctactttcaaattgttgcgttgtgttacggaaacgaattatgatatagtacattgtatctgttaatttgtatgaatgttaattagtatttaaaattactagcttctgacgtcaagggcacgaagattcaagcacgttcactcatgttcccaaaatgttactctatcgaaatgtataacatcatttattaatacagactatgcaatagcataagcaaggcaagctagctatatgtactagtatcatattaggattttttaaaagtaaacactaaaccttcgtaggatattcaatgcgccacgacatgttactattttatcattattactagtatttttttgttgcaatatgtttcatttatcaaacccacttttagggtcgttgtacagaagtctcgcattaaattggccgactcaatttttattaaattgaataattgtaatggtattttttagacattaacattttaactagtgtttagttagttgtaaaaaaaaatctggacaaattactaagaaataagaagttatattctagaaagtaaatctaatgattatttctacagatacaatagatttttattataaaaaaaaattagttagaagtatgtcaacaaatcacagacttttggagtttggttaaactatttgaccaagaaaaatgagaaaaaatgccacgtaaggatttcaaccctcgtactcagagacagcaagatagagggtaaaatcgtcattcgatgtaagatgtatttatcaagccagccaaacttttgtttaagccaccatatatattgtactattataagcatataaagtaatcttttattgcaatagccaatttaaatgtaaataacaaatgtgtgtaatgcaacaaaaataaagaaaattacaaatgaaagttcaatatctattgcagagctggcatttttaaaatcttcattttggttttcgggtgtcctttgaaaaggctgtcatagttctctttttttcttttctggggattactgtttaattcattcgatatagagtagttaatttgctgaaactcataattaattactttgtattaactatttactgtttctagtagatcatggccagtccgtaccgttcagacctacggaaccactaattacattgaaccaagcaccatgcatgccttcattttattttatttttctctagctaggtcatgcctcgcaccctcaaattattttccatatatagtcaattaattttctcttgactttttcttaaataaattatttcgctatataaaaatatttaaaacaataataggataattaagaacataacgataataaatagtaaatactaattaaagaaaaaaaaggataaaaaaatagaagggtgttgcggtaattatggggataattgcaaaacggtgatcatgccagctggttattgacttctctgctgtgtctgccagctaagcacacagtttccgttaacggcgtttagtttttcaataacggattattctgttaacaccgacggattattcgaaaactgacctcgagcccgccaacgccaagcatgagatgggtgacgaatgacgatagtgactcactattttcacttaagcatacatgataagtagcaataaaaattacattcgtaaaataattctaatatgactgactatatgcgttttttttaccatagacaaaataaattatgggtttgttgaatggcagaatactgaatacgtataagtgaaatgtgcatttgaagataagattggctttcagaattatatatttatgtctcacatttttattaatacttctttattatcttaattcataaacgacataaataaaaaaaatcagtctaaaacgacacttgctttaaaatgaaaggaatattatttctccacggatttaactcaaaatttaataatttggacaccatttgcattaatagcgaatgaacacaccaatcatacaattagactgattattcaaacgcatgtcacattgtttgttccgccggagacatacaaaacataatacaatgcgcaggctgtaatgtttgagcatgaatgaccccaatcaaaatagacaaaagaggaaacgtgtgaaaattataaaaataaagtacaattagttgctaataatgtgttttacatcttttttgttgactctcattaaatcactgtcgggccatctttttaatcacgagattcgagtttcatatcaaacaaaagaaagtatccaatcttttttacaatttcacccgtcggcaaacatactttacttattactagtacttatctaatccattacagtaatttaatttaaacgatgcttgatttgattcaaggtgtgccgagaggaaaaaatatttgtgtaaataaaactttgtaactgcttaattctattaagacaattccttagtcaaaatactacacgaattatttatatatgtactgttttctaactaacgatatttttattgcctaatacatgcattcgtgttcgtgctataatctttcttatctatgtgtatctccatgattcttgattatatatacaaaaacgtaagaaaattatctggttttctttattattcgattaatcagtttactaaaagctaatccacgcttgtcttaaccactatgattcttagttaagggtatcctatgtttcatcaatattattttaatttttatttacaaattattaagatcataatgtcagtccaagcaaagaatatatgtagatcgcattaccgtccaactcgcattttatttttgtcaacccgaaatttttttaagttaacattcgtttactctaattttctaaagtaaacaagtactttgctttagagtgaaatagttcatctaaattctaaaactggtacgtgaccaaaaacgttggtggtaatacttttggtctagtctttggccaatggatgtatgatgatggctttcagattatatatagaagccaagttataagaactgtagactcatgtagtttgagaaaagaaatatctttaaaattagaaaaacagctgcatgtttggataattgatcatatccgtatgtataactaaatttaatagatcaattatatattgccatgatgttatttgttgccacctgaggttagatgctctatcatgtgagcatatgctgatatgatatgaatcttctttaccttcatcatcatctccatcaacaatttaatttatttcatattaccactctttaaaatttaaaacaatacataattgaaatctaaaggtatattggaatacctattcatgtactaattaagagatttttttttttaatagtactagctagtaagataaataatcgtagtagctattattggaaaaagcttaataaatttgagatttctttataatctgttatcaaaataccatcacttttagttacaaaacttaattttctaataaaagggagtaaaactaatatatttatttgtaagtatgttacttgttttctttgaaaatgttttaaaataaaatagaaaataattgatgaacttttcgtaaatgagggagtgtatgtgtgctgtgcaaaacattccacatgcaccatgtctcaaattttgaagggtaagggtaaaactatacgcataccttttgatttaatgcaattatgtagagtttggtaaatgacgttttaaaactagaaaataacgtttgaaactttttaacaaaagaaaagttgaactatattttttttgtgtgggttcactagtttcttcagttcactgttggcaatatgtattcttaataccttacgactaattagtaatcacaagagctaacattttccaatactctatatatgataatatgaaccttttgtcgtttccagtagagaaaaaatctttggtattcctcatatgtttctgcttttgtttcatctagttgaaatgaagacttaaacgaccaaatatatgcctgcaaaaacatacacatttccatgtgtcccagtccgaagataaacattttgttgataatattttagttaagatctagtctcctttctttttgtgtgcaaaagttaagatctagtctaagtctactttttatcgaaaaaagtttatagtctctcaactctcaaggcctcacactcttaacaaaaataatgtatgtttgaatgaaccaataaaaatggtaatttgcagaaacacgtatacaaaaggaggatagtgagttaatggtaatattcaccctctagttgtaacttgtaagcgagattatttgtgtgtttttttatcaccaaattaacagtttttgttatagttagatagaaattttgccactccataatttacactatattttttattactatgtgactttaatttgtattaccatgtattttttggttggtgcgatcaagtataatcaaagaagaactagttacattttaaatttatcaaaagaaattaatggaaatacgcaaacgaaagaaaagaaaagaaaagaaaaacctggatatagaaatgggcaaatggctgttttagacttttaggataaatgaacatgaaatgtgggggaaagagttaaacaacatgattggtgacacatgttgttctttgtctttctctgttacttcagtcacgccatcataccattgagatcgaatttctcttatcttttattctctttttcgtaattttttccttaacatctactacatatatatataaaggtgaaatgatatcttttctatcagcaaaatcttatgagaaataacactagagaaataatgaaaatgtgggaaattggcacatgccgctaactctaacatgtgattcaaataattttgagtcttacctcatacaaaaaaaccgaaaaagcgagagacaaaataagcattatgctctgccatttcttcctttttccttaaatctttattactatatgaatctttttatacttgatctaaacaagaaataccaaaaatgactaatttgattggtttattctcaaacacatccagttagattcgatttaactaagactaggagtctagaaccaaaataaagacattttcattatcttaacacacacacacacacgacaactagagtttattcaattaaaataaaaaggcttctgataaatccacgttttctcagttactaaactgacgcaagtatctgtatctgctggcacatactttgatagctatatggactgaatcagagaagttgctaatctggtctgtgttgataggagcaccattgtgcaccagatctaataggtcaagacgtaaaaccacagggctcgttttcttgacccgattctcgcggttgttcaacatgaaagacacactcctctcgcttgcattatcttgagtattcagttttaaaaacatctgtgacataataatctaatccatggataaatgggctcaatcctatgtctacaggcccagatagagccttctttggttcttccgttgacgaaaatggacccatctgttatttgcgatagtaccaacaaaaagaagaatccttattttattttctcaatatttaaggaaatcatttaagtcgagagttgaattgaatgatatggcggatgctaggtaggggcataaagtattgtgatagggacaatacaaatgtagatatgtatatgagcctatgacgacatgagtttgctcaattccacactttcttgtcaaatctgccttaaatccattattctcacaagttccggtttgtgtcacttcactaatgaccttcgaattcccaaatctttattagtgagactttatagcccaaattaacctggttctagtattaatttaagtatgtgaatcctcaaactgttcatgcctaaatatttataacgattattagaacaatactagtcataatggtataaattttgcagcaataaataacaaaatatgtacagctgaaatctgatcagaagtttaaagggacataactttttttaatagcatttcaattttttttataaattcaggtctacgaacgaaacgattggcatttttagtatgaaaagttagaataaaatcaaataatgtattaattaacagtttaacacatataacgatcgtattaaaactcatacgaacgagtaaacttgatgaattggctttctttttacagctcataatagtatagtactcaaaaaagtattggtatatcagtgtgtaaagaaacaaacgactatcgccagtatgtttctgtcacttatttagattatcatgagagattgaaaatggcgaaacgtgggtggaccatttttttttttttttataatctccttctcatcaattattgaacaattcaatctccagcagattattattgattggttctatatattgagttattgactaaattattcgcttcgtgttgccttcgaaattggatctcaattaactaacttatatactcatcttacttattttcttgtattttttttttttgataaattgtttgattcacagtcgagactttcgaccatatagatgtgtggtttgtggtactcaaaagctacatgatattgtatgaaaaagaagatataatacaatagtcttatgtctagcggccataacatatacattagttattcgtacaagtcaatgtgttattatccggaaactcataaaaatatgtttttgaaaattaaatgtaaagtaaaacaactggttagatctatggaatcatgaactagtgatatatagtttagattgacgggtgacatattgtgttggttagatcggagaataagtggtttattcataacttgaggtaccttgcaggcttccaaatgttttgtctttgtgtggtatgcattatgaaaacttattttgtttccttgttagctcacgagatctctagttacacaaaagtttactgtattagtatgcattatggtcttgaaaatttcttatttgttttacattatggaagcaaatttgtgcattgcattaaaaaaattaaaaatatcgagttgttcaattgttagtgtctgtttatccggatacatggccacatttaataattaatagggtttataaatagtattttacatttttcacttttcattttcaacacgtctcataattaatataatataaatccaccgattttcatttatacatttaatcttcataatcaaaaaagaagaagaaattctccataatcaccggcgaaaagatgatggtgagacgttgtagatatttttgggtttctctagtattcacactattgcatgagtgcatatatatgagagatctagattatatatctgtaatctaaatttcgatgaaagaagtataacttcattccaaaaaaaaaaagtatgattaaaaaaaaatgacaacaaataattttattttgacacgaattacatataattttatttagacacgaattatacactttctggttcattatgtcaatgataataactataattacacccacacagttatcgaaggtttacgaataataattggacaatatatggctcttactcttgtactatttgtggggcttatgtatactcaaatctacacgtacgtataaatcggtgtaaagtcaaagttggacccgcttgagactctctctcacaaactattttttttatattttttttcgacactcacaaactaaattttatgaaattgtattttcctattttttgcatcctttacctaccaagcgtccaagcctacttttatgagttttttttttctcatccttttaattctttcgtaataatgaatctatactgaaaaagtgtatttattagctggcaattgacacaaaatattaacccataatttaccagcaaattacttatgagcttataccagcaaatcttttaatatttttgtattttttataagactgatagtttttgggtaaaaacgatgatttattattgataacacgaaattaaccaataaacattgttggtttttcaaagtcttggtttcagcttatttgaaccaagctaactaaaaacagtgttgcaaatttcaacattttcttactgttgagataatttaaagaaacgaaaagaactactaatttactacagtaaaaaattctaaaacaagagaagtaaaatattggaaggtacctagtaccaaattaactaatataaatcgaataaagacatataaaggatcttgtttcttgtttcccccttcccatgtgatgtgaacaatctcactctctttctctatctctctttcgagtttctttggagtattatataacaaatcagtccaagacacctcttttctcacaccaatctcgctctcaccacaaaacagagaatctcagatcgaagaagcaaagaaagagagaatgggtttcacttcccgaggaaacccttcttttctcttcttcttcttcttcttcctctgtctctccacagtctctgcttacatcaacagcacaagcagcaataatgatgaagtaagaagagagctagcttctgggagatgtaattggtttagagggaattgggtttatgatgtaaagtacccactttatgatccttataaatgtccattcatagatccacagtttaactgtaagaagtatggtcgtcctgacaatgcttaccttaagtatcgatggcaaccatcttcttgctctctccccaggtttcttcttactctatccttatcttcttcctttctttaattcaagaactaaagcttttcttgtgttttgtttgccttttcttttcatttattagacagaataataaattgcacatggtgaaaaaactgaactttttttctttgtttctctgttctattgtgtgagtcaaaatcattttttttctcccattaataaatatggaaagctggaaatttggagagttatgtttggttgtgtttaatgctatttacagagatatttaagcatattggtaagaaaggtaacaattgaatttcgagatagtgtagtatagtagtactagtagtttctctcttcttgactcttttcacttttctctctcattttttttttttttgcctttttggatttcaaaatttgaaacttttgttgagttgcttttgagcaataatgtcttggaaatcccataattttacactccaaaaaggttttaaatcgaatccgaatctcaaaaccaatgtgtctttgtattgagtaaatatatatagttcaaattgtaactttatgaggttaaaaatgtttatctttttgtttcagattcaatgggttgtatttcttgaggaggatgagagggaagaagataatgttcgttggagattcactaagcacaaacatgtggcaatctcttgcttgtctaattcactcttgggttcctaacactcgttacactcttattcgccaaaagggtcttgcttcacttacctttgaggtttgttctttcattttatcttattaatttaaaactagtgatattttcccactcaaacaagtagatatttattgagttatgattttttcactagaaattgagtggggattttttttagctttatagtgtggaaagtgtggtaaaaagtcttgatttatatttaataacgcatagtgttaaggaaagggataaagtgtttttggttttgtctcatttgatttgatgtaaagataatgctttgctatatagttttataacttgtgttataaaaatagtattaggacaagagaatgagagagcatttaagagatgaacgtgattagtggcctatttcccaaaaaagagaatcttccagaatatcatgtcatgttataacctttatgatcatgagccacacaagaatagattcgtttttcttttgttttcccatgatatattttgagatataaaagcacatggccagttaaaaaatacacatgtacataaattacatactccgttatctagtgaactaaatttggggtttgtaatgggtactgatgcaggaatacggagtgacgttgttgctatacagaacacagttcttggtagatttgaatgtggagaaagttgggagagtgcttaagcttgattccattaagcaagggaatatgtggagaggcatggacgttttgattttcaactcgtggcattggtggacacacaccgaacacattcagccgtacgtttttcctttctttctttttgttctgtcttttttgagttttgacttaaataatttgatgacgtgtgtgtgtttttgcaggtgggattacatggaagatgggaataggttgtacaaagacatgaaccggctcgttgctttctacaaaggaatgaccacttgggctcgatgggttaatgcttacgtcgatccttctaagactaaagtcttcttcaacggcgtgtctcctactcattacgagtaaacatacatcctttcatctaatcttattgttctctataagtcggtttagttatgtcaaattaagcaattacttcacttataaaatcatctaaacccattattgttttgcaggggaaaggattggggagagccaatgaactcatgtaggagtcaaacgcagccattttacggaaggaagtatccaggagggacaccaatggcttgggtgattctaaacaaagtgatgaggagattgaagaaaccggtccattggctcgatataaccggtctgtctcagcttcgtaaagatgctcatccttctgctttcagtgggaaccatcctggtaatgactgtagccattggtgtctccctggtttgcctgatacttggaacttgctcttttactctactcttttctcttcttaattaattcctttctcatcaatgtataagttaacttaaaacaacaatcaattatttttagttatctttcactatggttgtttgtttcttgactgaaacaactcttaaataagaccaacgcacttgactctgtgaaatgagaaaacatgtcaagaaaagattatacaacggaggatgaagaatttagtatgctaatgaaattttccgagtaataagctaaatgggggcttagagtaagatatattgggcctaatagagatgagtgggcgggcctgaagaagcccatatctgatgaagtggtcggctggttcgtagtagagataaaatcatgagactatgagaggcaaaagtgcaccggaaagactccacgtgcacatgtacggaaagatacgtggaggaaagcaagactattggctcgctaatattgaaactgatctcttcccacaagctgagtcatcgtgcctctcctacacgtttcaatagtaaactcaacacgtcacacacctttctccaatcttcatgaccgcccaaattttgtcttttcggttctatgattataaagcaggacttaagcagctcgataagaatcaacaaagataaagaaaacagaaaaaagcattatcaaactatcatcttgaaagtaaaactgtgtttttggaagtgatcgttagcattaacaatggcgtcagagcaagcaaggagagaaaacaaggtgacggagagagaagttcaggtggagaaagacagagtcccaaagatgacgagtcatttcgagtccatggccgaaaaaggcaaagattccgacacacacaggcatcaaacagaaggtggtgggacacagttcgtgtctctctcagacaaggggagtaacatgccggtttctgatgaaggagagggagagacgaagatgaagaggactcagatgcctcactccgttggaaaattcgttactagcagcgattcaggaacagggaagaagaaggatgagaaagaggagcatgagaaggcgtcgctagaggatattcatgggtatagagccaatgctcagcagaagtcaatggatagtataaaagcagcagaggaaaggtataacaaggctaaggagagtttgagccatagtggacaagaagctcgtggaggaagaggtgaagaaatggtgggaaaagggcgggacagtggtgtccgtgtttctcacgttggggctgttggtggcggtggtggaggtgaggaaaaagagagtggtgtacatggctttcatggggagaaagcacgacatgctgagcttttggctgccggaggtgaggagatgagagaacgtgaaggtaaagaatcagcaggtggtgttggtggtcgtagcgtaaaagatacggtagccgagaaaggacagcaagctaaggaaagtgtaggagaaggtgctcagaaagcgggcagtgctacgagtgagaaagctcagagagcttccgagtatgcaacagagaaaggaaaagaagctggaaatatgacagctgaacaggcggcgagagcaaaagactatgctctgcagaaagctgttgaagctaaagagactgcggcggagaaagctcagagagcttccgagtatatgaaggaaacaggaagcacagcggctgaacaggctgcgagagctaaagattacactcttcagaaagctgtggaagctaaagatgttgcagctgagaaagctcagagagcttcagaatacatgacagagacaggaaaacaagccggaaatgttgcagctcagaaagggcaagaggcagcttcaatgacagcaaaagctaaagattatactgttcagaaagccggtgaagcagctgggtacataaaagaaacgacagtggaaggaggaaaaggagctgcacattatgcaggagtggcagctgagaaagccgctgcggttgggtggacagcggcacatttcaccacggagaaagtggtgcaagggacgaaagcggttgcaggtacagtggaaggtgctgtggggtacgcagggcataaggcggtggaagtaggatctaaggcagtggacttgactaaggagaaagctgcagtggctgctgatacggtggttgggtatacggcgaggaagaaagaggaagctcaacacagagaccaagagatgcatcaggtattgcacaacttgaatagtaaagctagatcgttttagctcattgtagtatggtggtgtttcgtgttactcaagaaactgtgttttggatttgttttgagggaggtgaggaagaaaagcaaccagggtttgtctcaggagcaaggagagactttggagaagagtacggggaagaaagagggagtgagaaagatgtctacggctatggagcaaaaggaatacccggagaagggaggggagatgttggggaggcagagtacggaagagggagtgagaaagatgtcttcggatatggaccaaaaggcacggtcgaagaagcaaggagagacgttggagaagaatacggaggaggaagaggcagtgagagatatgttgaagaagaaggggttggagcgggaggggtgcttggggcaatcggcgagactatagctgagattgcacagacgacaaagaacatagtgattggtgatgcgcctgtgaggacacatgagcatggaactactgatcctgactatatgagacgggaacatggacaacgttgaaaagtaatgtataatggagaaatgttttggtgtgtttttgctttacttaaaaaggtcttttgtttttttgtatgtaaataacaagaagctctgtttgacagagttttgtggtaaataacaaaaaaagttctgtttctgttaagaagtttgaagaatatattagtggtttcctttgaaatgaaactgtaccaacctttatctactctacaaaactaagttgtagtgatccttgtaatatacgactcatattggtattaaaggactctctcaggcattgtaacaaacaaattgactgctacaaataattatcccaatgtcccacatatagagacccaaactttgttgcagacaaagaagaattgatgataggcaaagcatagagaagcaagaatggtatttggtattcaaaaaggaatgagcttttctgcatatatgagtgtacgaaacgaaattattcaagcaaaactgtatttcatagttaatggtgtaacacacattgtgaattgagatctacattttggtaacattatgtaacttgatctacaattctaaactaagaaacagatacgaattttcaacagactattgaacagaaacgaaactagaagctggaggcttcaaaggcataatcttcaacttcaagggtttaatcccacctttcttaaactgtgggggctttggtgggataatctttagcttcaagggcttcttcgaaacattcgtcggtttctccggtgctagtttaatcttcaacttcaacggcggaagcgagaagccggagaccacttcaccacgcaagaactgatgagacaataaatccgaagcacttcctctctccttagggttccttgaaaaacacgtctctagaaacttccttgcatcacacggtaaactctttggaatctccggcgctttaccttttgatagagcaggcgcaagatcctcaaattcaacctccgaccatggaatcacaccggtatacatctccaatactatgcaccctaacgaccacaaatctagggctttctcagccacgccgctacggactgattctggcgacatgtaaacaggcgttccaacaaacggcaaatcaacatcccagcaatcagaatattctccgacttttctcgaagacccgaaatctgaaatcttcaattcgtaagattgtctacatggaaagacaagtagattatcgggttttagatcgcaatgaacataaccgagtctatgaacagagactaatccttgaagaatcatacgagtaaagtctttaatcatcgtttccggtaactttctatctttgtaactgtccatgaaactgaataaactccctgcagctgcgtactccataaccatcttgtagactcggaatccaccgacatcgaagtcctcttctaaagtataattcccatagcattgcacgatccttcgacatccttcaagtttggatagaatctgaatttctctttcgagagagttgtagtcttcacattcggcggttttcacggcggcgtaaagaggcaaagcgttatcgtcgcgtttgatgtacttgacgagatcgactgatccatacgcaccttttctcaagaacttcacgaactctgtttttggttgcatcttcggaacaacaacaagagttattatgcttcgaatctcttagtatctctcaaggtttttggtaactttgaactgtaattaaaaaccctagaaaaaaacgaatctcttgaaaagttgcagcgacagatagagagagttaaaaaggaaactttggtagctttagggttttttcaagtctgtgacttataaacgtcgagagagtgtaagcacgctccataatctaccgctgttcacaagtaataatagatcttgtccgttgaatttattttagactttttttttaatggacttcattttaaatttttacaaaattaaattattgcattttctatttcatattgaattaggagatgttactgtccgtcagattctctagacttttttttttaaagactgatctatgatcagaattccaattttttttttctttaaggaaatacatcagagagaaaaattattacgaaacgattctattacaagtaatgattttaacctttttttttttacaattgacaatcttttcacaacaaaaatccacaagaaacgttagacaatggcataaatttatttaaattaatccgtatatattcgccttctatgagaattgaattctataccactgtaaaattcttaaacgagataagattattttcagcatgtaaaaaatggtttgtggtttcaactcatttgggctattagttttacatttaggcttgcaaccttgtcggtttattttgtgtaggcttttggtagatttgggcttgcaaacccaaattaacttgttggccgacatacatttgtttctattacaaatttaacaacaaacgtcaataaatacacgtgaaggaaatgagaacgaccctcttaagtagtactggaaattgaaaaaaagaaatctagaaatgctaacatgtaagtttttgttaccaaaaatgcaatttgtatgtagccacaatttcatggccgacctgctttttttttcttcttctttctgaaaaccacaaatatgattacacgtggcctgaaaagaacgaacagaaactcggtaatgtgcaaaaaatatcttactcttaatacgtgtaattttggagtgtaataggtctatcgatctataaaacgatactattggagattagattcttctcatctcactttgttcatctaaaaactcctcctttcatttccaaacaaaaacttctttttattctcacatcttaaagatctctctcatggcgatgtctttctcaggagctgttctcactggtatggcttcttctttccacagcggagccaagcagagcagcttcggcgctgtcagagtcggccagaaaactcagttcgtcgtcgtttctcaacgcaagaagtcgttgatctacgccgctaaaggtgacggcaacatcctcgatgacctcaacgaggccacgtaagtctacattctttcttcttttagtatcttgcctcataagtaaggatcttagcaggcaatgtttatggtatactatattagtatagattttagtggaaatatgtttgttttgaacttattttatgatcatatttgactattatcaaagataaagattcatataccgtacattatatatctctatttttctagtttacatgtatagctctaagtttatttgatgattctgttgactacttttggatatgtgttttgaaacctttgataaatactaaaataaattttaatttgaaaatgatatagaaagaaagcttcagatttcgtgacggataaaacaaaagaggcattagcagatggtgagaaagcgaaagactacgttgttgaaaaaaacagtgaaaccgcagatacattgggtaaagaagctgagaaagctgcggcgtatgtggaggagaaaggaaaagaagccgcaaacaaggcggcagagttcgcggagggtaaagcaggagaggctaaggatgccacaaagtagggtcttacctaatcagttaatttcaagcacttaaactcgtagatatattgatccatatcctctctcttcatgtttaatagtacttacaataagatgagtctgttgtaatttctattaatttcacatcacaactgaaataagatatggtatccacagtcaccgtcacattctttaatgttttgcaaaatattcaatagacaaaattaaataatgagtaattataagtaacatcgccgtctagagtctttcaacggtgaaaggatgagagcatatgggagatcgatagccttgtctcttttgtgacgaaccaataaaagaggaactgctttttttcttcgcatgtccactatttactgtttggtatgacatcgaattggtatgatacattgttgtaccaaaaacttcaaaatttggtggcttgtaatcaacattgatccacttagccattccaagcagtgaattacaatccgtggaaggaaaaattatggtccggcaccaacaaattatcacctcatctcccgtcacaaacatatcatctagaagtcggtatgccacaccacataattaaggagcacattactcacatacccaaccaatgtgggacatatctaataagctcattcttggctggtacatgctctatttcatatttatcaaaaaaaaaaatattaggcattgtaaatagcgtttttgctgttgagcaaaatagttatatttgaaagtaacattggtatttataattatagtataacaattaggcattgaagtgtgagtttttgtttttgtttatttaacattggagtattaggttcttagaaatatatctatatactattagtagtttaactacagtttgtacttaattgaaaaaatgttaaaagttgttttaacctagctaattgctaaaaatgactaaatagacatacacaaagacttgtacattttcagcttaacgactaatacatttttcctttatatatatatctctatcgagtctagttattaatgttgaaagttgcaaataaaacagaaatgctaacatgtaaatatcgtagccaaaaatgctaacatgtgtataacggttataaccacaacttgatggccgacctcttttttcttttggtaaccatagaaatggttacacgtaactagtacgaaccaacgaaaactcttcttattcgatagttaaagataatagcaatgcgcaaaaatatctagcactcacacgtgtagttttggattctcattggtcgagagatctataaaacgatactattggaggttagatttttctcatctcactttctccatcttaaaactctttcttgtatttattttcctcccaaaaaacatctttaagagtcctcatggcgatgtctttatcaggagctgttctcagtggcatgggttcttctttccacaacgtaggagcaaagcagagtggtgttggtaccgtcagagttggccggaagagtgagctcgtcgtcgttgctcagcgcaagaagtcgttgatatacgccgttaaaagtgacggcaacatcctcgatgacctcaacgaagccacgtgagtctatattcttttcttttaacaaattttctcgtgactaaggctatcttcatgtgtactcgcaaaaactctcatatacattacgtactcgccatgatagttattttattttggttaatcccatcataacagttttatacatactataatcaactataatggccttgttgaggattgagtttccatggtgtagatatatgtttttaaaatcgtttgtcaataatgaatcttaacatatatatatatatatatagaaagaaagcttctgatttcgtgacggataagacgaaggaggccttggcggatggcgagaaaacaaaagactacattgttgagaaaaccattgaagccaatgaaactgcgactgaggaagctaagaaagctttggattatgtgactgagaaaggaaaagaagccggaaacaaggcggctgagttcgtagagggtaaagcagaagaggctaagaatgccacaaagtcctgattcaaccactcatgtagtcatgttcaatagtttacaataagatcagtttgttgtaatttctttttcaccatttgaaatgaagagctgttaattactcactagcacattttaaatacgtatcaaatgatttaaatataaactacattttagtgactacaagtaacatagtagtatttatgagttggattcgggaaaaatctgtcaaaatcttctctcattttgatcctcaattataaagaaactgtgaaactgatgactgtttttatgacaacccctaataatagcctaaaaagatcaaaacacctaaaacatcaacaattgttatatatccatctcctgagtgaaatctcataggtgtaaggggcaatacatactctctttgtgaatgtagaagaaatattttttttgtcaaaagttgtaaccaaaacaaaaagaacattggaagcttagtcccaagcacttggaggttctccaccatatccaccacttgaagcaccaccatatccaccaccatagcctcctccgccgccatagcctcctccaccaccatagcctcctccgccgccataccctcctcctccaccgccatagcctcctctaccgctaccgaaagacccttcccttctaaagtcacggccaccaaatcgaccaccagaccgccggttcttaccaccaccaaaagaggaccgtgacgcataccgagtgagccactcagggacttcttggttagcttcttgcatcagctcagcgagcggtctggccagtgaggtgttgccatcgttgaagaaggcagttgctagtcctgatttgccagcacgtcctgttcgtccaatacggtggacatagtcatcaatgtcatttggcagatcgaagttgaccacatgagccacgtggggaatgtcaaggccacgtgctgctacatcagttgcaaccaaaatcggtgttctcccactcttgaaggctttcaatgccacttctctttccttcaatgcatatatagcaacacaataacttagttcctaacacttattgataatgatgatcaaagagtgcatttcaatagtttttccttcagattttgacttatgtttaagctttagttcaatgaactatattttaacacgagatcttctctttggtctcaataatgaatttgtacgactggattttgatgtccacattaacatacaacattttcagctttaagttgaataacaaacctgctgtgttctgtcaccgtgaatggaggttgctggaaacccattgatgcacaaccaattttccaaagagtcagctcctctctttgtctccacaaaaactaaggtcagggcttgctgaaaatatggaaagaatacaatcatcagaaagtatgaaggagcatgttgaaatattgaggcaagaccagctactttggtaataaatcatgaactaaacaatagatgattccttccaaacaaaagaggagtatcagtttgtaccttgccttggatgccattctctctctgagcgtgaagcaggtccatgagatgacttcttttgtcagagtcaaggacaaactcaaccctttggacaattaaatcggtacttgaacccactctacccacagccaaaaatatataatttgctaggaagtcagctgcgagtctctgcacatgaaacaatacaatcttttaaaatttgcaagtgattatgcagaaacattctatattatgcagcttaatcaggaaacaaaagtatgaaacttcattaatctaaagcttgccataataggttcaccatcatccattaatgaagtggcatataatcttctgacacatagaactattaataccatgtcagttaactggcattgaccatcgttttataaaaatggataaatttacccctgcatagcctagctagaataatagtaggactaaaagtcatgtaatcagctttacaacaagaaaacctctctcagaaaagatataacctctgcagaaaccatgcatatagctttgtatatactattcacatacactttcagtttaagttggacatttctttttccccctcatttttttcagaggaccaaatggatataactggacacagaaggttgttacgacaaaaccccaacatagaaaatgtaacaagcagataatttgcaaggaaaaagtatggaacacaagaatcaacacacatggcaaagaaacttaaataaaaattcggagcaaggcaggggtagtagtcagaaagtgaagaagttcactaaaaatgatatttcaaccaatgagaaggtgaataaagaaaaagtgatttacagacaagtaaccaacctgaatttctcttggaaatgtagcactaaacaacagtgtctgtctaactccacgtggaggcatgtccatttgttcgacaatctttctaatttgtggttcaaaacccatgtcaagcattctatcggcctcatcaagagctaaaaatctaatcatctgcattgagactctagctctctcgagcaaatcatttaatcgaccaggcgttgccacaagaatatcgactcccctctcaagttcccggagctgcacaaacaacaagacacaagatcaacatgttgacttttgaaaacagattaagtaacacatagatacagctacgacatatagcaatgcttctgcatgtcatatattgataaatccttaatatagaaaaatgctggctccaaaccaaaacatgcttttaactaagttaagcagccttagaaacgaacatgcttaacccaaaacaatcagcctaagagacgacacaaaacagacagcagtgacagacgcatgaaacaaaactcagaaatcaaaagttcaaacaaaaaagtagaaaaaaacaaactatttgctcattacatacctgctggttaataggtgttcctccatatgcaacaaccaccttcacaccagtttggtaagagaactttttagcctcatcatgtatctgccaaaaatcattagaacaagatatgagaaactaactaacttctaccaaagcgaagaatcttgacatcagaagagaaccccaacctgacttgccaactctcttgttggtgagagaataactgcaagagggtagactgttcgtgaaccacggggtctctgtacatgctgatctttcattattccactaatgattggaaagcaaaaagcagctgtcttccccgaccctgtctgagcacaggccatcaaatccctcccttcaagcaatatcggaatcgcatgacgctgaacaggtgttggcttaacatatttgcatctacggatatttagattcaatgcctccccgagatctatctctgcgaatgtgttaacaggaggaggcacattatccccactggtctcaatcggaatatcttcataggcatcaaaattaataaccgtattatcctgctcagtaaaagctggttctggttcggaatcatcattttcaaaggggtttacttcacgttccctacggtcccaccctccgcttctgttgttccaaccaccacctcctcgtccaccatagccagagccagagccaggacgacctgcatcagccctataaccaccaccacctccaacaccaacaccactaccaccaggagcccatcgagagccagaaggtggaccaccataacctacacgatcattagctggcaatggagcaacaggctcagaagctgctggcctgttccttagatgtggaggaacataagcaggtcgtgaaggatgagaattctgattagaagacccagaacccgtgttctctgagtcagctacatcagcccatgatgcactcataatcgaaaagtataacgtcgtaaaaaaaaaactagcttgcaaatccttggatatcaacaatcaaattctcaaagctcctccctttagtttataatcttcaatagaatacaaaaacctggaaagttacaagatgggtttcagttagaacaatagcactccacggatatcaatagcaagcagctaggaacatctttaaataacgaagccctatcaaaacctcaaaaaacatcataatcgaatcgaccgaataacaaaagtccagtcttcggagaagagcatataatcaaacgaagaatataacaagacaaatgccaacagaatcacgcaaagagaagaacaatgttcacctcaaaaaggaataacaaaaacaaaatttgcaacaaagagtagcagataaccctagctacagctctcgaaatcaatcagcgtaaacccagagatagaagaatcctcaaaacacgtcccaaaaaatcgaatcgaagaaatcaacggtaaaccctaaaattcctttgaattaccttttggtatcggagacagagcaagatacaaatgcgcagagcgatagaatcaatagagagaaaagagaggtcgagagatattttttaattattttgacttttttgttcttctcttatcaaaccagattgcgtcccgttttcatcaatctttcaacttgcgtgtcggtttagttttctcgttctggattgtatgtcggcgacttatgttgaactctctttcttttagtttttaatgaatttaaaatttaaactgttgtaaacacacttctcctctcattccatttggccaaaatatctgcctgcgatggtgatgagcatatttgccataatgataacttgttcatctccaagactccaacctctaacgcacgaagactcgcacactttctcacaagagctctgagacaagcactagtatcagcatccggaggagtgtccactgatgcacataatgctactacccatttgcagtcgctactctctaaaccgctctccttttcaccaaacatatccgctttctcagctttgatacccgtgtcactgagtccattccttgtatctctgaaaccatcccaccaaatgactcatcaatgtttgtgtggggacgtttactgaatatctccatgagtacatctcctaaagactcgttgccattttgttttaaagcctgtgaaaaacccataaaacttaaagtcattacttgtccgttaagagaaacactgataagtatgcaagttggaagaaaggaataccagacgaatgtgtgagaagtcggaaagcaacgagtcctcccattccttcaccggttgcaggtgctctgggaatttgtggcatgtaaacactttgctctttctctctgtacttgcttccacttaccttggctacttttacatttggaattcgcttagcctcccaccttaaatgatggaaacaacttaaccatatatgcctaaatgcagatacacagaaagattgaaacagagtgacatatatacctgactcgtcttaaatattcaatcccgtcttctggtggtccagaatcgaaatcaggttctccatccacagcaaacgcaggcctcaaaatgctattgtaatcgtcattatcttcagttttctcctcttttacaacatagtcttcttcaagtagttaagtcatcaattccttgcctaaatgttctcatgaagaaacaaaaagtcacattttcttggaatctcagttttgatttctattgaagaaaccaataaaaacaaagaaaagaactaagcccatcaaaaagatttagctttcaaaggtattgatttttattgaagatgtatgaacatgtacaactttttagccgataaaatcatggccatacacactttgaaccaaacaaactctctagacccctttaaacaatctgaactaaagaatctatatacagaaagaatgtattgtttcttagaaaaggaaaaattggtgaacacaggatttatgaaacacaggcttcgacagatttcttcaggtcaatgtacaaagagacgggttcgtcttggtacagccgatatgggacctgtggaaaagaaaacaaacggcccctatcaaaaagatacttaggaacaaccactgctgaaagagtcgcagacactaagcccgactggatttgtcactttgagatgaccattagagaaggaaatcaccataaaaccgtagcaaagaaaaagccatttgagtgacacacacaaacaaaaatgcagcagatatagcttaaggttatacatgagctaagtaatcttaacttggagtgacatatttctattagacctaaaagtttcctcaacatgttcaactaaaaacaggcaacaccacaaaatgcagcagctaagataaaagtaaagtaagtggagggttaccgaggatactcttgtgattcttcaaaccttcgtactcagtcaccagctcaggtaggagtctagcatacaagtcactccacagtttcttctgattcgcaatgtgggcatacctcatcgactccatttggttcctagagtacattatccgcaactgcttcccattcatttctccactgttacgaaagtcagaaactttggttgacgcattcctttcaacaatgctagaagcatttcccttatcaatcggtttctctactccaactttcttatgctttcttggtgcatccttatcagtgtgtgcagttactggtctcttagaatgatctttacctttcttgtagaaaggaacaacatcaaacaacgcagtatcatcaaccaaatcaatattcacagatcttccaacaaatgcattatccttaactctcactctttccaccttctcacgctgatctttagacccatttccattcttttcgatcttatggatatcagaagccctagcgagcgtgtccccatcattcttcttctcagtctcccaaagtatttgaacatcagaatcttgtcccttcttctgagagttcaaaatttctttcatatcagagatagaaccgacgcaatcatcctctatcttgtacacatcatctccaaattgatcactttctgtagaaatctcagagacttccttaatctgttgcagttccttattctcttcaagaaacgtggaaccatctccgatttcagcgaacaatattatcttctcagcctccacaatcctctgaccatcagaatcttgtcccttcttctccgagttcaaactttctttcatatcagagatagatacgacgaacccatcagtctcaacaacatcctttatcttgagcacatcatctccaagtcgatcgccttctgtagtagaaatctcagagctttccttaatctcttcaccaaccttattctcttcaagaatcgtggaaccattttcaggtacagagactactactactccaggacactccacattcatcgccacggtttcttcaagagtcgtttcggagaaagaaatgtcaatagaatccgaatggatgatttctccatccttctcaaaaacagaagtaaaaggcgaagactttacttgcttctttgggcttatcatctcttcaacagagtcgtcgttctcaaccggcggcaaagaaacgatctttagcgagtcttctgcaaattcatcccgagaaatcgaagttttccccgacccaatactttcaccggtatcaaatctcgtcgccatcacagagataaaaaagagagagcgagactgtgagactagagagagagagctttatgaagcgaaggcaaaagtctctcgagacgattatataagctgaaaccggttcagttaaaccgtagaagttagtattaaaccggtgatggctattgcaccaattaaagtagaggggtattatggtaatagcaaaagaaagagctcgaaagatacaaaccactcgcttctctcctcacgcgccttctcaaaattcgatcttctttcactgcacacaaagcgaagagacaaagaagagagagagagagagagagagagagagagagagagagagagagaaagtgggggaaaaaaggcgaagaatacgcagattccatccaatttagggttaggacttcccctaatttggaaacctagtcctgtttcctgatctgttttccggatcggacgagagacgaattaacgaaaatgggcgcgaattctattccgacggacgcaaccattgatcttgatgagcagatctcgcagctcatgcagtgcaagcctctctcggagcaacaggtgcctacaactttctctttagaccttagcccttgacgttttctctactttgtttttatcgatgattggatctgttttttttgtttttttgagtggagtggtatttttttctgtgtttgaggtttctttgggtacgagattatcagatttgatttggaaagtttcgatttttttttttttttctaaatgaacatcttcaggaaatgttattagatcttggcatgtatgttctcacggaagctcatttgtcaccgcagttctatgggttggagaattggctttgcttctatggtttgatgttaaattttggctgatttggattcttagcatagtgattaatcacatctaagctcgtgtttttatgtgcctggtaatgtcaatcgggattcttatggactgataaatttttaatattttcgtatcaatagctgatcaatacttgttggttttttttttttcttaattgatgctcctgtttgttgcctgtgtcaagttgatttctctaagtatatatttctatgtcatgtgtttgatagtggttattagctgcatgtcttgagagtgttaaagaggtgaaaatcatatgcagcattgttttattttccttaggttagagcattatgcgagaaagccaaggagatcttaatggatgaaagcaatgttcaggttagttcctggtcttgcatatctctttggttgagcaatttctttcaccacacttggtgattctattttcagtgtggtagattgtgctactagccatgaatttattagttctttctatttcctgcatgcagcctgtgaaaagccctgtgacaatctgcggtgatattcatggacagttccatgatcttgcagagcttttccgtatagggggaatggtaacatctataaaatatacagagctctacaaatagctctaccaatcttacaaagtattaattttctcttttttgcagtgccctgataccaattacctgtttatgggagactatgtggaccgtggttattattctgttgaaactgttacggtacgaagatgaaatatttagacttcctttttttattcatttaagagtaggctgattggcaagccagtcattgtctttttatattggtaacaagataccattaacttgacggatatttttttctttacaatgtatatattttgggtgtgactatgaagtatgctgatactgtttctctttcttattctctttccagctgttagtcgccttaaagatgcgatatcctcagcgaatcactattcttagaggaaaccatgaaagtcgtcaggtagactaatgctttatgattttattactctggttccacttgtaaattcaccttctgatgttaaatacagtacttcattgtgtatccagtcttttccatcgttgagatcttggttgacacacaatttccttttttataagtctctgttttgtctacaaaattcgttttgtgcacattttttttatcatattactattttaatctgacacaggcttttcttctttttcttccatctcgcagattactcaggtttatggattttatgatgaatgtctacgaaagtgagtctcctggaaaaaatccttatactggaaaaaaaatccttattttctaatgcatttaaacaatttttttaattattattagcattactattgtccttatatttttgctgttgcattgtatgtgtgtatggtagcctgtccaaaattgtcttttctttctttacttcctgtttctgttaatcctttgggcttatgattacttgcttatagtattgttctatgttgtataatcttacacatcctagtttgcagcttatttgggatatagattttgcaataaatttaacaaaccatgttttcctttttaggtacggcaacgcaaatgtttggaaaatctttacagacctcttcgactattttcctctgacagccttggttagtacctatcatacatgtctcacatttttcttccttttttgttagtgggggttcacatataagtctatcctcgtccggtagtcaattaatatagatgatcagttctttgtcttgtgctggcagtattatttggaaccaaagtagtacttttgtactgtgctgtcgtatttcttttgctagtgtcacatcaattgcaagacgttagtattctgaaaaatgcaaagaatggagatctgttatatatggaagatttcatgtatgccttatctgactaaatcgttggtattttctacacaaatttttgggaatcatcaaatcattatgttttttccctgcaggttgagtcagaaatattttgccttcatggtggattatctccatctatcgagacccttgacaacataaggaattttgatcgagttcaagaagtgccccatgaagggccgatgtgtgacttattatggtctgaccccgatgaccgatgtggttggggcatctctcctcggggtgccggatatacatttggtcaggtaattacaagtcttacgtctcagaaacagtcctgattctctctgtttttaaagcaagtgtcgaattgacttttctcttttttcattttgtttccataggatatatctgaacaattcaatcacacaaacaacttaaagctgatcgcccgagctcaccagttggttatggatggatacaactgggctcacgtaataatgaaactataaacctttctttgcatagctttgcaaggcttaagattctgagctcatttttactgtcttccctatcaaacaggagcaaaaagtggttactattttcagtgcaccaaactattgttaccgttgtgggaacatggcctcgattcttgaggtcgacgactgcaggaaccacaccttcatccaggtctttccccaaatcccacatgtcttgtctgctaatgaaactagtgtagaagaatgaccaaagctaacttgagtatataaaatgtgagtgcagtttgaaccagcaccgaggagaggagaaccagacgtcacccgaaggactccagactatttcctgtgatcactggacacagactcatctcaatcagcagctgcaggcacccacaagtgaaaagtcacagttggctaactctagattctggtcctatgcattgtgttcaggttgctctgtttaaaattcaacttagtgcccaccaccggaatatagtgtgtattataggcgaagaaggcttcttatcttcctctataaccaagaaaagaaaaaagatacccattatgaacattgttttgttgatgttattagcttcttcttcttctcccttctgcatcagaatgtggtttcatgtgagaaatcttctaattttatttcacgttattcgttcttgaacatctctgatttttgaatagaaccttgaaattgttatgtttatttgttcttcaaagcttgatataataacaatagtcgctgaacgcatcagatcagccactcaaaatgttcgactgtgaaccttctcttgacttgcaatctaacggcattgaaggctttgttgtactcatggctattgcattgagaatgagataaataaagaacaacattgagactcagtgcagactggaaggagcaaattgatagacctctaaatgaagagctcaatgagaaagctcctgagttggtgctgagctggatagacaagtgttttaatgtatagagtcgtaatccagtctaaatacaaagtagctgtgggaagtagaaggttaaaggttgttgtaaagggaacacattctactttctcgggacttttctttggtcaatcaagaattggtgcttgtttctatcagtaactgaacaaaaccagagagtatgagtttgatctttaccaaacgcaacaaggcatacaaaggcaaatccatagtaatgacaaaagatatctaagaaataataagataagtaatacatttgcttaacaacaaagaacaatatagttcttagccaaaaaacataaaaaaacaatgaacaatatagttgagaacaatgtgatagaccaaaatcttatgtattcattcatcaaaagagaacagtttatattggaattctaaacgttttgcctactattgaaggtttcacaagaaacaaaacaaaccaaagactagaaaacaaagtgtaattcaatagtctacgttaacatgacgtgttttcgcaccgaagacaataatatataaactgtgatgacagaatatggagtcatggactatgtaaggctaaactagattatggagtcatggacgaatgaagagtttttaatttcgtgaatttcataaataatgtgagcctcgtaataccactagttgtagacagcggttctttggtggtcgatattgcatggattatgcggtccactccacgatctaattattacaactatatacatatatttatatatcatgcactatatttgtattttacaatcttaaaaccataacatatcaaaacactttgattagtaacttttgtaattttataagcttcttgtgatttttatgtgataaaacataaacgacaccaattcgtttttttttgttttcatacatattttctataatatctgtcaggatctaataattaatatactgctctaaaagtatatatcatatcaattgtctccaagttttggtgaaacacctcaaactcaagttaataagactattttggttgtattcatgttttttttttggctatgttccattctgcttacttcttaaaacaatgtagtgtccaataacagcataaacctgataagaataataattatgcgtgtagaattttggtgaaacacgtcaaacttatttaacaaaacatatatgtttcatttttttttggttaattttttcccaatttttttattttgaaataaattttcggatagtgacatataaccttatgtagtctgtcaattgtcatatttttctatttccatcatcctatatactttacctttgttaaaactccttagataagaacttccaatattttccttacctatattttaatttccagttttatatatttagtacttaaaaaattcaaatggaaaatatgtttgactctaattagacacatataatatatatttccaaatagtaaattacaaattgagaaactcatgaacaatagtgcatccacgtcgttatccaagttggatttctttctaaaacaaataattagacctttaaaaaaaaatataaataggtacttgttaaaaagtaggagagcccacaaataaggctttggccgcttctgcttggactctccaacaaaaatcaaactctttaaaaaaacaaacaaattgaagagcgattatacgatcacggagaactcaagatccggtgacgaatccaacttcttgtgacggagctcaagtcgagagagagaagactgtactagtagtagtagctgtggatttttgtgtcatcatcggagatcggaatcttcttcttcttcttcttcttggagcttctagaagtggagagaagggggaagatcaagcgacggatagtgataggttttgctgtatgtcagtggattgtgttgaaactgattttggtggatttggagaacttgtgaaccctattcaatggcctcagcttcgaaaaagacgtcggcatgtcctcaccacggtggctctcttccgcctcccaaactcgtctccgctgctcccgataccgttgctgtatggtccgacgctgacgatcagcgagcctctaaagtttctttggaatccgttatccgccctgtcgattcgtttcctgataatactgccaagaaacctgccaacaaaggtttgatttgatcgttgatcgtccttcattcttctgatgttagctcgcgattcgtttgaattacttgacttcttgtttactggaatttgttgatgatggttactttttgtgaaattggttcttgtctacttgatggcttctgattgagatctaattgtgatcactattgtggtttctgtgaagttgattttctgttgtgatcaccaatgcagggatttctgtgatgccaaggactgaaaccaagcacccattggatcctctttctgctgcagaaatatcagttgctgtggcgactgttcgcgcagctggtgccaatcctgaggtgcgcaaacttacttgattcttgacaaatgcagaatgcttgataacattgtcactgaaactgttttactttttctttggcaggttagggatggcatgcgtttcattgaggtggcatcagtggaaccagataaacaagttgtggcgctcgctgatgcttactttttcccaccgttccagccatcactacttccaagaactaaatctggacctgtgattccgatgaagctccctccaaggcgagctagacttgttgtttacaaccaaaagtctaatgagacaagtgtatggattgtggcattgtctgaagttcatgctgtcactcggggtggacatcacaggggaagagttgtttcctcacaagttatacctgatgttcagccacccatggtatgttaaactatgttttaaggaattggatctctaagtgacttttagatgctaccgttgtttgccagtctctaagtttagattcttttgattttaggatgcggctgaatatgctgaatgtgaagcgattgtcaaagacttcccaccattcatagaggcaatgaagaggagaggtattgaagacatggatctagtgatggttgatccctggtatgttaacaacatcatcgtttctgttgacaattaaggtgtacttcttctctgagcctacctcttaatgtattgtgcaggtgtgtgggttatcacagtgaggctgacgctcctagtcgtaggcttgcaaagccccttatatactgtcggactgatagtgattcccctatggaaaatggatatgctcgtccagttgagggcatttatgtacttgtagacatgcaaaacatggtggtgattgaatttgaagaccgtaagtttgtgccactccccccacctgaccctttgaggaattataccccaggtgaaagtagagggggtgttgatagaagtgatgttaagcctctccagattattcagcctgaaggtccaagttttcgtgtaaggggttactttgtcgagtggcagaaggtagatttccagtaatagcctacttgaaaccaagtgattatgcttaagcttatttctaaattggctcaacattttgtttacagtggaactttcgtattggattcactccaagggaaggtttagtcatacattcggtagcatatgttgatggcagtcgaggtcgaaggcctgttgcacacaggctaagttttgtggaaatggttgtgccttatggcgatcctaatgagccacattacaggaaaaatgcttttgatgcaggggaggatggtctcgggaaaaacgcacattcgcttaagaaggtttgacatcagttttttttttggtgttcttaccactcagatctcagtttgtgtttaacaatcggtttttataggggtgtgactgtctgggatctatcaagtacttcgatgcccatttcacaaatttcactggaggagttgaaacaattgagaactgtgtttgcttgcatgaagaagatcatgggattttgtggaaacatcaggactggagaacaggattagccgaagtgcgaagatctaggagactaactgtctcttttctatgtactgttgccaactacgagtatgggttttactggcacttctaccaggttagtggaatacgtgattcttcatttcttgagtaaagcagatattagtcatatttgcatctaatttctatagggaagacaaatgatgtgtctccgcatgagaataaatcctgagtttagtggcactttgcttgtgatttttcacttgaggacattgatttacagtgctgaatccgagtttcatttgttttctgatttgtagtttcatctttctagatatttgaagaccaatatcattttatgtcttgaatgtcttactgtaggatgggaaaatcgaagctgaagtaaaacttactggtatcctcagtttaggagctctgcagccaggtgaaactcgaaagtacggtactactattgctcctgggttgtatgcaccagtccatcaacatttctttatcgctcgcatggatatgtctgttgactgtaaacctgctgaagcttttaatcaggtacctttttatgatgctgctcttcttcttgttatttacttacatatgcggattattttctcagtatttaggaatggcattggtagcatatgaattttagaagtccctatagttcttgaaaaaaaatcttagatacatgttgtcagctggttttgctcaatagtcagcttaatccacttttatctgtaggtagttgaggtaaatgttagagttgacgagcgaggtgagaacaatgtccacaacaatgcgttttatgcggaagagaagttacttaaatctgaggcagtggcgatgcgtgactgtgaccctctttctgctcgccattggattgtaagcaaaaaccgtaccttgcatgttctcgtccatttattgcatgtttaactttcacattgtcagtgctcgtacccgtctctgtaatatccttgtttatatttctttcatccttgactatctactagtctcatccttgagactggatttgggataagagatcacctgagcatccctaagtttcagtcatgtgtttatatagtctcatacttgagttcctttaccaaaaaatcatctcagagtttcattgaatatgatttgtagctgaagtatagatggtatactcacgcaagatgtatattcaacacaaatcattgtaatgtgttatcaggtaaggaacacaaggactgtaaacaggacgggccaattaacgggatacaaacttgttccgggttcaaattgtttgccattagctcgacccgaggcgaagtttctaagaagagccgctttcctgaagcataatctctgggttacccgttacgccccagacgagaagtttcctggaggagaattcccaaaccaaaacccacgggctggtgaaggtcttgccacatgggtgaaacagaatcgctccttggaagaatctgacgtcgttctttggtctgtatccttgttttacttatctgattcagttaaaaactactacttaccaaattatgtgactttcaatgtggaattttcatttgtcaccaggtacgtgtttgggatcacacatgttcctagacttgaagattggccggttatgcccgtcgaacatattggtttcacactaatggtaagttaaatctttgactgtaactttcaatggaaaaaaaaccttacaaaggattggttaaaaaatgttttgggttttgggtaaaatacagccacatggatttttcaactgctcaccggcagtagatgtgccaccgaatccatgcgaattggagactaaggagagtgaagtcaaagaggttgtagcaccgaaagctcttcagactggtttactttcaaagctttgaagaatatgaatatcatttgttttctttctttgatctcttaaaaaattggaggcgttgctgttggttaagaacaatttcatatttgaatcttttattttcgtgtttggtgtgtgtgtttgcaagactaaaaagacctttgtcattggaatatttctattaaaatttcatatttgaatcttttattttcgtgtttggtgtgtgtgttcttctatgaattgcattagtttcatactttggaaaagagaagcaaataaatataaacattggaagagaggagcaacatctctactattttcattttataagccaatcagagcgctccatgtcataccccattctcaccttttacgtgatttcacacccactctcactaatcgcgtgttgagggcgtgtctacgttttctgagggttctaacccaccaaatggcttgttttgaaacacactcgctcttttttaaaaaagcctcgagtgcgtgatttcagtgtttttctcctttaattccaattcaaacccaaccgaaatcaattgaatttttcaaaaccatgtaaatcgaaccgaaattaaaaacacaaacgacaaactagcaattgtcacttccacaattgatccaactccgacgaaccagattgataattttgattcgattccacacagataacatatagtccaaaccaaatgcaattcatatagcctaaaaatcttagctaaaacccaaagaaaaacactggagttacctgttgcataagtagcactgctcttgcccacatatatgtagcagagacgagatggctccaagtcccatggagtcgctcttgccacaaatcaattcacaaattaagaaattgagctcagaaaatttcagaagaattctcgatcataacattatgcggtggtggtggctgtgaatagccgacagaagttgctacggtgggtctcataagaaattgattcggcatcgccgccggtttcacggtccacatagtaactccgatttgcttgtgcggattttattagcccttctctctccctttttcgtggtgatggtgaatccagtctcacatatgacatatctaccgaaaagagaaaacaagtgaaaaatgaaaagaagtcatttgcccactttgaaaacaattattgaagtttaaagaatgggctatggcccaacagaaaaaatagaggaaaaattgggaggaatgaatcattaaacgtgggtttaggtgggtcaagacacaaacaactaaccaattaagccaaccaaaccataatagttcatgttcaaatgattcattgctcccatttttatgcggggtcagctgacccacctttcttccacgggtctgcccccgccacaaccaacagacttctgagaagattctccttaattaattgaaaatgtaaaatttattttagtagaaaaagtataatattgtagaatttttttattttttttcattagtagataaagtaaaatttgttttttacttagatattaacgaagagaggaatgattatctatttctttatttggaggaatgattatttttagtctaattaagtattggtttatcaattattttatttattgatttatttgtcagttttgtttttgagctagggttttgagaaggtttttcttgttctataaaaagaggacttttatgcgtgaaactaacaaataaattttctcagaaactcattcgtctttgctcaaactaacaaaaatctacgaaagcgtttttggtcagctatgtggaatcaaaagccgtgttttaggtttgagatagataacttctcggagaagaaagatgtgatagcgtctaaggcattcgtgagtggaggatgcgaatggtaaatcgagaagaattggatatttcattagctttgttattcaattctctatttatattcaagaataacgttttattgaaaaactgatatttctttgttttatattctttcaggttcctttacctctatccgaagggacagagtcttaatgatgatcacatgtctttgtatctgtccgttgcaaatagtaaatccttgggaagtggatggaaacggagtgctaaattttacttctctgtgctgaatgaatctgacaaagaactctacagatcaactagtaatgaagtttatatatcttgcatgtttttttctttctttttggtgatttgtcatttgtgtctggatttttaaacgatctagtatagatttcaaagcagcattgactgtgaagatggtttatttctctagattgatggtatactaataagaatattagacttggtttgattccgactcttatcaactggtcatgccatgctgaactttatataggatgtttttgcaacaggaaatagcctaaacttatgtttgaatcttgaagaggtgaaattatacatgagcaagcgttttatgtcttttctgtttatgatttgcagttagccaagaattc

SEQ ID NO: 368 - DNA, 115310 bp, Arabidopsis thaliana
gaattccgcctcccctccaccacgaaaaccgactctccagctcaacaagcagtgagttgttttattttgaatcatttcattttatcataaactaatctttttgaacaaataacaaattaaccggtatgcatcagactaacccatcttgtccacttttagtgagacaagtttctaatattcgtggtgttaaatgctttagaaagtcagtcacgaatgtacatttccatacgagatagagctactgagaaagccacatcacatattttctttccacaaaatggacccaactttttgttaaaactagaccagagtagacttaaaaacgaaagaatcatgagagtagtattctttgagatatgtgataaagttagttcacgataatcctaatggaagttacttcacaaccattttatggaatttacagtgggtcaaatgtgttcatctagtcaaaattgatatcatttggtttgaatcaacaaaagtatagccactagaaaatcatcaattggttaatgtattttccaataaactaaaaggcattctagtagctattgttgttcgaatcggattctcttatagttaaattgagactttttcttttcattgagtcaatggcaatcaatggaagttatgtatttttcgtgaattttctttataaaaattaaataatcatatagtataacaaaaaaatgcgtcacgcattcataaattgctttcagatattactacagttggaatctattaaatgggcgtgtcttgtttccacaggaggtatggacactttgcagaatcttcaaacgagtcacatctcaaagaaacccaaccatcttaccaccaaaccgaaaaccggttatcactttaaccgacacttgttctaagaccagcagcttagattccgaccacacgagccaccgtacagtagattccatgtcccacgagccgccgcttccacagccacagaatccttattggaaccaacatatagttggttttaatcaaccgacatatactggtaatgataataacctcctgatgagtttctggaacggcaacggtggagatttcataggagactcagcaagttgggatgaacttagatctgttatagatggcaacactaaaccctagtaataaagtttccttttttcagctttgtacaaaaagataaaacaaacgattgcttttgttttagacaataaattaataattaatgatatatctctagtgagtaaattacacttttgatatttttgatctatagtttgcatcatatgttaagaagaagtaatttgtttcttctcgacaggaataataaaaatcacatatatgatgaaattactacaaatgaattcttaacacgccagaggaaaagtttttttctgatacttcttgctcaagaaacaagtcatttctctgctctttttcattcatctttatttgatcaaatcctctgcactcttcacatcttttcgaggcttaaatcttcgaaattgaatttaactattgtaaatgtactgataaagaaactatataggaatttaggatcaatgaaacagattcttgagatgcttgaagaagtgatcagacacaatctgattagtcctctcggtcgggtgaaatgcgtcccagaaaacgaacttattggcatcactgcaagttaacggattgtcctggccgcaaagaaatcccatctcgaacaatccagtaccgcaacaggcagaacttgatatctctagaccgtaaagattaggtttggtaacaatatcccacatgatatcgtaaggattagcgaaataaatctttattccagtaagctctctattcagttttgtcaccaatcttctcaatctcccattgaaatctacagccaaatcattataactccgagcacagctaaaagggtcgtcaagatttgtcactctctccagcggtagacaccccataggtgagattccagtgaaagacattttccgagctccaagtctgtaaatgtcctttaagaacacctcagcaatctcgaccaggaagtcttggtactgactgatgctgaattgagatctcctgtccggtaatgtgtagtagttctcaaggaaatcgttggtgcctatgcttactatgtacagagattctctgatgattttggcagctctccgatggccgagataggcggaaaggttgctttggtattccttgaagtactcgacctctttccataacggaatcacgccctaaaaatgtcaaacaagaaaattatctcgatgtttcttgttacgcaagaaacagccgtaattaggttgtttgaggtgaatggtggacttacaagcacatcggctgtggaattatcataaccggtgccggcggaggcaaaacaaactccggtagcaaaatcagatatattataggacggatctaggtaggctggcacggtcggtttaaggccataagcctcggaagtgaaatcggaggagagacggccgttacaaaagcgtccggtggcgcgaccaccagggaagtcacgaccgtaaggctcaaaattggctctggccattgttgatatgaagttattattgccggaatctacggaagagtcaccgaagactataatcgccgggatttttgctccggcgatggagacaagagtggtcaaaataatgcataatattgatggtgacaaataatgtgttgccatgctaacaacttgtttagcatgcggcgatggtacctaggaatttcattcagttatatacataacatgtagtatttaataaactaaaattttagatatatatgtacgaattctttgtatatgaattgggttaatttcagtgtactttttaagttattcgaattcggtgaatcaattatttttattaggaacattagatttaagatatttgatctttcatatcttttatttgagattttttttttttttttttttggtttcatatataaactctacacaaagttgattaaataaccaaaaaagtggacaaagttggaagtatttattgaattagaagttggtgggtgtatgatatataatgcatgcatgctcagtgcgctcattaacagatatctacctaaaaccagtcaagtataaaaattagatacatcatattgataaaattgactctaattgtttacaacccttcatagcacattcaaattatgttgaattttagtagacgtgtcagtaatatataagtgaaacgccacatgaatgcaaggtggtaattttgctataacaggtgagaaaacacaaataagtgaaatatgtggaagacaaaaaaacgaagaaatagtgtggaagggtattaaattttggttatagtgagaaaagtgggtggtgaggtaataaatgaaacggcacatgtagaagagatgtataatggtaggttttaataatgtacgtagttctggtagttgcacctccacacttatgatttcgtctgaccccgtgaaccgcatgattcgtaacaatcatattgttttaatagtttaatccaaacctaataaaaactaacgacgtacgaaaatggtgtttatttgttattttttattcttttaacatacgattacttattatttgatattgattaccgatttgttctcaatagttgtcttattagtgattcaggatgttttcttcacattagaaaaacaagcaatttggctacaactttaccacattttttacgtcaaacaaatcggttataatataacactacatattttaaaaaactgaaatgaaatattaatctactaaacacatgtagcgtttgacaaaaaagaaaaagaaaaacacatgtagggtttgttaattgaatatgaaaattgaaaagtagatttgaaagatagacatgggaatatattggaattacgtgcacacttaaaaatgaaatgtttggttgggattataacaaattgaatgctaatcagtttgttcatcacaatatagttaggaatacgttacacttaaacagtattaactctgaaagtcaaattcgaatcttttgctttatttacaaaaatacatctaagtaaaacaacatacatttttctgaacttgatcttttattgatttcattttataaataatcattttagattttaacaaactatttgattcgtataaacacagaaattctgaaaggcagcctttcatgaaattcctcatttgtgtaatatgaatggtaggaaaacaaaattgactggtatattaaaataaaaatctattgaattatgtcactatctttagatcatttctttcaaaataattgattcaagtatttttgtttacaatacaagaatagtgttgcaaattaaaggaaaataataacttttctacttacaaattttccaaagatttgggggcatttccaacataggttctccgttcttgtttcctctatcttttaatttatttattttaaataaagaattttcttaactgttcatatgtggttagtcacagtcaaacacacttagaaagactcttctacagtcaattaaagtatatcatctatttgatctttaatttaattaaaaaatcccgttatagatgtggctggcttttgagctaattatgtgactattgctcaagagcttatatatatatatatatatatatacaccacaaaatctagttgaatataaaaatacgtagaggagagcgtattggaaattaggttgtttatcatagtaaaagttggattaagtaattcttacctgaagttttacttttgtagtactaccaactactgttaagcgggtaacttcacatttcaacgaaaactacgaatcagaaaaacaaaaatactaaagattccacatgtttgaaccagtctcactgaagagaagaccatcaccacctacaatattctcttattttttaaaatgttttcttgtttatttttcttgctttctggtatgatatggctttctgtctcagtcaaatagatatcgaattgtaacttattttaatattttcgattccattgactttcacaaaatcctctactcttttttatgttagctcctcttttgtccttagaagctataattcaaaatcactcataggtctctcttctcttttcttttcttccttattcttgaatggttttattaatattagtaatctcagcagcagcttaatgtcgaccaaactcagtatatttcttcttggcctgattttgttctctgtctcaccattttccggagactgtagaactctttcagggaaacatgagcattactcttcatcccttaacatgtttaattcccaagatacgatgcgtttcagttctgcttcttcttcaacaagcaacgattgcggtttctcctccaaggaacatgatccttccaaggaacataccagagaatcggtgaagcctcaatcaaggattaaacaagaaacaaagagaacaacacattcagttgttgatcttcaaatccaagacctcacaagaattaagacgcttcatgctcggttcaacaaatcgaagaaacagaaaaacgagaaggttaggaagaagattacctcagatatttctttggtgggagctccagaggtttcaccggggaagctgatagcaacacttgagtctggtatgacgctcggttctggtgaatacttcatggacgtgcttgtgggcacaccaccaaaacacttctcattgattcttgacacagggagtgacttaaactggctccaatgccttccttgctacgactgtttccatcaaaacggtatgttttatgatccaaaaacgtccgcttcattcaagaacataacatgcaatgaccctagatgcagccttatctcatcacccgatcctccagtacagtgcgaatcagataaccaatcgtgcccttatttctactggtatggagacaggtcgaacacaactggagatttcgcggttgagactttcaccgttaatctcacgaccactgagggaggaagctcagagtacaaggtgggaaatatgatgtttgggtgtggccattggaaccgaggtctcttcagtggtgcttcaggtctgcttgggttaggaagaggacctctttcgttttcttctcagcttcagtctctctatggccattccttttcctactgtcttgtcgatagaaacagcaacaccaatgtaagcagcaagttgatatttggagaagacaaagatttgctgaaccacacaaatctgaacttcacttcttttgtgaacgggaaggagaattcagtggagacattttactatatacagatcaaatccattctagtcggcggcaaagctctagacatacctgaagaaacatggaatatctcatcagatggtgatggtggaaccatcattgattctggtacaaccttaagctatttcgcagaacctgcatatgagatcatcaaaaacaagtttgcagagaaaatgaaagaaaactacccaatatttagagatttcccggtccttgatccttgcttcaatgtatctggcatagaggagaacaacatccacctacctgagctcgggattgcatttgtagacggcacagtttggaatttccctgctgagaactccttcatttggttgagcgaggatttggtttgcttggcaattctaggaactccaaaatctaccttctcgatcatcggaaactaccagcaacagaatttccatatactctatgatacaaagaggtctaggctagggttcacacccacaaagtgtgcggacatataacctcttgatagattataaacacaaagtaactgtacacaagataacacatgaagaacctattttcttacattgtaccaagattttcaaagaaaagatcaacctatatttatcattggacaatctgatttctgaatacaagcaactcctgctatatgcaaatttgacaaagtatataaatttatacttaagggaagagttgaacatagccagttaagatagcaatagctagaatgaccaaaggaggaaggattacaaaggcgccaatagtagcaaagaaaacagaatcattcctctgagagacctcattaaggtagctttgtctcttaatgttccttttctgagatatcgttaagaatttaggactcactttctttaagttcttgcctaagggaatgctgaaatcatcgtctctgtcaccaacaagtccagccaattggtcacgaatagtgagtcctcttgagccaccaccatcacttaagtaccctgatgattgatataaaacctcaggtgattctacgattctaatcaaaatccaattctaagagaaaagagcaagtcatgtaccatcacttgttgaagttagctgctcaaggagatctagttgtgtgcgtactgatgaagaagacgaagaacctacaaggaaacgaattcgatggtaatcagaactcaaaagatgaaactttcacatttctacatagaaatcacgcaaaaagatcgaaacttttttctcaattcctaagttcagtgaagacccaatttggcaaattccactaaaaaccaagaatgaacaaccataaatcgggtcatgtaccggagaaagaagacgaagaagtatcgttgttgttgttgttgtcgtcagtgacgccgatttcacttcgctcggagcggacacgtgttgctggaggagaagagagttgcagaaggagatgatggctctgtttggatcgagaggaagaagatgggtttgaaattgggtgaagagaagtggagaagaagttcaaggccatcacatgaaagaggctccaagcttcgccactgcaaaaattcgttttattttattttctatactgtgttcctctgagatttcaattttcaatttctgtttgagaggtcaggaaaattttcaaatattgttttggagaaaaaataagaattattttatgtcagaccaaagtaaaccgcctcaaattcgtttgtgacgaacacgtgtgacgtgacgtgttaaagcaaaaatgaaaaagacgacttcactggggatcgaacccagaatctctggtttcgtagaccagcgccttatccattgggccatgaagtcattattactatttgtataactatacaataattgtatcaaatattaaaatcacctagtgcaacatcaatgaagacatagtagttatatggaattttgcttaaagttttcttatgtcaaattcttaaacttataattgagaaatttgtccctatgattcaagtaagaggaaaacatatgtaaatgtacggtttaagactttttgtttatggttgttgaaatatgggcttggctttcctcttttatcttgattttgataaatttatatatgacactttacctcaataacaatttgtgtattagaattctaagcttcttttttagcagtaaattgttacgtatgttttatcataattaagtgttgttttgaagacgaagataaaaagatagtacatgttttatttttgtatctttttatgtgtgtttattcacataaatgttttaaaacggagcatcgagtcttggaagtcgaaactataaaaaaacggaggtagagagaatgtgttcatacggttattgttgtattgagcattgaaaggaccgtggtactaggattgtcggtctcctaataatagccgttgtggatgcttatgtcttattggtggtcaaagcaaaggagaaaagtttgaaaggagagacataaaaattgatgaatcacacacgaaagaaaaacttttcctctttaatccatctttatatctttacctataaaagtgttacaaaaaggaaacgcaataatacacacatacgggtgtatatagtatatacgacaattggatttgctttaaataattatttctatatttgaaaacaccaaaaatcttcgagtgatgaagcttacctatatgtgacttcttttgcttaatgatgggatcgaagaatgccttgcgaatgctagccatgacggcataaaatcaaaggattcaagcataagtttgattgaatctcattcgtttcccatccacctcaataccaaaattttgtagataaattacttaaatcgatttgaagtacgtagtctgttgaatttatgatctgattctaatgacacttgtcaacttgcgccatcaccccatatgggttcattatctatatcattagattttttttttttttttgtaaaaagaaatatgacatatgggagtcaataatagcataaattacacacatggagaagtaatataaatctagtatcaataatttgatcaagagtaatcattcttttctgactttccatcacattttctccatcaaatcacataaattcaaaaactaacgaatcacaaaactttgggagaataacacttgaggacgaatctagctaaaaggaggtgtaagacacgtgagaagcacgtgatcacatggcagcaacaacaatattcagtaaaattggccattcttcctctgcaaaaacttggccttagcctgtaactccacccaccatcaaccaatcacacaacgaccaacatgctagtgcaaacgtttgtagtataaattattagggacttaccatatccaaaatgatctttattaaaacttaaaatgaatatgattatgtttaaaagctgataagatttattaatctgtaggcataaaactttatccaaaagttatgcttcaagtaaagcctccatcaaaggcttttaaatctctctctctctcatatgaattcattttctccaagaaaggcacattggtttcttagatatgacttatggagttgtaacattccccaaaacaaagacaaaaatttctctaaatgtgcatttgaatgctatatattattctcctcgatcaaaataaaaatactaatataaagtcttcaataagcttatagtatattataataaaatatttgaagtacagaaaatttttttgtaaattttgatagaatccaaaactagacatgtgaaaggaagaaaaaaaggtatattgaagagtgagaataatattgacctaaaaattccaaagcctgtgtttgggaattccctcccctatctatctctctatccacttcaattttttttatgaaataatttttatttatttatagataagtaaaagtaaaaattgtaaaaatatatatctttaattcttcaagtagctataaatgtcacagttgacaaatccactgtctttgctttcccttcactgctcacttcttctctctttcttgtttcctccattgcaaacaaagctttctcccactaaaccatttttcaccaaagtttttttcttctgttccccattaacccattactgtgtaactctatatacacacacacacacacttccttgctatattaatattttttttggcttttaaccataaccctgaatcaagttccttgtgggtaaattaattttagctcaaactctacaattcattattggtacatctctgccaattaatttactgttgtttgcttcagaaacagattaaaaaaacggagccttttctttttccattgtttcatctgttctgttctaagatgaagacaaatctaaaggacaaagctttagtctctctcccaacatactaactaaggtaacttcttcagtcttcttttttttccataagacccagaaatctttccttgaatgttttcttttgatatcattatgtgattgattctctgtaaattgtctcttgcttcaaagttaagtgatgcttttttcgatgatttttttaaagccgagattctcttgtttcttcaagctcccatcttttgtggggacacgtaatgcccataacttatttgttgatatgccgctatatttttacttataccaatgaaagtgtgcgtttttttaatttcttactgtgtctgtgaaggttttttttaactcacatctattagattgttccatgtggcctcagattgagttatctaccattgcttctacgctttctgttttggtggctaaatgtgaaatgagaagtgtgaaagatttctttttagtccttgtgtgatgtatgcaagtgtttatatgtgaatgtgatacactctcttgttttaggtgattatagtgaagttgtaagagaagcatacaggaccagagatgccacctgagagttctttaaacgctgaaatgtccaagaagatatcattttttggtttgaagggtttgaagttgtgggtatgggtatgtttggtagttggagtattcatagttatgattctctgcatcttgtctctatggatcacattccgtcggaaatctagaaggtcttcaagcaagtttcctttcaaccaaataccacatgtgtccaaagatatcagagtcgacagggctgggtttcagaatcctcaccccgaaagtttatatatagaaatgaatgataaatccactggaaaaacgatgatgtctcacttgggaagaaccaagtctagtgataatgacactttgagtcaatgtagctctgtgaatcaccatgagagagcttgtagttctcattctggtgaagaaggaggctttggaagtgctgggagacagtatggaggaggacctgtaacagcatctcctttggttggtttaccagaaatatcccatcttggttggggacactggtttactcttagggatcttgagctagcaaccaaccgttttgctccagtgaatgtgcttggagagggtggttatggagtagtttataggggtaaacttgttaatggtaccgaggttgctgtaaagaagcttctgaacaatctgtaagttttcaacttgaatatcaaaatgtttgtcaatcttatgtttttgtaacttaataatcctttcccaattttggtctctagagggcaagctgagaaggaatttcgggtagaagttgaggctattggtcatgtacggcacaagaatcttgttaggcttttaggatattgcatagagggagttcatcggtgagtctcacttgtctttaatccatttgagcaattggattgtactgaatctaaatataatgatgaatgcaggatgcttgtttatgagtatgttaatagtggtaacttagaacaatggctacatggagcaatgcggcaacatggaaatctcacttgggaagcacggatgaaaatcattactggtactgcacaagcgtaagtggtttgaaacagtttagcttttgttggatatgttcaatgcttgattattaaaagggtctgcaatttgtacaactttacaggcttgcttacttgcatgaagcaatagaaccaaaagtggtccacagagacataaaagcaagtaatatattgattgatgatgagtttaatgcaaaactctctgactttgggttagccaagctcttggactcgggtgagagtcacatcactaccagagtcatgggtacctttgggtaaagtccaaaactttgtaccctcctcaggccattaaggttattattatcttctcagatgatgtccttacaaagaaatcattgatgttgtttttgttattgttttcagatatgtagcaccagaatatgctaatacaggtcttttaaacgaaaagagtgatatatatagctttggtgtcttgcttcttgaagctataactggtcgagatccagttgattatggtcgtcctgctaatgaggtgaggcttggttaattggtcttgattttgttaatgtatcggaaaaagttatgaatatgttaatttcctgaaactattgaacgggcttgtatattggcaggtgaatcttgttgaatggctaaagatgatggttggaacaagaagagcagaagaagttgtggatccaagacttgaacctagacctagtaaaagtgctttgaaacgtgcactcttggtttcccttagatgtgttgatcctgaagcagagaaacgtcctagaatgagtcaggttgcgcgcatgcttgaatctgatgaacacccttttcacaaggtactaaaatattcttatgatggtctaaagctgtaacaatatagttatatacatgtttctgtattcataaatgaaacaagattttcgcattttggcaggagaggaggaacaaaaggagcaaaaccgcgggcatggagattgttgagaccaaagacgaatctcttggtcctagtggctcagagacaaagccttagaagaattgtgaataacaaatagatgagatgcaaatgccattagacccggctcagtagcatcttcaaagtcttgaaatgctctgtttctctacttagcaactaattgattgatgataccacacgtttggttgtggaaagttggggacaaagaagaaatctcactcggatgatcaaaagagcctgtggagtgatgatgactgatacaaatcttaggaggcattattatttttttaatatttatatttttttttggctaattgttcctgtcttcttgtctgtacggaacgtttgcggtttgtcagtcaaaaacacgtgtttaagatttcgcaagaaagagagatgtcttttgtagtagtaaatctaatcaatgaataaatgacgtaagcagaaacagagtataaggacaaaagaaagagacaaaataaagttcaactataatggctattggctaagcttagagctcctcctataaggaatccttattagttgttagtaacttagtatttcctttgttacaaaaacaaaaaccaccaaatcagaatgtgaaaaaactttattgaacggggacaaaagaatacgaaactgaattatcaaaacaataatttaagtccaacgtccataaaaaccactaagcttttcttgcatatctgtcaaatgttgcgtcgtatttgtcgtattgttgttgtgattctcactttttcacatcattaaaataagttgaattagattctttaacatgttcccatcacgtggccagtttaaaagctacaacagtaattctctttactttgcataatgtacattaatttcggatattgaagaaaagcatgagaaataacgatattacaagacctagcccaagttgcgtattacataattatgcccataagctctactagataacaaatgaaatagttttgaaaccaattgatcagataagcccatacaaggcccattatttagatgacaattgtaattgtagcttaaccagagcggctaagttacaaaccaaataaaaaggggaatggataatgttaaaccctacaccgatccaatgtcggaagaagaacaaaaccctgatccaatgtcggaagaaagagaacaaaacccgaatccgatgatctacctatgtcccgatctagtggaagaaatcgtccttggattgccgttgaattcaatcctcagattcaaaacggtctcaaaacaatggagatcaatccttggattgtgagatttttgatgtcaatattggtgaatggcggagatcgaggagcccccctccttattgggtggatcccagaaggaagtctgcgtgtgttcagggctccatctactggttaaatgtcaaacctttccaggtactagctttggatcttcacacacaagagttccataatgttcgctcaagaccaactcacgcaacttatgccgaccaacttgtcaaccttgatgaccgtctagccatagcctaatcgtttttgcatcctccttggatactatggatatggaccatggatgttctaaaagatgatggatggaccaaggcttactccatagatttatcctcctgtagagatcttaccgtggaaagtgcattttaggccggtggcggtttctaagcatggaaatgtttacttgcatgacaatgaaaagaggttgttgaaatactatccaaagaccaacctccttcgttgcatctctaaagacacttgggtcatatcccctatggttgagaatgtgcttccacttcggcctctaggctctattcccaagacattcggctacggatccatatctcaggagcttaaccacatgccgggatcgaggatgtccaaatttcttagcagaatcccaactatactgtttacaaccactctagtgtctcaagttgtttaccgctatttgtcttgatgttgactttatactcgctgaatgttgttatgtctgtcagtatattaagtatgaacttgtttgatctttgaaacatttatcttcactcttgcttgtgacttctacattttcattttaatggtgtttttaaacctgactgaatcggaaagagcatcagattgaattatacaacttccaaaatataaaagataaaccagtgaagaaaagagtttattaatgatttcctaaagattaaatattctacatcttacaatttacaatcataaaccggattgatttcattccaagagaacgtaaccattcggatcatggactatcattctacttctactagtcgtacgttctatgttctgaggaacttttttgcagacctgagcatgagactcagcttcttgttgaaacttcttcaccatttcgtcaagctctagtttcctagtctccacattctcttctgccactggctccttgagtccaaggtagattaaaccagcgaccactagcaccaaacctgagacgaacagaacgactgagaaaagcgcaaaggcttgtggaaaatctttggcacctggtatcccatctacgttgattccaaatagaccggtcactattgtaatcaaaagaccgactcctccaaagattcctaggttatgtgtgaccgtgaggctctggtcctaatcaagccaaataaaaaattaagatgacttggagagttatgtacttatgtcatcatctccgaatatgaaaaatctaacctgtaaccatgctcgaaccgtgttttgcatgacatcttggatagtgaataaccgacctcgcacggcctcttgttcattgatcatatcgcgggtgctcttttttattccttctagcaagtcttttgttctattgccttttagttgctgaagaagctcgaacacaatctcttctctagcatgaagcgaccatttcacccgtataacctaataaataatgaacaacaagtcacttgtatgaataacattaatccagattagctgatctcatcttgtagtcaatcaagaaagccttacctgggtcgacagccttctgatctcttgattcaagattgtagtgaacagatttgggtcctcgtacagtctcctggatatcaacaaaaataagttattctgctccatcagacatatgtcaaggaaagaaaatactaaagtaagagaaggctcagttaaagtacttattcataaacatcaactcaacttcatcagctgcaccaaatatatacttccggaatagcctacattaaggatattgatatcatcaatcatcacaaggtcaaatccagagaatgaaaaagaatcaaaaggttctctcaacatttgactcccatctttcaaactctaagaataagataagacaaataggttctatcaaagcaatacaaaggtttaacaatttcattggctacaccgtatagaccatgtaaatgtgtatccactgctaaagactttcataatgaatactaaacttccccaatatatacaacttttttcacaacttaatctagattcaagggaagggaaatacctatcatcccagcgtgcaaggcggcatgcaagatgtgctattagttcatgaacggttctcggaatgcaggctccaccagcaataagcatttcctggtaagacagaaggaaccccagaagactgaaaaccagttttgactaattgatcaacgagtaaaggaaaacaatgattcaaataagaagaacaaacctggacttcagtaatacctaagacactaatgttcaaggcaaagcctttaacgtgcaatgcagtcaccagaaaattctgtgcttgccaagaccttaagacaataggtatgtcatcttcttggatgaaaggatcacccgctgattgtcccaacagctcaaacagcaacccaccagcaactctgacaggcacctatccaccaacatattaacaaatttcagctatagaatcatagcacagctcacattacaaagaagcaacataactcagatttttgttacctcatagaaaatatgtttcattcgttcactaatcagtttgctttcgtcccgcagagcaagactgaccgcgggatgtaaccaatgcgcattacgtaaccacgaggcaataccatgatgggtagcatcaagatgacaccaccaagttggaccagcaagtggtcgttcccagtaaggagcagcaagctcagcaacagtggcttcatcctcatctaagtcaatctttcgcaaatcccaattattatcaacttgaacagtctgaacaagctcagagatcctatcccatccaattcctcgccaataactcctagaatgttcttcgtcttcaccagtaccaaattgatctgtttcacattcctgtttctttctatcacaacaacaacaacactgtttaaaaaaacactctacaagaaaaagaaaaaaagagactaagcactaatatgtatcaacaagttagtaacaatcatcatacattctgagagacgaatctccatggacacttgtgttattcttacgacgaccttgacaaaactcgaaagcacagataagtccattggtccagagattatggtaacctggattcccgttcttgtgattcgcattcatgcttcactttaaatcacagattttcgattcatatcagtcaaatctcgttttctgagtaaaaaaaacaatctcgaaattttaggctgcaatttcacgtaagatcatcaggaagcacggaattcgaaagaaaactaagccaaaggagtcaaacgcaacaaccttccccagaacttccctgaattttctgcaccgattcgaagaaagaaaacaacaatttgactgagagagagagatgaatgtggcacaggtcgaggacgacaagtcaaggctaagaaccaaccacacgtgtacatttacatattttgggccttattggaccttctctgtaggaccaatttaaaagcccaataagagtcgagtatggaaggcgataaaatacagagcagtggacgactctcattttttgttgtttctcaactctcgatcagtatttgattttagttttggtcccaaaaagggtataaatttggttgtaaatagctacaagatgtttaagcattattatgaatctctctgttaaagaagacaattgtcatgaatcaaatacttaatcatctgttgagaagtaggctgccagaaacttttcttttttttctttttttgcaaaataaatttgttaactattaatcacaatttttggtgacaacttaaccatctcctactcctcacaatcattcttttggtgtctctaccatttaataattcaccaaaatctccttacttaaactcacaaactcctcacaaattttctgaatctttcagttgaacatataacaacattcataacaatggctggaggtacagctctaactccaacctctgtaggatccaagtctgttccaatgaggaaccatgaagcaacagagagaggcaacaccaacaacaacctgagagcattacccaaagccgtccaaccggtttcatcaatcgaaggagagatggctaagaggccacgtggcagacccgctggctccaagaacaaacccaaaccaccaatcattgtgactcacgacagtccaaattccctcagagctaacgccgttgagatcagctcaggttgtgacatctgtgagactttatcggattttgcaagaaggaaacagagaggtctctgcattctcagtgccaatggttgtgtcaccaatgtgacattaaggcaaccagcttcatcaggagcaattgtcacattacacggacgttacgagatcctctcattgcttggatcaatcttgcctccaccagcaccacttggaataactggtctgaccatttacttagccggacctcaaggacaggttgttggtggaggagtggttggtgggctaatcgcatctggtcctgttgttctcatggctgcatctttcatgaatgctgtttttgatcgtcttcctatggatgatgatgaagctgcctctatgcagaaccagcagtactaccagaatggaagatcccgtcctttagatgacattcatggactgcctcaaaatctgctcactaatggaaactcggcttctgatatctactcttgggggcctgcgcagcgtgtcatgtcgaaaccttaatactactgctctaatctccacgtttcatcatatcaaatgccttaatcttattatctcatttaccttggaatcaaagataaatgtgtctgtaggttgagagagaaccgtaagtctggttaagaaactgaagcttatctccctttgtagtttgtacctgcaacagtaaaaagaaaaaactgaaaaaagcaaaagtaaatgattatgaattttaagcacaatcctctaatttaatacgaaaatattacaatatttttatccttgatccaaagtgaatgttggccattaatagcagaacatgtgaagaatcatacaaactggtgatttctctttacctgtgtgataccaattgcagttgcaccgttccagcaattatttaggaaactgagctagcaaccaacttctgattttactccactctcatcccagtttcaacatgttatataatctgtaaatctctagaggatttttgagggtttcactaacaagatacaaactcttgacgtttcagatatctggggattaaggaaataaacgcggtttctcatgtttatgattgggtactttcatgagcaatgccaaaaacattagtacgtctatcaccttaaacatcatagcctatttccctaaatccctatttcattatctaactaccttgaattaaaatcagtacttctgtgggtagaataacatgtttggtgatgctgaagctaatcgttatgtacttatatctagccagtgaagacgaaaatatgtgaaagttttctccttgcacctcacggaaaacttagtagataaatcacaaacacattaaaactgacatcgaatgataaactaaccttcaagcacaaacttccaaacttttctggatttggatcaataacttgtgctgtgcgtttccaaaccaacattctcgatgaagtttctttgaaagattccgtttaggacgctttcctgtaatgatcacacacaacagaggcactatacatggtcagtgtaaactgcatagcatgtcatggcattaattagagataaagacatataatcatgcctgttataaatttcaatagttggttcaacacatgcataggctttaaatacgtctccaggcaatgatataaatacatgcaaatgtacatgatagacaacaaatcatcatcatcaaatataatcatcaccagtttctccatttatttttctaccaaaaagcaagaaatttctcagaaaatgaagacgaagatgttaataaccctctttgcactagtttcagtagcaggaacatcagaagcgactggtacacttgctgcacagcagaacacaagcattatacctacatacacactctggtgcatggaaaatccatatgcctactttagaagagtgatttcgagcctaaaatgggcttgcaaaaatggtgctgattgctcaccattggaaaagggtggccgttgtcaagacctcgacaattacagaagccaagcttcttatgcattcaatgactattaccagaagaatcctatacccagaaactgcgatttcaatggtgctgctgtgcttacagttcaggacccaagtaatactaaacactttacattcgaaaaaataaaaccaacctctgatcaaaattcctagagttccattgtgatagtgtctatatacgtcagaactgatttttcataatcatcttcaatttgtgattgttgttcttcttcttatatctgtgaactttgattgcaggcactccaacgtgtaagtttccatctaacaggtgagcataagattcatttttttttttccatttcgttaaccttccggaagaaaaacacagtagatataatttatataaatcaatttttcagcactggtccatacccactgacttcttcagtaacaagaactgcaactccaagcctacgaagcttcttttggggttttgtattcacatacctggcttatagtgctgctcagatagcttgacctagaagaaaactgtagaacaggacaatcaaggtgtggttttacgagaagaaatattttgtataaataacaatatgataaattagtataatacctaaaatgatatcttccgctacatctccaaaactatcaaattgcttatttctctgccagataagtgaaaccaatcctagttgtagcatcaaacaattcagcgaaacctgatttaattgtagagacatcccagtttaagatatcgagtaaactgtaaatctctgcggatttaggatgcgttcccccacaagatataaactcatgaacttcaaaatccacttcaatcgaactgcagccaacttctttctccatttgtctttccttcatcaaaagcctctgctcaactgcctcttcgaacaagccataagaagcataagcattagacaagagaacataaccacacgtttcatctggatcgagcttcttcaaacattttgctgctcgtttagccatctcaacattaccgattttcctgcaggcagaaagcaaagaactccatataacagtgtcttcttccaccggcatattctttatcaatgcttctgcttcttcgaggagccccgctccacccagcacattaaccattaaagtatagtgttttattgatggctcaatcatatatttttctttcatcaatctgaaaaattcatcagctctatgtacttccccggagtgagcacaagctgttaaaacaccaatgaagctgactgaatctggttccaagccagaacgctctaactccgagaacaaatccatggccctttcctcgaatccgttattagctagaccaagaatcatcgaattccaacacgataactgcttcttaggagcacactcaaacacatttagaccttcctcaatgcacccacacttacagtacatatctatgagtgctgtaacaactatactattcaattcaaaccgattcctcactatgtactcatgtatccatctcccttgctcacttgctccaaggtacgcacaagcattcaacagactcaccattgtaaacccatcaggtttcacatctttctcctgcatctctcgaaacatatccaacgcatccttaaatctaccattcctcacaaacccactaatcatcgaattccaagaaactccatttctctgcggcatttcatcaaacaggttctgcgcctgatcaatcaatccacatttcgcaaaacccataatcattgaattccaagcaacaacatcaaaacctatcatccccagaaagattctccaagcttcaatcaaacacccacaagtcacgtacatatgcaacatcgtattccgtataaacgagtcgtcttcaagtccctctttaataaccatcccatgtaattgcctcccatcacgagcttggccaagtctaccataagctttgaacaccgaaggataagtcaatctctgcggcttcacagacggagaagaacacaacatgtcaatgaaaatcgaaatagccatctctggaaacgagctccgtgagaaaccacggattatagtgttccagacaaatgggttcttgtgattgatcctagtgaataccaaataagcgtaattcatgtctgacggagacgcacagcagaaggcgaggacacggctcgcggtaacagtatcggaaattaaaccggttttgatgagactggcgtggatttgcttaagttctctcatcgtactacattgtgtgtctatcaatcggagataagtgttgccggagagggaacctgatgacggcatcgccggcaccgtcacaccggagaaggataagatcgtcggagacatttttgtcgatttaagtttaaaggttggataatttataggagattacacacgtgtgacattatcgccattgataatgaacaagacaaccacacgtgtgtagtttttcttctttctgaacttaacgattcaattcattgcaaaagaagatcaatcaacaagaacagagtacaaggtttcaacaatctgtctagttatttcagcaaaagtgatatgattatttcataaatgatcatccaaagcacatctcttaagagtataaaaccaccaaaagtccaaaacgagcaaagaaccaggctttatctctactgcttcaaatctgcagagcatcagcaatggatccagcgaggctcaagacttcgaaaggagccttgtttccgatggccttaaccgtctgtggacaagaatccgtgatccagaagtaagcaaacgcttcttctaatcctaattcgaagaaacaataacattgacttcagtttaaagatgcaacaagcaagatatttatagaacaatgaacaaagttagttactttttctttcattttcacagataattaccgttcttcttgtgggtgaaacgctcccacgagctctttgggaagacaccatgagttacataagcactcaccttcacagctccatgcgctgccaatactttctgttgtgacaaaaagaaagtgaaacagttaagatgagtaatttcaaactagattctcaacaaatctcatataacatcagaaataacaaagattctgatcaaaagcctctcttgagttttgacacaacacttgtgattcagaatttattcaagattgctataacctatatgaagatacaaaatgcagggatatgagaattttgatacctggcattcaatgagtgtacccccagactgcacaagatcatccacgataacaacgtgacaaccagcagggtttccttccttcagcctgactattctcttatcgccttcacgaacctttgtacacacaacctattatgaatcaaaattgagttccattagatattgtgcaggtcataaagatgttcaaatgaagcgttataaaatatcagttttagatagctacaaaccgtgggataatgatccaacagcttatggaaacgcttccaggctccatcatcaggaaatgcaactatgacctgcaaacaaatggaatcaaatttagattattgagcaaaaacaaaaaagaacagccactgaaaacacaagtggatgctatcagtaacagtttttcatgaactaactttctcagtttcaggaagctgttgaaggcgtttagtcaacaacgggattccagtctcaaacaaaggaagaacctgatcggcaaagtaaaacctttcctgcaacacatgaacatatatagagagagtgatgaacttgaataattccacaaataaatgtagcaaacccccggggatatcagaaataaataaacaaacctgcaaagcgtgaatgtcatagatgacaacactagtcggaccaccgcgtgaaatggggatattagagacaatccttgccatggtaaaagcagttgctacatctccttcctcttccattctctcaaaggagccagtggggaagaaaggcaacaccaaagtgaaggacgcaacaaacaatcgagggagcaagtaaatgacagagatctgctcaaagatgacagcaggggaactgaatgaagcaaggaacgcaacgtgctggcctcggatatcatgtgcgttgttgataaatagattcgggaatccatcagcaaaactcctgaaagcataacaaatgaccacatcaattcacatatcctcaatgccatctatgaatcaccaaaaactatccaaccagagattcatttaacagtaagagagaagagaacttaaaacacttaaactgctatattcttacatagaaaactgaaacttgctcaaaagataagatttttgaatacataagcttcaaatcaaacaaccacacatgcaaacacacagattctggaggaaaaccaacacaagggaattttgtttcagaataaagatatgatttttacttaacctaaactcacataaacccaataaacatcatccagaaacacaaaaagagaacccagaaaatggggaaagagggaaaaacctccagttgatggattggagagtgatgtgatcagattcagcggcgatgttgcgagcaagttcttcgcactctaagcagtaaaagagatgaactttcttcttctgtaattcagacacgatggcgtctgtacaaatcttggtctccatgatgttgttggctgcgttctcagacattgacgccgtgaaagagtccgaatgtacttgcgacggaatcggatacacaaaaaaagggtttaaaggttttttatttttctgaaaagcccttgttttttttgttgttcggctgacaattttgattccttgcactttatttctgtaccccaaatctgtaaatgatacgtttatctttattttaatttcaaataaaaataaaactttaggtactgtttactgaatgtatttccattaatgttgtcattatttccattctttgatatttgaaaaccttcccaaactctatcaaatcaatagagaagagaaatctcggtatcaaaaatctgatcaatatctggaatctgtaaaaaagctgggaagctgcatcattttcattttcattttcattttcctaagtcaaaactttttatatttccttcttaaacaggcatgaaccaacgcaattagccaaatattaaagagtaacacttaactagataattccaccttaattttctttaaactgagtttttttgtcaactttaaagtgattttttttttaaagaaatccaatcgagaatatatttatttgaggccgctatcagctcgcataaaaaccttcattaatatttaatactgcaattttaaaattaaaccttgattagtgtgacactgacactcaaataaatatactatataaataggcccgtaggtcctgatcctactcttgttggacaaggccttgaaataacaaaaccaaaagtttccactcaccaaaactgggctccaataatttctttttctgagactaacaacaaagaaatttcagataatttcttttatttatctgagaaaaaattaaatcatttttcgaacgacaaaaaaaaaaaaaaaacatttttcgataagaatatagaagatgaattatacacattgaaataatgacgtggagccatgtgtgctacaatatggcagcacgagaacatatcatgttcgtctctcaattatcaatccactgtcgtccatcttaagctcacgcaacacatccttgcgtgaaccacacgcaccactcgaagcaagatccaccgtccgatcatcccacctaagtctcatcccatggttcaaccgtcggatgaaaccctcgctacgtcgttcacagtaatccaacaagctaaccacatacacagacttttccttatccttccaattcccaccaaacttttcaaagtgacgtcgttttcggctctccacggccaaatactccaccatgccggccacaagctccggcgaagctcctgactcgtctccccatagccatattctaaccatagaacgtcgcaatgcagattccacggcgttgctaaacttttttctttccgtgagagatgggcttaatctgatcacatactctccatgacttgcacctgaagttaccgagaacctatctactctatcactactgtttccacagaattggacggtaacgtggtttacaggcttacggagacgatgaggaacaccctcgtagagaaacctctccacaaagaagcttgcatcgagcaatatccgcactgccgtatcatcagattcgaagaaaagggcgaatcttttaccggaaggagaatctttagcatcattgatgatacttatggagaagccttttgaagcctcatggtttgcccacaaagagattgctccgacgagaagtatagagaaaagccgcagaataatacctgaatccgattccgttgctaagcctttggtggtgggtttggctaggaaaggttgaagaagagtctgatccgtcattgaaaccatggatagatgtctacatagagagagacgtgtaacggttttgtaatgataactaattgagacagaaacttataacgaacctgttgtacaactaaatactgatcatgtctttcacatggaaaggataatgtacacgcaagaggatgttatatacacatgactgatatagagagaagtttccgaatataaagtatacaacgtaatgtactaatagggatgtttctttaatcggttgcttcgagtgaagtaatccctaaaaactggttactttgttccgtggagaaaacaagccttaatactgtacattctgtttcttccataaccgcgccagacctgtacacttagtttacctttgatggtgagttagagttcccaactactagttttagtggggattcaagaggactcttctgcagcattcttggagttaccgttctccctcggattttcgataagatccattgtgtaagaccaatctgaatcaggcgcggttatgttccaaatgcttgaaaacagttgctcctgtatgattcatagatacaaggtgaaatcggtggaaaaatctgaagatactgcatatgcattttgaaatcatgtatcaaaaacaaaaacaaaaatgagattttgtatcggataaacatacgtgatcattggcgtcttgaccatcatcatggtaggagacttctggaaacaattgcttttgttccttcatagaacttggagtctgcatgtatgacgcaagggcagactttccttggatctctgcatatgccaatgaagcaactttcccactgttgaatttctcccatattttaccattgaaagtctgcagaaacacacattatgaatatcttttagctataacaatctcaagccattgaatcggataattaccatatccacaatacatagtcaacttcatgactagtgaagagaagttttaaagacaatactgaagagaaaaggtaaagaaacctgttggaagggaacgatgtgcaatggagagaccatgttgataaaagcgtgacccatgttgcatttattctgtatccagaaaaaagctagattgttagtaagttctcaggtcatacaagtgcatcatgagttcactctctcttatagtataataccttaaagtctgtcggcaagcatagaaagtcatagtctcccttgtgcttttcgtcgatttcagccaccagcatcttgtaagtgtaccttacaaaacaaagcatttgaaatttaaacattgctcgaatatcttagattgagatcaataaaacgcttacttgtttgggatgtttttgatgattaatgtagttcggatttcatctccactagcaatcctatccaagtcgatatgatatctcccaccatctatgaactgattctgattgtgactctcgtggttatgtatcctaccctgctcagcaaaaggttcaggccttactgattgtaatcctctactcccaccgaaaggaactgtaggcattgaagacatgccaaagccagtgaaatcctgttcactactgttccccggtagactaacaccaaggtttgcttttccatgagcactgttatagtttctgttgattcccatatcactaaatccaaggggtatctctggtgatcccgtgtagcaattcatttgtgtattaaaatgaatgcttgagggagcagagcccacatgatgctggtattttccaagcaatgaagcctgcctctcagcaaatggaaaaccatgcctgacagtgaaaggacgttcagtagatgacgatgacgacgacactccagtgtaaccaggataattcatatgctgaggagggcttccccagcgatagcggtgatcagatgaagtcccgaatcctgaggagtgtggagctataaacctcatggagttggaaattccccctgttatatgctctggcaaagaatgaggttgcccataggaaatgttgtgcatcaatcccttattcagaatagtttggtttgaatgattcaatagcccttggtcattactgactggtgaaaatccatgaaagctagaaggatgagcaggaagaattgaagccagtcctggcatattgtctgagttaactggcctgaccattcctagaccatgtggcctcgtaaaggcatgcgaaggagagcccttcactgggctaccaattggccagttacctattaagtagattgaatgaattacggaaaaggcatgctaaccaatcgagagaaaaagttgataaaagaaatgatcaatatgagattacctggtggagaattagcaacatgtgaacctacttgattgtagaaatttgtaacttcggttctctccaaatcttgactttgtgacgggaccgacctgcatacaaaaagtttccgttcacagtgtatgcaagataactcaattctttgacatatacaaagtgcagaaaactcacagtcgacgagcccctccaggacgactaagttcgagctttatacattttccacctatctcgcttctattcagtgctttcaaggctgtctctgcatctctaacatcatagtactcaatgaacctgtggaatcgcctgtttggggtttctctaatctgcatttacaagtcaagaatcaataagcaggtgatatgttacattatgtaccaaacaaagagaagaatctcttagacatagcatatgcacatttgaacgcacaagttaaattacctctcttatttcaccataggcaccaaacagctgaaggagctcatcattcgatactgttgtgtccacattaaaaatcacaagagttccttgattcatatccttctctgatggattttcctatcatgtggcataagctgatgatgagaaaagtactaaagaaaagctgaaacttcaaatcaagaatatctctcgtagtccatactttaggaatggaaaagtgaatgtccagtgtcctttttcttaaaagtgtgttctgtagtgcacgcattgcggcatgagcagctcgaatatcgtagtaggatatcataacaaaccccctgcttttacatgcagtgtacaaacttctgatctccccaaacggctggtgacaaatagaaatcccatcagcaagagcgagcaaacctcaaatattctatgagttacggctcaacgagaaagatgaaagcgaacaagtgttgattacctcaaaaagggcgcttaactcagaatcctcgacactgctgttgatattcctaacaaataatgtccttgaaggatgttcaccgtttggatgttccactgaaactctaccagccgtattgggacgtttacgaggaacaaatgcatttgcagcaccgcgatcagaaatctgcatccctgacgcatcaacagcatgattatcttgggattcaacatccaactccataccccctcccgtgcaaaagacatcacactcttcgagatcgtcaagttcatcaggcaacccggtaaaattaagctcatcaatgaggccaggaaggagctcattttcatcctcaggcagcaatatttctaaagcatcgggttcaacatcttccaaagaatctttctctgagtttcctatgacaagtttgttcagattgggtgagctttcatcaaaggagagccaactatctgaatcagtcatattcactgcaaacaaaaacaaaaagatattagcactgttcttcaagtaaatcaagaattaaaactgaataactaaaagaagctagtaggacatacgcttttcatgaaaaagtgtgggcaatgagcttgagaacatgctgagatcacttgaagaacgatatccagtgcctccattaaaagcttcagatgatctactcagcaaagatggcatatctagatttgacatagccaaatcaatagatattaaaaaaattgtgagaaacaaaaattgtaaattcaatcaaagcaagaaagaatctattcataccagcagatagtgatttattgggttctagctccatctttttgccttctgcaactgcagatatgaatcaaatatcaaagacctgctagttgatttctgattttgcatcataaagcagaacagtaacttgctaagatcattagttctcgatcacaagctactcatgtgtttcctagtagtccatacatcaacaaacataactgagaagaagaaaatcgaagcaagaccatgagttggtcaactcgatgaatagaaaattttgctgcttgtggcgacaaaacatcatcagagacagagcaataaactcaaatcaaagcttaaacctttgaaacaggtcaaaaaccgattcgatgatcagtgaattccacggaaccaaagagagtatcaacttgttttctcgttaaaaaccatgatcagttttgagtaaaaaaaaaccagaacagtcacaatcaaactacatgataatcatagagcagtcaaacaaataaggaatacaaaatttcatatgaataataaccaaaaatcaaaccgattagcagaaatttcatcgaagaagaagtgaagtagtacctgcgatgatggaggaaaccatgaacagaaaaaaagcttgagtagtcggatcaaactaaaaaaaaggaagagaatcggagaagcaaaggagaagagaagagaagagaaagaggagaagagcaaatgtttcgtagaagaagaggaatttattgcttacactcttcctcctcctctcttccgttgccgggaaattacacaacgagcaaacgcttacccaaaaaaaaaaaaactgagaaagagagagagaaaaaatggatatttaattattttatttatgtagtgattacaatcaaaataagtaatcctacttaattagagtctataatttttgaaattcgtttattttttcggcccaaccgttgacacgaacctaaaccagcttttgatggacactgataatttgttttaaactctacaaggaaaaatattttgacatctaatatgttaatatttacaggaatttatctatatgtcctatggtcatatgtaatgtatatcaaaaaatttataataatttaaataatcaaataattaattattagtatatactataacattatgggccctaatcaacatttaaaatatgggctttaattacatgttagaaaaaccactattattttggtcttaatatgtcggaacttattttgaaatatagtagtagtatatgatagttggggacaaggtcaacaaggatgcaacattgaacattcgatgagaaaatttagtctgatactcaactttatttctcatagattcatctctcgcattattatgatcaacttgtaagaacaaattctaggacggacttaaaaagtcacaaatacacttatgatgcaaatcagaaatgtaaaacttggagttgttactttattttaaatacttttgctgttttctgaatgactttttaacatgtaaactgaataaataaaattcatcacatttacttattctaactatttctgacattctcacatttattatccgataaatttaattgaaaaatagtttaagtcaaaagtcacataaatttttcattaacggatttgcattttgtcaaagtgatcagttacaaaacaaaacaatgttgaggttttattggtatgtgatttatatcatactagtattacaactcgtgcagaattttgtattttcataaaattaaattgtgatttttttttatcgaagtctattatggacctaaaacaaatctagagatgtgtttaaaaaaaaaacaaatctcaatataatctctatatatgtaaaaaataatcactctatcatcacaaatattaggaaaataatatattgacaaaacggttgggaaaaaaacacttaccaattaataatgcatttaatttcttcaaaactaaaaatcgagaagtacattcatttttaccaaagagagaaatacgtattaccaaagagagaagtacaatgatagatatatgtttaacagtttatgtacctcatgttaggggatgaaactagtagtttatgtacctcatgttaggggatgaaactagtattgttattgcctctttctggttttgctcgatgatccaaaacggttatgttttgtattggcactgtaccttcaggacatttggcggtactgacgtgtgcctctgatgttcgccattcacttttcttgctagttccagtcattctaggaatcataagtaatcgagcaacaaaatttaaaaagtaaagaaacaaaatttaaaaagtaaagaaacaaacctgtatcttgagatgtattaaacgaggatgggcaaaagctggttggttatgtttggggaagcaaatgacaagatctccatcggaaacctgttaaaatagatttcaaacatataaaatactttagtaaaaatgtaaaattttctcctggtgaattacctagcttttttttttgccatccctctacccttatatttcttctatattacaagccactctcttattattttttatttttttttgtctttgtcagcagttatatagtttactttcgaacaagtaaattctttttgcaagagatttttctctacattacttacgttgaaatagtaaaattgttactggattttacaatccaaattaataaaataaaataaaataaaaaccaatacaaaaattagttccggtaaaggccataattagatttggtttttgtggtcggccaaatataaacaaacaaaaattatgtaaaacataagtagagtataagcaaaagataagcaaatatacaatttgttaacgttttctagtattttatctacaagatgaatcaaacttgtctcggctatgtacttaaaacaaattgaacttcatcatatttcaaggccgttgagtttttaagatatgtacaaaattttaacatctaagtttggtccatcatgtgaactaactatgaaatctaatttggtccacgatatgagttatatgttcacttgaactaaatagaaaaggtgagtaacaacatgaaattgaaaacataaacttgcttcactatgtaaactaaattgatccatagtgtgggagaaaccaaactatgatcatgcatgcaaccatgactgtaccaggagacagactaattattagctggtttattacatttgacaacaagtctctcacgcgtcagagacaacgtgtcaacgtggagttaaataatcggatacagtgtgagagaaactaaactatgatactccttctctccccttctcctccgtttattcgtttcaggatcactctatcttttccagtttagagcgtaaaattctctccgtcacaattcatttagggcaaaatagttgtgtgtataagttttaatatagacgaaatattgaacccattacctttttttttttttttcacaattgaacccattacctatgcgaagaaaacatgaaacagtggggataaagaaggagtggttttcgaggacccgtgatattcattttttttttttttcatcacccgtgatattcaaactcatcatatttatacacacagactataaagagaaacagactataaatagaaacatacattattttgataagttttggaatattcgacaacagaaaattctctctatgtgtgtccaattatattcggtttatgtaggtggtaatttagtaattaattaccagtttaccacacagaataatggtcttccagtcaaagtgattgtaatgtgatttatacaaatacattttgatattagtatttaatttctccaacatgaactttgcattaaatttgatatattcaagtatagtaattttttttataagtattcaagtatagtagttttaagattctttctacttaaagaagataataaaaagaaatgaaaatctctctttaccaaaataacaaatttatttatggaagatctacttactgtaaaataaaaacagaggataaaaacttgaaactttccaagaaaaatagtcctataaataagactttcacgaaaacctaaaagataatagaacctatgggtatcaaaaaaacctctgcaactgtttttcttgtaattatattgacaatttcgttttcttattacgatgttgaggccgagtcaggtatgttgtttctttgcgaagatgtttatttttttttgttattttcaactatctttgatcactaccaaaacaataattcaggaaacaaaaaattcttaaaaatatagaattagtaatacaatattacatgtatctgtgtatatgtatatgttgttaagaaccttgaagaaactaaaactgttatttggacatgtatctacagatttatagttttaatgtggagttgtatatatgtgcagtgatcgagccagcaaaatatggtgcttgcctttttctatgtgatgctagacgggatgatcatgcatgcttctatgactgtactaatgtagctatttaccggactggacattgtgttggaaatcctccacgctgttgttgcatcagaggataataatcgatttatcttcatgacttcatcaataattggtgaatggagcttgatttatgtgttttctagtatatgattctaaaagatgaactttttgaattgttgtttttcaatttcttgataatgaataaaacatataacttatcatgaattttggtattggattatgatttttgagagcttatatgatccaaagcagagaacttggggagtggtgaaaggccttgaagaaggattattgcctggcgcttgtaagtggtcaaaatgagttaccctggtgggaaattggttctgttcttgcagaaaacagagatcttgtgtttgcagaaaaattgcaaaccgaatcttacattttccatatctccttacccattttatgttcgcagaaaaatgaaagacgtaaattagatttcctcacattttttcacataaaaagaaagaaagatttcctcacatttattcaagactaggtacaaaaattctttgaagatcattttgaaaaaggattaggtccactagattgaaaaagactagaaagtaaaaaaaaatgaagatatgttttcttctacatgaaccttatgatgcaaatatcattttggccaaatacataaaacaacaaaaatttaacttaatttaaatcaaattaacaccaaaaagaagattagaaaaaacatgtctattgaaaaaagaatatggaagtataaagtaaaacagtactaacacactataaaaaaaaatgtattattcttcgtttttcaaccaaacactatgatttgtgcttacgtaacaaggtctgattgatattttttgtttaatcccgtaagactaaatataagattcgctcaatcgtcaagtagtttagttattagctaatcaaaatatgattatcttttttataatttagttaaataattacactaatgtgagctggtttgacttttgattttaaccacaagaaggagacagtaagacagactaatgattagctggtttattacatttgacaacaaatctctcacgcgtcagagatgacgtggcgttaactattcggatatgaaaagccctgcgtgttttaaaaaaatggcatggcccattgggctagttaagtgagagtttgtttttttttctacccctaatattactatattacactcatgccacaaccaaaagctaaattaatattgttgtttttaattgaaggttatttgatatacaatattaatggaaaaaaacaaaataatatatatttttttttacagcaaaataattgagaatcatattaccagaaacttaatacaaaaaataagctaaaaattccttacaaaaatgaagatgatgaaatatagattgaaaatataatttagcagtatatacaatatagcaaatgataaagtgaataaaacaaagttttagcaactaaaattagcaaaaaagcttttaaggataaagatgataacattctattaacattatatctatgagataagtacgtgacaaaacgaaagaattggataaagaagacatgaatgaatggcaataaagatcaaaaatagatcatacactaataatgaccagatcaataatgtcctaattaatttattaacacttgatcaaataatttattttttcgttttactaatgggttgtttttttggatcacagtgaccaaagcagcttaccaaacgcgacactttaacctctatatataaatctccgtctagattccttccttatctctctctctcctttcattttcactacttcttcgtctctctctctctctctctctctctctctctgtatcccttgtgtgtcggtgatcagatctcgtgccgacgaaaacgtgcgtctaaagcaatgctgttcgcactctgctatcttcaattcctcgatttatcttgaactgcgattgtttgttgttgtttcgatttcgttgggggtaattgggtgaattagagaggtgaatgagaaattcgcctgcgattctgtctctgtcggtgatcgattgccggagcagaaccaggtcggattctagcttcgccatttggagtagtggtcgatggggccaatgcggctgatctgaatttctatttccctccccccaattcagatcgaattctagggttcttctaattcctgggtttttagtctgtgtttcaattgagtcacgatgcagcaagataatcgcaaaaaggtgaaacaaaaactcttccttttttccaattattccatccgatactatctgttctgtctgagatatttatgtgtgtgtttcggttaatcttgtttgtttcctgttactgtctttaatctttttgccgttttggacaactctgtttatgatcaatgaacgttacaagtgtcatcaaacaaacaacgcataattgtcatcattcaagacaagatgatgtgttgttgagacattttttttatttcttcatcagcaaattgacattcaattgcattgatccttcattaggcgtcctttgtagcatcagtagagaaccttctgcatctgattcttgtatagtgttatctctattgtaatgtttctgacttggaagtaatggtatttgtaacagaataatctggagatggagttcttttctgactatggcgatgccaatagatttaaagttcaagaagttattggaaaaggcagttatggagttgtttgctcagctatagacactcttacgggtgagaaagtcgcgataaagaaaattcatgatatttttgagcatatttctgatgctgcgaggattctacgtgagattaaacttcttagactcctaaggcatccagatatagttgaaattaagcacattatgcttcctccttcacgaagagaattcaaagatatttatgttgtctttgagctcatggaatcggatcttcatcaagttattaaagccaatgatgatttgactagagagcattaccagtttttcctgtatcagttattgcgtgcactgaagtacattcacacaggtagtctttttcttttggtctctctttatccggcatctagcaatagtcttttcatcttcaaatctctctgtgtgtatatatcgctctctctgtagatgaaaatcttggacacttgcaaaatgtagtgtatgtcagatttgtcttttaggactttacattctacagtactatctcatacattgatgcactgaattggattcttgcggtttccattgtctggctaaatgtttgccttttgaagtttgccccaatatatctgaactttaactcagctgtcgagtttggtttgttgtattatattatcttatgaatcttggttgttgcagctaatgtctaccaccgagacctgaaaccaaagaacatattggcaaatgcaaactgtaaacttaagatttgtgattttggattggcaagggttgcattcaatgatacccccacaacaatcttctggactgtacgtttgacaagatggctctctaagagtcttttccttctcttaaactgaagttggtctaaatattattcactacgttgcaggacctgatactcttctacattattttctactgaatttacaggactatgttgctaccagatggtatagagctccagagctttgtggatctttttactctaaggtgttcatttgttctctatataacatcttttaattggtgtgttgccgcgatataacttttgatggatttggctttgtagtatacacccgcaattgacatctggagtataggctgcatttttgcggaggtgttgatgggtaaaccacttttccctggaaagaatgtggttcaccagctggatcttatgactgatctgctagggacaccttccctggacaccatctcacgggtattgatcttcttgctaaacgaagtccattgagtttctacacatcttaagcaaggaccagtagtgatgagtaccctgcttttatgatgttatacaggtgaggaatgagaaggcaaggaggtacttaacaagcatgaggaaaaagccacccattccgtttgcacagaaattcccaaatgcagatcctttgtctctgaagttgttggagaggcttcttgcttttgatccaaaagaccggccaactgctgaagaggtgcttttcaacttccatattgactaactatctcaaatcttgaattctcggcttcctgattgttttctctctctaataatagagtatcatgcatttggggtttctattggagtgaatcactaaactactcttgtatacttgaatcaggcacttgctgatccatattttaagggattggcaaaagtggaaagggagccttcatgtcaacccatcacgaagatggaatttgagttcgagagaagaaaggtcactaaagaggatataagagagctaatttctagggagatacttgagtaccaccctcagctgcttaaagatcatatgaacggggctgataaagccagttttctctacccaaggtcgtaatttttgttgattacattcttgagctagcattgcatatcacacccagtccctgacattgatgtatactgtgcagtgctgttgatcaatttagaagacaatttgcgcatcttgaagaaaacagtggtaaaaccggccctgtggcacctctagaaaggaaacatgcctctcttcccaggtatatcctcattttttctgtaaagtctgttgtcacttgatctggtttcggtgatctcctctgtttttgacccccgttatgcaactgctatactagttgtatattaatatacattgacatggcaaggataaaaaagatggaatcataagaccgtgactatctgtttcttgtgttgaacactaatttctataaaaatatgtccttctgactctgtgtttgcatgctttcagatcaacggtcatacactcaaccgcagtagcacgaggaggacaaccaaaacttatgaataacacaaacacattgaaccctgaaactactcaaaacattccttttaatcatgcaacaatacaagcacaacaaagaaacctctcaggtacttttaatcactcatcctgaatccaacagcaatgtgtccaaactgacctctataaactgtaaaacatctatctacacgcagcagccaaaccaagcacattcatgggcccggttgcacctttcgacaatggcagaatcagcagagatgcatatgacccgagatcattcatccggagcactaatctccccttttcacaacaatctgctgcaacagtcgccatgggaaagcagcaagagagaagaacaactatggagcctgagaagcaggcaagacaaatatctcagtataatagatatgcaccagatgtagccatcaacatagacaacaacccgtttatcatggctagaacgggaatgaacaaagccgaaaacatcagtgaccggatcataatcgacacaaatctgttacaggcaactgccggaataggagtcgcagcggcagctgcagcagctgctcctggtggttctgctcaccggaaagttggagctgttcggtacggtatgtcaaagatgtactagttctccacctaagctgggctttcatcacacagaacattgtatgtttccatcttcatgtcataaaagaaaattgtctatgacacaaaaccatatgagcaaaaaatattttttttattaattgtgatccatcatttgtttgttttttctattccgacaaataaataaatggatgttagattctggtatatataacaagaaaggttgagagtttttcacgtttaaaagaaccgctggctacagaagatggatcagtgtggatgcgcatggtgatgatgatgatggtttcatggcacatccaaacgcatgtggtggtgggaacccatatcacaggcaccactttgttcttccaaatgtcagtagaaacagaaaggtgcattgtcacttgatcatatctttaaaccaaccaatttgtgtatatatttttgtgtaaacagttgagttcgcttactttcttcctaaacaagttatttcttctacaaattaataaatgagcacaatgagagattgctgttcaataaatagtatctcaaaatagaaatatcaaaataaaattagaaaaaatcatttaaagattatttattcacttctattttaattaaaataaaaataaaaaaatttgggatctttcttcttctttctgattataaagtttttaataaaataagttttaaagcaaaagagagatatagcaagtgaaaatgcatgtacaattgaaaaaaatgcaactaaatgaggccaagagaggagacaaataaggttagaggtggacccaaaaaccactgtatgcattgtcccagagatcacccatcatggtaggtccacctgtgtggcccatatctccagcctttatagaaaaaaagagaagataactaattaacttcccttgatttggagttttttagctaaacattacatattttctttcttaatcttcccctttcttaattcttaaaaaaacatatactgtcttgtctttaaccaaactcttctcttttatttttgtggcaacaaaaataaatagtgaaagggaatcatctcaaactcctcctagatataaatatttaggttttcgtcattaaataaaagttattttggaaaaaatagaaacaacgaacaagatacaaaaggacatagaattgattattccaagacgacgaatgtgaaagctggctaaaagctaaaattaaatttcgagtgtgttatttttgtaacatatttaatgtaagtgcaaatacataaataaatagatactagaattggggagagtgtcagtttggtagatggtgaaatgcgaaaggcacccgatttttgtaaatctcaatcccgagaaaccaaaccctccttcgtcccctctttggaaacatcatctctttctttatttctctcttccatcttcttcttcttctaaaacaacatcttaacaatttttagtattactaaaaaccctagacgtaaaagaaatgtgttattctgttcctgatctttgtcttaattaagaccatacattatttcttttaattagatgtcaatcattattctttactaaattttttttcttgagtagatttaggttaatttgcaatcttggattaaagacctacaaaaatgcaattgtttttttttaatgcaattattttttattaagtctttatctagtttttatatcatatagttgacaaaagaaatgcaccggagggctcatttatggaaccaacattaagtaagatttactataacggttttatgtataaaagatgtatattataaagatctctagctagaaacatgtaacactatattcgaatccaataacactaaacttccttggctttcttcttgttatatagtggccatttctctaacattatagatatattgagattgttgtttttacgtggtaagaaatatgggatgttaattggagtttcttttaataagaaaaaggagttgacaaaaaaaaaatgaaggacagatttaggaggtcactgaggtgggggggacccaaaaaagggttgacacgtggccaccatgcccgatagatatcatgtggatcttagtaggattaggtcctcaattgtacgaacaagttcactatctcttagaggatctatttgatctcatccatctaataataatactatattacagtctgtacataatgtatagagaggaggaagcacatgggaatggggctttgaagatggagatattcatgtgacccgcacatgtcctctcctctctcttccttgttcccatgcaagtagtgtctcactgtatccttcttcttttccttccttatctccacgcgcgtggtcgttttcatttcgtccgtactacgtaattacgacaaaacttactcttataccatcaggcattagtccattaccaggcaccacccgaatggcctataagcataagtgcataactatagggtttgtcgtcgtctacttgaatttttcttttggaaatttaagctcacataaaatagtttatactctttattcttgttgtagaaaataagactggtaactatgcaaaacaacgtatagcagctattacatttatggctaaaccagatcacaaaccatttagagtttaaattaaagttcgaataatattttagcaagtaatccggcttgataaataaatgagacacttgctaaaagtaatccggcttgtattaacaacgcatatcctaatacaataataaagcattgttgtataattagttaattactatgtcaaacgtctagctcttaaacaaacaaatttaacgtgccaaatctcatttatcaaacaaacaaaaaaatccaatctagatgcgaggttgatccacttaagtgagtgatgagtccactaaagtctaaaccagtcgacatggcgcgtgaaagctcttcttctaaagatccaaatctgtggaagcaaccaaagtaagagataattaaataaatctccacaatccgaaacacgaggataataaaattaaaaataacgcacaactggacccagctttgatggcaataccgctcatttaaccatttcccaatttctaaatgtagaatttattttatatcgtttcaatttttacatcgttttttatagacaaaccaaaccaaaattcgttcataaccgaacctttcactaatgtaagcaaacaatgtaacataaagcatagcaaaccaaatcaaaccgatagagtattgtctctaaactcgcaacaaaccaaaataaaatcaggttgaaccgaccacatttcaacatttttgtctactaaatccatcatcactcatatatatatatataacacacacagttacacatatccacattccttacttgttcattattctctcagactcatcattcatctctctctttctttcaatggaagaaactctagccactcccgacgccacgagacgctctctgtcaccgtcatgctcagccaccgtgaaatcacgcgccgctggtttcgagcgcagaaccaaacggagattgtcagagactaacgcaagcgtacgtgaagaccgagaagaagcagaagaagaagaagatgaggtcaaggaaaagattgaggcgttgcagaggattatccccggaggagcggcgcttggtgtggacgcgctcttcgaagagacagctggttacattctgtctctacaatgtcagatcaaaaccattaaagtccttacttcgtttcttcaacgcatagatcaagaagacatgaagttcggaggttgaagattatcacaccaagactgctcttctttcttcgattcctaaaaacaaaaaaaaacgtttttttttttcaaatcttttatttccttttttataacatgggattttagctttgatatatgaggaaagagactcaacatttttttcttcgaattttttttttctttagtaggagtataatctttaattttaatgttctgatttatttattaagccgtttcacggttatgagaagtgttcattaacgaaaattagcattaattaatgtagttatataacttattttagtaggacgccatatagtatagatattaaattggatcacgaggtttcacttgcatatgagatttgacattaatgatattgagaaagttaatgttacgtggcccatttttaaatctggatgagctcatttcacatgctttattataacaaagatttccaaagtcggtcgatatttatttaagcttatgatgaacttactagatttgagttcccgtggtccaacaatagagttcatgtatattccttgtacatacatatacaagacaaatctttttagtcgtgtaagtactagagctagcatctacacagaaatttaaacacatttgccgctagaaaaaaaacaatatcagttttagtattcattataacgtaatttctgacccacaacaatgcagctatatcgaactctatggaactatttactccacacatagcggaaagtcggggaagatataattttcttaccaaccctatctactctctatccaaattacattacaaagatgaatttaaggttgaacatcgtatagtacgaagttgtaatcaataatgttaacttcaacatcctttaccaaaccaaaatttaaaataaaaaccattgatagattataactaatcacatcctgtatgggctaaaagcctaaaagattacgattccacatgttttttgattgccttagttatgttataattgggcttaacataactgggcctgaacccattaaacactaagaggtccgtacaaaaaaggattcgcggcaatattgtcaagtgtcaactaccctcggaacgacttcttcactaaaagttaaaacttaaaaccctaaatcatttttttctggtgaattgaaatagaattctatttcaaggaattggagaagaagaagcaagaattgacacgggataatctggaattgaaggaggagggtgagattactgagagagattgaggagatgagaagtctggaagtggagatgaagcagaggtgtggagagatggagattgagatgaagcaaatagaagaagagaagaaggttttagaatctatatcgacgggagctgtggagcttgagagtgagtattcaggatgatcttatcactgcgttgagcggcgagatgagacggtgacagaggtggctgaattgaagaaatggttaatggagaaaggtgatagctttgagagttatgagaaggaagtagagagtttgacgaaagtgagaagtgatattgagaagaggtttaggggaattgcaagtctgagaggaagctttgagtgaatggagaagaaattgaagaaggttgaagaagctaagaaaacgctagctttgttgaacgagaggatcttggagcctactaatggagtcagagctacaaaggatgttgcttgcgatggttatggaaagatttacttggaaggagaattacagtggcagtggttgctgctggttagtggcagcgacattgttcggatgctattcaaaacgaatgtgattcgataatatggagcataggattagctgaagaccataacgttttgcagtttcacagtcatataggtgcccaagattttgcttggctttggtttcgactttgtgatgtttttggttgtttttgtttgtttaaggtaattggttatcctcgcttttaggctaaagatgtgtagttgcttttcttttcaaatggtctgtagtctcctgttaactaaattacaaagagaaacatttttctaaaagtttgcttgacagtggttcattacatagatcctaaagagaaagtgaatatgagctacttactactataaaccattttgtgttggttactagaacaacatgtcacgtctatatccttacttactgctaaaatccattcattggaggtcgattttcctcgtatctgaaatttatggatcagcagcccagagaagctcgaggagtccacagcaatttctccatgaagttggttgcagcatgggttgcttgagacacagcagaggcatctgaaacatttaacggatattgtcttagttaacaaatgataagagctaaagctgtaactgaattgttgcgtatggagaacgttatatcataccccaccaatttggattacaaacctggttttcatctttaggtacaagggattcatcttgatgagtttcaaattcttcgacatgagctgaaaccggtaaggatccgtcaaaataatacctggaaaggctggaatcaaggtctgagttactagatgagtcctcggtatcctcatctgaagctgatgatgacttggttccttcaagaatctcgttgctatcattcaaactgtggaacatttcatttgtttgttctgtttctgcagaagtgtcttcttggaactgaagtaccatcctttcagagttgttaacatatgggaagttgtttctcttggtgacctcaggtgaaaaaccgtgattacgtctgaaaaactcgagaacctgctcttcgtcctccatatcagattcactaaaatcatgatctttggagactacagtgtgtgagttggatggacccgtagaaccttcttcagtggaatctactggatcaacctgatcagcaatagtaccttttatcctttcctcctctttatcactcttcgtctcctcagttgagttgtttgcttcttcaatggtcttctcctcatcttcacctaccttttccatccctgttctggtatgtgtccgctttctctatctttcgttctacttcgatctgctacggtatggatcttttgccggtttaaagaggtctcagttcatggactcaatatatctagaagattgcttcatatattagttgcaatgtcgattgcaataccaaagacagactaaaaccaaacaagaaagataacgaagagaaaaagtaaatcctatgatggaaacattgaagagtagttgagagaaaaatagaatggctgatggaccaaacgaagaaacgttcacaccgtaagtttttgactagttggttcgatgtggaaacaagacatgagcaactttataaacagggttataagagaaaacacgtcagacaagacaacaacacctagtacttcttttcactatgatttatacatacacatggtacttgtgctagttacagggaaaatgttatgaaatcattcggtctcatttgtttcttttctagtcaatacaagtctaggactctgaatattgcatacatacaggtagctacaacatactcatgactctattctatgacaccttgggagaaattttgattggcattccaagggacggaaatgggagaggatccatgctaattgtctcatctgggtagactaaggaccagtcaaaacctgtcacaacaaaatgcatgaaaacgagaatgctgattttggctagttggtgacctgcacaaagccttggtccacctccaaatggtagatatgtatatgcctgtattggcttatcaaatcttgttggatcaaaactcattggatcttgaaatatttcaggattataatgagttccataagtggtccagagtatctgcattcaaacaaagaagcagaggtttatttattagtatttcttcaaagaaatagagttttgattagaagctgaagaatcttaagagatggatgtgttaaaccttccagcctttggggattgtgtatcctccatagtcaatatcagccactgcttttctgaaagaaccgaagattggaggggataatcgcattgtttcacgaacaacttgccaactatacttcatctttttcacatcttccactgtaagatattctccttcccctttgtttgcttttatttgagcatgttctgatatgaatcaagagaaaactgagagttgagtatatgatttttgctgataggaagagaacattctgatattcagttgattgttaccttgaaggagagtgtcacgacaagttgggtgctgagctaacatcttgaaagtcatggacatggcgtaagaggttgtgtcatgagctgcaaacactagcaaaaccatattatctacaacctcttcttcggttatcacacctttgatcaactcttctactagcctcgagaaaagcgttgtgtttggcttctcagctccctctttttccatttctcttcgcttctccctgaccttcccaactagaaatgtctctatctctagccttgctttctttgctctagcaaacttagaacaaggaaactcaaccggcaaagcgaaaacaccttctaaaaccctctcaaagacctctaacatcccaatctccacttttatcccatacaaacactcaaatactacagtgaaagtgagaacttttgccgaacggtagaggctaatctcttccttgcctcgccattcggtttcatgatgaaacttaacggtatcacagagcttaggtattaaggactctaacccaatgtagctaagactattagctacaatccctctgaggacccgatgcttctcgccttgtttagccatgatgcagttcatgcccattagttgaacagaagatgaaggccacgagctcaccaccaagctaaactcgttggataatatgagcctattggcttcagctccattgactactattgttggtgatcccatgattcttgtcttgaagatgttcccatgtttgatgatccttggatttacaaaatcctcaaaaactctgttgcttttctgagctttgtagaaatccattgtttcaccaatccatggaagccccatttctccaggaagaagcttctttttcttctgaatcttctttgttatgaatcggtgatgtttcttgcggaagaagaaaagtgtgctggagattgttgcagctatgcataagaagacccatgagagaacgaagtttggttctaaaaccatttttgtttgtttacttaaaccaaatgttaatgatcaagttttgcataatgttggattatgagctgagtacttataagtaagagattttttgtgaatgttaaggtcaaaccaagtgggattgttctttattgtatataaattttcttgttgtttgttctgacacatgattgatcttcaagatacagttcctttagagctcagactacaatatcttttaattttcttttgtagcagacggtgatactaaacggatgactaaaaatgacggtgatacttaacatgttatgcagatgcgtacactgtattgtggcgattacaatttaatatatggatataatcatataacacatccgtttatgaaactaatcatatgcattaaaattaaatcgaaatggtttaatttggttcatattctcaactatctaaacgtagcttatatttattggtatgtatacatatgtcccttgtatccaaaaaaatatctttttaggatagttttttatacatttttgaatatgaagataatttaaatgtctaatttaatttttgaataaccaaataaagtttataagttgactttcggattatgaaaaaataattatatttaatcattttctttctttcgttgaattgtaagaaagagggagcagagacaaatgcatgtgcttggaagttggaatatgctataaccaagatcgtaaatagatgtataacctatgaatctgatccccataatctgcctaatcaatactttcgtaatattttatatgtcttttttttttgtttttcatattttaaatgtctttttattcataataatagtataactatatataaacacacatgctaacgaaatatttattagatttctattaattttttgaaagtaaaaaattatacgcgaatccctaaagatctgctatggccggctgcttctgttatgtcgacgttacgttgcaaactgcgttagagagattggtgtgtaaatccatttaattatccatatatgacatacattaaagtaatcttaaggtgtatagacgtctaaatgatcgcataatatatagcccttttgtgtatacttttgggaatttatctttacataattacatatcacttttgaacgtgacattatttcaaattgataatttgtgtgtacagtattgattcttgaaatttggactgtttatatcttttatggtattgttcatgcacctaagataaagttatattaattctgatcgaaaccgagaggataatttggaataagtaataacgaataatttgttaacaagtcgctttttatagattccttgtgagaaaacgtctttatcatatcaaacgatttttggtgagttattaatcttgtcgcagcattaagcatatatgatgccactttaggtcgtcggttacgttaattaacttacataaaattagatccaagaaaaaaaaatcttgcataagaaaagaagaaagaactagtttatttattaagctgtgagtttatcctaaaatatagtttggcttgtaaactagaattacatatagcagctgcaaaaaatgatggtgatgatgattttcacattgacaacaacaattatacaacgttatgatggtcgtcaatcgatatcaactcgaaaatataatttagaacttttgcatatacataggcacacacatatttttgtatgtatgaacatggtttagtgtatagttgatagtttaaagacattgattctttgaatggtcggagcttttagtgcgtttggttggtcggatcgccttgaaagctaaaaaaagacaactttgtccgtatgtgttgtcctagttttggagtaatttattttcgaccgttttagccattagcggaaaccacctaactctctctatcaaatgttctttagcgttggtccgttgcaaacatttgatcactgtattaataacatcgaccatacgatgctgttttgttcgtaccaaattcaccgtagtaaacgctgaaactttttttatttttttgtgtgtgtgcgcacaaaacgctgaaactagttaaaatataaatatattggataataagtataaagtacccaatatatttgtatctatttatattcgtgacatttgaatcgagttttacatggtatcggagtaacgagacaatcgataccatattattgctttgacctaccagttaatcaatatatacatatttcaagtctattaactcgtaagtctaatacaattagaaaaatgaaaaaaaataaaagaagaagatatatatggaaatattggcatttgtcttaataatgtaatcaatcatcaattgtagaagccaaaggcatctctagtgtcaacgaatttgaattgatataccaactaacatactttcaaaaccggtagattatacggtattggaagatgatgaaaagaagagtttatttctcttcaaaagttacaaattatataaatgtcatataccgtaagatgagatagttgaatattcacgtggtgtttatagtgtctacataggtaaaagacattaatcatacaatcgtattaacaaaattgattgtaaaaaaaaaaaaaaaagggttgattgtaagttcgtaacctctatgtggactgtgtggcccaaaccaatcggtcggaagctacaatactgtgtccgaatcctaaaaggctaaaaactgactcggaccagcttagagatcatatgaaattatggatagcggaatagctggcaacttcaatgaattctgaatttaaaacatttttttttatatatatagatgatttggcgattttcgaactggaatggtgaaaaagtggttgagtacactattagtttatttatttaaaaaatagagggaaattcaaatgaaaaaaaaagtttcatctacagaaaaaaaaacacgtcaaaattccaaaaaacttgaacgtcttgaacaacggtataaccgtataagaaagggaacttaaaacttaaacgtctacatgattgaaagggtaaaaatattcatattacaatggtataagaaaatggagaagccagaggagcaactccaaagaagaagatgcagcaagagagtgtacattattataattataagttggtatatatgtagttgctaaaaaaaaaaaagagtgtacaatattttctgaagaagcatcgagctggttaatatttaagacccaccaaaacctaccaacaatgttattctcatctctaagcaaaagtttgatctcatctttttttttaattttttttttgatgggtcctcttctacctctgcatctccacgtgctatacaagtggcctcgctgtatgtattatttaccactctcttattgttactaaaaacttgaatgtcacttgaatgtcacttgaatgcaaactatatatttaggtgaataccagatcaaatagcaataaataaaccaacaatttatgctaattaaaaacttgaaaaaacactttccattacctatgattttttaatccaatcttggggtttgatgcccataaaacgaagtcgaaaagagaaaagcgaccttaattgtaataaatgcagctattgacttctctatcaacttcaagtcttcaagtaactacaaatttaataatctccttagcttatcttagagaagcacaaaacaaaagggtctacgcttagtcttcctagattcttgatttgagtcttgatggccacttgctttttatgtctcaatcctaagagttgatacttacttagtattaatcaggtttcacattatctcagacctagcttgcatttttgatacaaacatgtcatgcaatacacataagcaacacgtaccgagtcattgattgaaaaacatgacctaaatagtaatacggactgagagagagtgatgaatcatttcatatgggagacagctttctcatacgcgtccatgcctttgcatgaaagattaaataattcaactctttcacttatcttattttaatttactttgcagaattccaagttttattgcaatcaccaggggtattaaatgggatagtgtaaatgcacctgcaacacatcaactaaccacacactcctccacctgtttgtatttacttcaaaaacttaattcaaaaatccctttgcttctttccttccctctatttataaaccctagtatccggtttttattctaccacacaataccatttgcaacaaacttctctctgaatctcagtgaattctcataaaatgagagggatggtgagttttgccgtttgggctctctttgctgctttactctcacagcagctctttgcttctgttgcttccgtaaggtttgaggatgccaaaacatactacttatctcctccctctggtaagaaaccaaacattgtaactttttttattcgcttgatgtaataagaatcttcactatgcttctttcacttaactcatgcaggctcacatggaactcctccatcacacacgcctccttcttctaactgtggaagtccaccttacgacccttctccttcaactccttctcacccttcacctccatcacatactccaactccttccactccatcacacactccaactccacacactccatcacacacgccaactccacacacccctccttgtaactgtggaagtccaccttcccacccttccacgccttcacacccttccactccttcgcacccaacgccatcacaccctccttctggtggatattactcatctcctccaccaagaactccggttgttgtgactccaccatcacccattgttgatccaggcacacccatcattggaggaagcccaccaactcctatcattgacccaggcactcctggaactcctttcattcctgctcctttcccaccaatcactggaacatgcgagtaagtgtcaaaacattcgctcttatacaaacatcataagacagatgatgatatcaattatcacacttcatgtgttttgtttatcttttgtgtagttactggagaaaccaccctacattgatatggggcttgcttggatggtggggaactgttggaggagcttttggtacagtcagtattcccagtagcattccagggtttgatcctcacatgaaccttcttcaggcactttccaacacccgctctgatcccattggtgctctctaccgtgaaggcacagcttcttggttaaactccatggtcaaccataagttccctttcacaacccctcaagttagagaccactttgttgcaggactttcctcaaacaaggcagccacaaagcaggcccataccttcaagcttgctaatgaaggtcgtctaaagcctagagtctgaagttaagagagtttcatttctcagtttgtttgttggtttatatcaaaaacaatcttaattaattatcttgtcatttgtgttgctcagtagaatttgaagtgtcctatagtctctagtaatatttatgatggatacttccttttatttaatgttgttgtttcaaaaaatttcttgatcttaaataagatttagtagttcctctgtttctcaatcactgttcaagaatgtccaaagaaatgaatcatatgcaagtttaacccgaacaagaaactatagataggatcataaaacatcaatattgaaagagataacagataatttaatgtatagaccaaggtacagagaagtcaaagtccaaatctagattaacatgctcacagaccaacacattgtcataactgttgcattaaattgttcatgagcatttttaaaatcatgcctaagaggtgtgtctataaagtgaaaacaactggattaaactccaaaaacgacaagggcaggagaaagagagagaaggagcaaacattatagcattaaagaaggaaggagtacatatcaaaagtgtggtgttagtgtaataaactctgtggagtaaatattgcaagatggtctccatgcattcaagtttcaaaccccaagttctacccaccaatgaaaatatctttaatgactctctctattggtgtctggaattgcattcatgatattaagttggtgtgtcatggttatggaaacacgacatctttggaggttgagaaatatctctatccaagtttatcttcacccaaggctgttattttttcctactttatgatcttatgactgattctaactttttaataatgtcaacaaaatccatacgaaaaataatactaatccagaagtaatcaaactttgatccactgaatctgttttagccatggagagctttttcagaagtaatgaaactttgaagtaatttgaacgagtaaactttttgaaattgtgatatatgcttgtcatgatcaatgtgtgaacagaggatgatgatttatttggtttgtgatgatagcattaagtagattttctcaagttctagctctgcagttatttttcttcaagaatttcaactttttttccttgctaagttggatgcatcgattgaatattctaggcttgatttgttcatcagcatgtggaattttcggaacatagctcactaagtggtttcttatcattttgaattgaaagtgttctgttttcacctaatcacattctatgttaaggaaactaaacttattttttggagacagtcacctcagattaagacagatgccagaacacatgtagcagtaaacaaaatttagctatgagagttttcactaaatcaaactgataggatatgtagcttgtttggttgctctcttgcagtaaaagttaggtcaagacactatgacaggttttggccgttatactataaatcatggtgagaaatgcatgaatgtattaagtcttgcagaaagcttgggaggagctgctgacaatggaattgaggaagaaaagtctcgttgaattcattagaaaatggtacatctcttagctccatttgttttcaaatatcttctgccatttctgttgttgcaggttttcgacgcagaatgagaatgattaaaggtcaagggttctaaaatccaaaaacattatgacacaaagttctactaatagttccatcttatgatgcagcatgatgtcctttcatagttttaggtactggtaaagctgtggatgtagagactatcaatttctcacatcaagcttccttcttgatacagtctcatatactgcagagtgttaatacaggaacttctacaagcaggatttattgctgttgaagatcttacacatcttcttgtccctctatgacatgacgctgggactaagatcctgatccactgaactttagcaagactctcaaattcacaagggttttcatttcagttgccttgtcttagtaaacctgaggtaccatctacgatctctttcttgtaaatttatgcattaccttagaaagtgaaaaatcctgagctgatttagaaggataaagagactatatcctctgcagtttgaaaacaaaagggggaaaaaggtttggcctatatatatcgcttatatcttccatgtccatgatttagaatttagaaagatcttaattagatgtaacttgggatctatctatgcatatgcagcttttgcatctcaaactgcatctcaatagtcttgttgaaattgcatatgctttttttacgtcacatcaacacattttgatttgaatatgcaacactaactagcaataaatcccattttatttttggatctcttgtcttagccttaacttacataatcaagatatatgtaaattattaggtccctctcaaatcgttaccatctgcattttaagttttttgacagtaagtgtaacatgaatatatatatgcataagatcgatctcaggctgaggaaagaagcttatgttagactgaatcaaacaagttgcagaggtggttggtcttggttggaggaattctgattcggttcaagaaggttaaccgcaatataattccggttatactgccccgactggtgagaagaagtaacacccgactcgtaaactgtcccttgatgtatcacactcgattcttgttgctgtagacctgttctttcagtaatctgcagagatatttagaatttgcacatcaagagattgtctaccggaaaaaaatgatgatcaaaaatgccaaaaagagttatgtataaaaccttggagcggagatacatgttatcgttttgcagctcgatttcctacaatgcaagcgacaacagaaaataaaaaaagatgatcatcagaaagagaagttgctaataaagtagggggtaagttacttgtgaaggaagataggttttacttttacccttttttgcatgtattcaatctctgcaactaacatctcgtgctggagagaaaaaccaaatataacgggcaagaatcagatggatatatattcaatgataaggagattgatggagagttagtgattgtaccttcttggatcggacacgactgattcctttctcaagcctactttcaaggttcttgagttccttaaagttcaaggaaccaagagattcaccaagaatgtgtctgttcaaattctgaatgtcccgaatctgtctccggagtttagacgcctcttgctgatagtacttcatcaatttcgatcccatcattgttacaagaggtgaaaaaaaggtcagataactaaaagaagaagaaattaagtaattaacgaactagctagctaggtgtattaattaaaagctaacctgagtattagcttcggtgatggtcggagggttaacggcgtcggagcaagctttcttgtacctttctattgttcctctcacacttcatcaacattcacacaaaggaaaagattttaaaatgcaatcttttttgtggtagctatatatgtaaatagatgcaatcggtgaaaatctcaaacttaaaccaccacaagtaaaacaaagacacacgaaactataactgttggattcaaacactaaaaccagaagagaaaaaaatatatatatatgaagtcgttaaagaaattgatatttttatcttctggatatacaaaacacacagaaagacggatattaaggttttgaaaataaagttttgtccgcccaaaaccttaaattcaaccgacaaaatagtgaatggaccagtaccatatagtatatgatttgtttgcccttctttttttgggatattattgttattgcctattatctattaacagtgacatctcacaaagttatatatatatatatatatgtataatcaaagttcgagaagaccctaatgtgtacttccccaaaaaagtgtaatcctaatttgaaaacatacaaaagaaagaagtagcaaatcggagaagaaaataaaaagaatttgaattgcatatgctcttagttaattggaattggtcccaatttatgtacgacacaaaatccaaattatattttaggctagtatatattttggcctaattagattaaaaaattcactactaggctttaagaaaaagaagtgattttcaggtcaagtcaatagattccctactctagaagctaattttgcttcttcatttgtttttcctgaattaatatttgaacattacatttacatgcatatgtggctgaggcaagtatgtttttaccaagaacatgatatttgtaaatcttttgcaaaacagaaaaagaaaagctagaaatctttgcataacgttatgctttcatattcatatacaagtaatttacattgtgctgttgtataatggaaagctgaagttgagaaatgtcaaaagtaagatactactaaagcatgagggtgtttgaaataagaaagttaactacacttttgataatagaaacatatatatatcacatgtttctacatacataatgcattcctcttttgttaatcaaattagtcatgtccattataaacttcagatcagttctttagtcgttgtgaaagttcacattgaaactacaaatttactagttttaacttagatccatgatatgagacttgacttatagattatagtcatacatcaacctcaattatagtattaactagccaagcaaataaaaacaatatttttgaaaacatttatctttaaaaagcagacaaataatcaaaatggtgaaatgaacatgagctgttaatagctggaaacgtatagaaaaacggaaatgacaagtccccaacttgaagtggagaaaataacaatcaaaaatcaaaattttctgtttcgttatttttcttgattgatggatcggatgattaattaagtgactcaacaataagctttgtccctgattcattttcttgatttaacaaaaggattcaccaaaagattagagaagtgtcagaagacaaacacctactagtctctccctagtgaatcaattttgaaggaatctacatagcttttttatatagccaaataatatatattattataattttatcaagaaccctactttttcattactatgatggaaacctaatgatcaatctgcagaaataaaacttgatgggtcatcaaattgatcgaagtgtcttgtacaaactgacataaatagatacatatatagatactgttataaggatttgtggagaaaaagtgactggaacaaggtatgggggatgctaattaatgatcagagaagaccctcactgcttttttactaagagaaagaagttaaagtagggttccctagttttaaacaaaccctaattttggggatttttaaagagatttgagcttcagagaaactaaggaaaaaaactataaagagaccataaagattgaaaaacccaccagaagagtcgaaactttattctagaaaaaaaattcaagaaaatcaagatctagctaaaagatgtgtacctgttgttggcgtactcgtagagacggcctcgagtggagaagatgacaagagcaacctcagcgtcacacaagacagagagctcataagctttcttgagtaaaccattgcgtcgtttgcagaaagtgacttgacgattcgtagtgttctctatcctctttatctctatcttccctctccctatcttcttgctgctctctgctacttcattactcgcaccaccctccatttctataagccctagctgaagtataaacacaagagaaatagatcaaatccttttgcactcaaacaccttggattaaaagaaatggtttataaggattaactgaagaaccctaataatttgattggagaaaaggaagaaacttttaaaaaaaagtgtaaatcatcaataaccatacctggcttagcaagattaattatgatcagaaagaaagagaagtgaggatgggaagatgaattatgagagagttaatttgttcattggcctaaagatactattcttattatctcagtaccacttaactgctgcttcaactttattttttgtttttggtttctgttttggtttataatttcttttagaggaatatttctttggaagtatttaaaaacccatttgcagaaaacagaaggtttggtagttttttttcaaactgaagtgttatagaaggaaaaagaaagaaagaacatggaccattacttctaacattttctcaaatatcacacacctaattcttttaattaaattctatatgcatacatttagattgaaatttgaaattgattggaattaagtggtagaaaatatcaaattagaaagaagaaaaaagaaagaaagaagacagttgggtttggattgggtggggagagagcattgaaggaggaccatccaatttttctttcatgtttagaggaaaaaagagaggtatgggctctgtttctcatcagaatcaccttttggaaactttccttttttggtaatccctttttattctccttttctttttattgccctactcctatatacattgcatgtcgttaatatttacctggcattttatatataaaaaaaatatttccaattaaaccaatatttagctaatatgctaagaatttgggtggtttatatgagtgttcgtcgtcaacgttagaatggggttatatgaatatgagtgttataacttgtcaactaccaagcgagacaatgaataagatttcagtgttcttgccaattaaaaaaaactgtaaatagtatatattattatttggttgtgttcagaaatggcaatttaagagtatatattataactggtttagtttttccaaaattcttatgttcaagtcttaatcttggacattaggttagtccaacggcaatttgaatatttattttgataattaattacatcatattacgtaatttagacaaaagaactacatcatatatgcgacaatataattagagaagatgaaactaataaagtaaatgaaagcagagagcccacggggaatgactaatcatgtgtgtagtcattatccatgaaccctttctcagatttgcattaattaattgtagttacgaaaggaaactcttttgtgttttgcccattcctcatcattttcattgtacttctattcaattttcttaacgagcaacacacattttcacattcatgtcgaattaattaagttggaaattctgcaaaatcatttcaagaaagaacttgatgagagctggtaggtcttttgattgactttcgtggtctatattctcaatatatagtatatgctttgaaagttgaatatgcactagttcttgttgtgttaagagttaattagcgtgaagtaatataattctcatatcgagtgtttaatttactagctttatgacaaaataatcataatcaaatagaatactaatgaagaaaaaggtaatatatatatgtaagaaagatgaattatgtaaagattgcttttactagccctgtgacaaaaaatgttaaatctttatcaaattgaacgatgattgataattgaaatttaattttaatgaaaagaagtagtatataaatgggtaagaaagagagatttccaaattaaaggacaggtgatttttactcaagtatcataatcaaattgtgtatacgtccaatctcattaattagtgcataagttattgatcactaactcttgtgaaaaagaaaagaatcttttgttttgacgaaaacatattccaaataccattcatagggatactaaacccaagactttggatttcccttcatcagaaattttccaacgtttactttgagatattttttttcttcttagaacatataataaataggttcatgaaaacgtaacaatgcgttggagattctttacctggcttgttgccttaactcccacaaagattcttttgcttgaagaaatttcaagcttttgtgtatatatccaacgtcacagtgctaaagacgtttgagaaagtttctgttgaaagaagagtaaaaactcaaaaagaaaatgggtttcattattgcgattgcaaaacgttttgatgctctagttgggtaggattttattcaaattctgtctcatataataaaaataaacactatatttgtcaaatttttaacattattttcttcctttttcttgttgcatgcaggcctggagtcatgcttctctatcctctgtaagtgatatcaaatctgaatttaaatgtttggtttttacaaatgcaacttgatagttaactgaataaatgattaggtatgcatcatttcgagcaatagagagtccaacaatgttagatgatcaacaatggcttacatattggatcatttactctttaataacgatattcgagctatccgtttggagagtccttgcctggtaattacaatattattcactaaattctgttacgaattcaaaaatttatgcctataaagacaaaaaaatggtgttcttttgcatattgtaggctaccattttggccatacttgaagcttttgttctgtatgtggttggtgctaccaatgttcagtggtgcagcttacatttactccaattttgttagacaatacgtcaaaattgggatgaatgttggaggaggaacgaattatacagacgaacaaagaagagttttacagatgatgagtcttgatgctagaaaatcggttcaagactacgttgaccggtttggatgggattctgttgagaaagcaatcaaagcggtatatgatttctcttgttgatctttaatatagttatgtatatataatccaatacatatattctgggagtttaacttcattatttgtgttcaaatgtaggctgaaaaagaaactagaaagcattgagatggaagatcaagagtcaagaaaaacattactctttggtttgtacatgtatgtacatagattgtatagagcaatactataatgaaaaagatatatatgtttgaaagatttatggtgacaaatttgtgttctagtactctatgaccaaagatactattagagaagccagtccaactctttttgacaacatacatttggatgggtctcaatttgattaaacaaaacatcaggacacgattcgaattaaaatgagaatacaacactctttttgacataaaaataaaaataaaattcaagctcgcgctatatcacaattggtgttttgctaatttcctaaatctaattttattctaatttaattatgtaaaataataaaatcacatctttggaagtttttaaatgtaattcatataacgacaaaaaaaatgtaattcatatgacgtaaaaaaaatgtgattaattttgttagggtcattaatctatattctatactttaatactctgagatccgtgattattattatttgtccatctctatccacaaaccatacataaaaaattgatatatgacgtcagaaaaagataatacaagtctacatatctcttcgtccatttatttaatttaattggtaaagaattgagtgcgcaaaattaataatttccaatttatcaaaaaaaaacacattaataattttattttttattttgttcaacttaaaaaaagaaaagaacacacattaataatttccaaaaacccctcttttctcatagattgaagcgtatactctaatttgaccaatctaatctagggtttctagtcacttgaagcttctcttaaaaaacctgtctcactcctcgtcaacctcttcctctcccgctgtcgccaagattgaatcttttttcaggtttgaatctatctttagagtaatgagtttctctgatttcccgacaaaacatgtcttaaacgctggcttccttctgttgttgtccagttctgctttcctcttatctgggttttaatagatcctttcacagaatttgtttgtaagtgatatattttttccacttgtcacggccacgattctgattattcttctaattcgttgttgagctgttatgaaaacgatgcagaatttgaaagttcacaactttttgcttcttatctattcgcttaatgcttttttatctgttatgtttcgtgttcttagctggatttagttatgtgcgtttttcaagttcattaatgtgtaggaatgtttttctgtgtgaatgacttctcttcctcctatgtatctcgttgcatgactaaagtcagtggctgtattacgaaaaatctatactttatttaggttgagtataatttcaatgtctaaagctcttaaactagctccctgttaagtagaaaacttattgatgaggaattggccaagtgattatgattattgctatcgtgcatttgggcatgactgagataaaaccttaactttacatattttctgtcaatcagttgtggcttcaccggataataaggaattcagtaagagataagttcatcctgacaacatggagaccaagaatgagaattctgatgtttcacgggcagaggagtttaaaagtcaggccaacgaagcttttaaaggtgtgtaatttatcataaacctttacataatcttgtggcatcagtttatttcaactcttttagtgaggtactcctatctttttgcttaatgttgtttgttgcttacaggtcacaaatactccagtgctattgatctatatacaaaagctattgaactcaacagcaacaacgctgtgtattgggcaaatcgtgcatttgctcacacaaaactggaggaatatggcagtgcaatacaggatgcatcgaaggccattgaagttgattcaagatactctaaggtatcatcctgtgacaagatgttcctgtttcttcgtgtattcagccatattcactgattatctactgaatcacagggctattacaggcgtggtgctgcgtatcttgccatgggaaaatttaaggatgccttgaaggacttccaacaggttagtgtttcttgcacgagcattgtgccatttaagttgttgtctctttcgtttatatttgttagctgctgatctgatagtcctctttctagtttactctaaactttttgagtgaggatcagctcagttgagaaatgtcaaaatactatagatgaaatgttgtaggcttgtatagcttgaacccacccaaatggtcataacttgattgttttggtctgatcaagtgattagatcctggaaacttgatagagtgatagttatctgtcaaaatctggtttggtggtcgactgtcttgatcttttaagcaagactagcgtgtatggtattgttgacttggtctgctatatatattttaggtaaaaaggctttctcctaatgaccctgatgccacaagaaagctaaaggaatgtgagaaagcagtgatgaaactcaaatttgaagaagcaatctctgtgccagtatctgaaaggcgttcagtagctgagtccattgacttccatacaataggtatccttcatctgtttgcttattttttggttgtcttatagcttgcagtttgttgtgtcacctggttctttcgtctcttgttatgccatgcctttgattcagtagttgaaaaatggttgaatgtagctttagactagtaatcattcttctacctattgtcacataatagggaacaaacccagatcatcatccatgcccaccaaaacggctttagcagcagttgttgcagcagtaatggtggtggcggtccggggatttgccacaactgagatactcatggtgttggtttcggtggtattagggacattttggtggggtagcttcagtggtagtagtgtcttttctctggttaaaccctcatcctaggatcaatgtggattgttttcatgcatatcaaaacctggatagtttcctttcttggagtctcagttgagaattgacaaagctcaatgatattgatgtcaaaaacatctcaacaggagtggaacatttcatagatttactaatatctctatttttgttttgttatgatagcatacctcttttactacattgtaaaaaatgtgtatccatgacttgtagcttttaatattcattgataaatggtgttcactgttacagagttcttaaccttttgtcaatttacttattcttttcaattttattgtagaggttgagccacaatattctggtgctagaattgagggagaggaagttaccttagattttgtgaaaacgatgatggaggattttaagaaccaaaaaacattgcataaacggtatgtattgttttgggggtactcaacttaatttacacagttaccatatgttcatgctttgcgggcactttatatgtaggtatgcctatcaaatcgtcttacagactaggcaaatcttgctagcactgccttctcttgttgatataagtgttccacatggcaaacatatcactgtttgcggtgacgttcatggtcaggtatgctttggtttcacctactctccgaacataatattttaatgtctcaaatgaatctgcgaggatccaccatctcctgttctcttgtttatatatgtagaagttttcaataaaccggttcccatactatatttctggaattggattttattatgaatcattctacttttcatatcttgaatttattggctaaccttctactccctcttgcactattaagggctgtattgtgttgtattgggtgtatgtttgacacattgtttgcttttgcagttctacgatcttctcaatatctttgagcttaatggcctcccttcggaggagaacccatacctatttaatggcgactttgtggacagaggctcattctccgttgagatcatcctcactttgtttgctttcaagtgcatgtgcccatcatgtaagttctctaaaactttgttgtaataattctttgatgttcatgttttaattgcttttgctatcactggcaaggattaaattatttactattgtctgatggggttaaaagtttccattttaattgtaaatcgccatttacacacctttgtactgcagccatatatctagccagaggaaaccatgaaagcaagagcatgaacaaaatttatggttttgagggtgaggttcggtccaagttgagtgaaaaattcgtggatctctttgctgaagttttctgttacctcccgttggctcatgttataaatgggaaggtcttcgtggtacatggaggtcttttcagtgttgacggcgtgaaactctcagacatcagagccattgacagattctgtgagccaccagaggaaggtatgtttcatcatatacatcttctgtaagattacttctcatgtaattgtgttctgtttaatcatcttatcttgctaatggtttatgcaggactaatgtgtgaactattgtggagtgatcctcaacctctccctggaagaggcccaagcaagcgaggagttggtctatcatttggtggagatgtgacaaagaggtttttgcaagataacaatttaggttagttcactgtcttgttattatcggggtttggtttcgcaaactaatatttacttgagatagctattaacttgcattttcatgattgtggcagatttgttggtccggtcacatgaagtaaaagatgaaggttatgaggttgaacatgacggtaaactcataactgtcttctctgcgccaaattactgtgatcaggtaactcagacactcctgtcttcttatttcaaaacagcacccagttacttgattctttacttaacatggactggtattgttgtagatgggtaataagggagccttcattcgttttgaagctcctgatatgaagccaaacattgttacattctcagcagtggtgagtgtagtcctcttacatagcattgttcttatgaatgtttcacagaagatagttcacggtttgatttagactcattcaaacactcttctaattttctgatattgttatttcccagcctcatccggatgtgaagcctatggcatatgcaaacaactttctcaggatgttcaactaaccagcaaaaagcttcttctactcaaaatgctattctaaagactcaagaccagaagtggttcagaaacataatgatataagtttttttttccctttatcttctgcagttttttcatgttgttccagaaaagggaggccatgataattaaaggtacagtatccggatttgatcgttttttttcttcttccttcttttctgataaagattttcactcttcctttaagcttatccagcaacttttgtcccttttgtcttatgttgtaagagggggtaatgtatcattcttattttagatgaaaatcttgtgattactcaacaaaagagtgaccaaatgaccccccaaaactttgtacttaaaatggtttcttgaatcaaaaatcaaaaggtgtttctttaaagcttcttgtctgcttcttagagtctttttgaatggagtttaattcaaatattcaagcaaagacagcaaacaaaaacagagaggtcaatagtgttgagttcttgcaacagttactctcgtgtagattcagtttttcccttatttgagtttgtacaaatggtgtgacctgtttaaatacaacagtctaaagaaagttaataacactattgttttccccactctcttacatgagctgtttcagatcaaaatacctgcagattctcccatgaattttgcagagaattttgacaaagtatgtgcttttgtttagcgatgacaaaccactactgaatcacagaatcataaaccttgttttagtccatgcatggatagatagatagatacatgtactaaaatgtggagaaagcaaaagtagatggagtggtgtcaaatcgtaaagcactgatgaaaggcctgagagatcgagaaagcattacgtggattacataaaaacaatttacaaaaattgtcagatgtttaagggaagtagctagaaatttggattatggtgttgaccggttttaaagtcttgtaaccaatcaagtgagttttatggccgttggatttttaattttggtgtagggcatgcttgagctagatccgtacggtaaatagtaggttctgaatttacctcttcagactcacagtccaggcttaagattagatccttgactacatataatacacaccagaccatatacatcacaatacattgtacattgtcttacaaaacatctgctgcatattgccaagtgtagtacaatttcttaacgttcaaattttaacctctttttttacttcttacaaaatgatgttttctctgttttaaataaccgttatgtcgtaagatattcataacattctaaggtacaacaacaaaaataatcctaggacagaaacaagtttctttgagttttttttgtttgcaaaagtcttgatggggttgtcaaatgtatttcaattcttctgtatttaagttacaaataactatgattttgtctggatcaattcaaactatgaatagtaaaacttcagagaaattttgaaaaaaagacatgaataattgaagacagtaaatagagagacatactatgcccaccacttttcaagagtttttccttattagtagtttttattgataacaaatatctatagagaaaagatgatttgaaataatagaaaaagaatgaaactattttgtcaacagtgaagaaactattttgggtgatttttgaaacagtttgtaccaactatacattttgattgtcatgtggtgtgttctcttttgaaccaacaaccagatggtcatcttacatcaaatcttgattacgaattggttttcttaaactagttttcttcaaagttaatgtataagttctaacatgtcacattgagatgatgactaattattcatccagaaagaatctcattctaggatcaatatcggattggatcaatcataacaatttcatatcggtttgaagtagtgtgtattcagattccaaaatttaacaccaattaataaatagatccatgcgtttactatttaagatcgttagtctcatcttatttcatacatgtgtgaggactatcttcctttgcaatagacttggatcatacaaaatcacattctttattgtacattttaatatagagtatgcaaaaatagtacatggttagaaactaatacatatatatatatagagagagagagacataaaacaggaaagccgctccacagaacctgagagattcgaggagctaacgtattcacgagactacctcccaacaaagacaagtccttcaaaatttggttcgaagaaaagtgttttgaataaagaagaaacatgtgtgtatggccttacaaaacccatcaagtactctttttaattttgtgtcttctctttctcttcccaatctcatgacttgagtccctacctctttgtctctcactaccccacacgtgtcactttcagtcacttccatttataattgcatctcacacactcaaaacctattcgtattctttactagctttcttctaagtcttcactcttttatcataccttgtttagattctgattgttcacgtgtctctgtcttgtcttgtccctaatccttaaacatttcacttaaactcttttaaccttttcctaagtttctcttttgggtttttgctcctcgatgatgatataatctcactttttatacttttcctcctcaaagattctaattaacgtcacatctctccattttcttttgcattggagaatgaagaacttttatgaattctcagtataatatcaccaagaaacacacacactctctctttcctctctcttacaccaaaacctatgacgatgaagagagctttaccatctccttcctcactgctcttcttctttctcctgataacaccactcttcctctgccaagaaaacagagtctctgcctcaatgcctccatctgagtcagaaactctcttcaagatcatggaatcaatgtcttctgatcaacaatggcgtcaatcccacccaaacccttgtgcacctggctcatcttggccaggcattgagtgcaaaaccggtccagaccacttatcacacgtctctcgactcgatttcggctctgctccaaacccctcttgtaaatcctctgcttctttcccttcttcaatcttcactctcccttttctccaatcagtcttcttcttcaactgcttcactcacttcccaaccacaatcatgttccctataaaactcatccctaactcttctcttcaacaacttagcctcagatcaaacccttctctctcaggtcaaatccctcctcgcatttcttctctcaaatctttacaaatcctcactctctcacaaaaccgattaaccggagatatccctccggcgattttctcattgaaaagcctcgtacacctcgatctcagctacaacaagctcacaggtaaaatccctctgcaattagggaatctaaataacctcgttggcttagatttaagctacaattctttaaccggtacaatccctccaacgatctctcaactgggtatgcttcagaaactcgacttgagctcaaattctctcttcggaagaatcccggaaggtgtagaaaagcttcgttcgttgtctttcatggcgttgagcaacaacaaactaaagggagcttttccaaaaggaatctcgaaccttcagagtttgcagtacttcataatggataataacccaatgttcgttgctctccccgttgaattagggtttcttcctaaacttcaagagctccagctcgagaattctggatattccggcgtaatcccggagagttacaccaaattgacgaaccttagctcgttgtctcttgctaacaacagattaaccggcgaaatcccatcagggtttgagtctctgccacacgttttccatctgaatctcagcaggaacttactgatcggcgttgttccgtttgattcaagtttcttaagacggttgggtaagaacttggatttgagcgggaacagaggattgtgtctgaatccggaggatgagtttagtgttgtcaagaccggggttgatgtatgcgggaagaacgttagtagtggtggaggtttatcggtgcattcatcgaagaagaaatctcaagcttctcggtattacagatcttgcttcttcgccaatgctctgtttccgtttgctctgtttctaggtttacatcaacgatgggttctctaagagtgagataaagacaaaacagacagagaattaaatatttatcaaatccctaaaaaagagagaagaattgtgtttgttcccaaagtagaccgatgatttctagggaaataaattaatagagtcgattttgatgtgtattagtttcctattaaagcaatgtacgttaatgttgtgttttttttttagtttaataataatactagtattttcagatttttatatgattgttaataaaattatttcgagtcatccataatggtcctgaacaacttcatagccgtgtgtataaatatgtgtttgtatacaaaagagaaaataacaaatgaaatgaaacgacgtttttgttttctattgggtaagaattaaatttctagtaaatctgttataaaatttacatacatagagtgtaataaacaaaaataagggagcagtttggacaaagagtttgcagtgagtctgataaaacgacacaacctgattcaagtctaaccatgcaactaaattgaagacctagaaaaattaatgttaattgagtttcaactaaccatttcaaatttgtgttaagctaatttatttatcttaatcaactaacgtaatttgtttttaaactgctatttgctaaattcattatgtaggagtagccgagtaggaccctgaatggtacgctcaaaagaggtagcagcgtcatcgaacttaacgttaggacaccctatgattgatcgtatcaaatgaccaaaattaaaaagatgattgagtaaaccaattaattttggtatataaacaatctttttattatcgtacacatttttgggatgtgatgtgactaatgaaaggtttaaatatatttaaacatgataaacgcagaaaccaccatatagaggagaaactagaaaaatataatttgtcagtcatgtgtctaaatccacacctacttttttctcatgctttttttcttcctgcaaatattgcatttcctttgcctctctcacacatttcctctgtcactttcttttttatatatttttatttcggaattccattaccgtgaaaaagctttgtttacaacagtaattttgtttcaaatgctttcttgttgtctatttttatcaattactatgcctctgcttgaataacttaaaaacacaagtgatgttaattgtgttattgtagatcctatgaacaaatttaatttatagacgtgtgaagttataaatgaaagatatcattgagtgagtgatcaccgttgcagataatgtttaaagaaaaaaaaaaggaacagttccttgttcatgtcatcatgtgttgaaaacggaaggagggaaagaaaaatctatcactctcagattcagagcctcacgtggggtaaacttagaattctatttttaggtacgaatcaaaatatacgacccgtcgcttttaacatgtcatttattatacctttcactctcatttcctccatgctttttttttaaaacgtaattagacctattcattctccataatataatacataaatacaacttataagattaatagcctcgtacactaacattaaagagtaaataaccgtttgtattttccatcttttgattaatgataactataatttatgaagaacatccataaactcatgagttttattttgaacgcaacatccatatttagctttacattcatttttttaataagatttcagtcatagttcgaaaaatgaatgttgggttggttccgatggtaaagcgagccgtatcaacaaaaaaggcccaaataaaaagtggtatactgttgggcctaaagatgaatatacagaagcccatattaagacaattcggcccattcagcattgcgtagcaatcgaattgatatttagcaaatcgaggaaagcaattgactaactagataatactgataagtgggtcccacataattctgacagcttagagatggagaagatcatcaccgttagtccaagttgggtcaataaggcttacgccgttggatatcaagatatccgttagatcgcatacacgtggatactgttcaatactcctgaccgcaggggataagacacgtgttatattaacgaagagtaagaatggtttctaataatttcttcgctccctttcttcttcttctctccttctttgaattttgattttggttgaatggagatatcagagagagttcgagctcgattagctgttctctcaggtcatttatcggaaggaaaacaggattctccagcgatcgagcgatggtgcacgtcggcggatacgagtgtcgcaccgcttggatctttgaagggaacactgacgatcgtcgacgaacgcaccggaaaaaattataaagttccggtctcagatgatggtaccgttaaagccgttgatttcaaaaaggtttaaccctttttctaaatgaccattttcctatcactgtgggattttgagctgagaatttgctttgttgcgtgttgtttggcttgcagatagtgacggggaaggaagacaaggggcttaagttatacgatccaggttacttgaacacggctcctgttcgatcttcgatttcttacatcgatggagatgaagggatccttcgttaccgtggctacccaattgaggaaatggctgagaacagtacttttctggaggtggcttatcttctcagtaagtgttttaccttttaaccttactacacaatttcaagtgttatgtgtatcgaattggacattgatgaaaagttttctcctttactatattttctggcagtgtatgggaatctgccctctgaaagtcagctatctgattgggagtttgcagtttctcagcattcagctgtgccacaaggtgtattagtgagtctctaatccttggttgatggatttcaatttcgatttgtaaaatggagttagcctgttctttactagtagcctattttcttgtctggtcgaacaataatttgtcaagactgttctatacatgttgttctgaggattgtgtgctgtactcaaagctatatatttctcatatctaactccacttacttgataacttttgtgcaggatattatacagtctatgcctcatgatgcacacccaatgggagttcttgtgagtgcaatgagtgcgctttccatctttcatcctgatgctaatcctgctcttagggtaggtttaaccttatattacttctctaacaacatgtcaggccttgtcactcgctagttttagctcttttgaaattgtccgtataaacatgttgactgatactctattgggtgcagggccaggatatttacgattcaaaacaagttagagataaacaaattatccgcattattggaaaggtatttttttgttatcagtggttaccttacttcttcctatattgtgtcacgcataaacatatttggactctgaatttcatgaagatctgatgcaactaaacgtgtttgcgatttgtgcaggcaccaacaattgcagcagctgcttatctgaggatggcaggaaggcctcctgttcttccttcaggaaaccttccttatgcagataatttcctctatatgcttgattccctgtatgtctctgctatctctttcttcttgaattagttagaaactcaacttttagatttagttttagatcttgacgcttcagagaacttgaagcctagttatttttttactgtgtacataacttgtagcgtgccattaacacacttcttacaggggaaatagatcctacaaacctaatcctcggctggctcgggtgttggacatcctcttcatactgcatgcagagcatgaaatgaactgctccaccgctgctgctcggcatcttgcctctaggtacttatctttggttggaatcttagtgaccttgataggagatatattgattaggaaatgtcttcttgtagcggtgttgatgtctacactgctgttgctggagctgtgggagcgctttatggtccacttcatggtggtgcaaacgaggtatgctatttattctcatgtcttcatatgttacatcttctgatgtattttcatgctccatggtctttgaaattcatgtctttggttccattaggctgtgcttaagatgttgtcagagattgggactgttgaaaatattccagagttcattgagggtgtgaagaacaggtaaaatcaattcttgaaactatatgcttccgtttccgaggtttgtgacaagtcttttcattaaaattctcatccctttgacatcttaggaagaggaagatgtctggttttggacaccgtgtgtacaaaaactatgaccctcgagctaaagtcatcaagaacctggctgatgaagtattttccattgttggaaaggatcctctaattgaggtacgctatgtccacgaagttcaagcttatactacaacttgatgcccaccttttcgatttagtgtaatttttcatgtttccttaaagccaatgtgtttgattctgatgtctgcaggttgctgttgcacttgagaaggcagctctctctgacgattactttgttaagagaaagctgtatccaaatgttgacttctactctggattaatatacaggtaaaagtttgaatgcatgtgcagtatccataacttcctctcaacttcatctaaatctgcaaacttggaccattacaacagggcaatgggatttccaccggagttcttcacggtcttattcgcgattcctcgcatggctggatacttgtcacattggaaagagtcactggatgatcctgacaccaagatcatgagaccacaacaggtatagttaatctctttccaagaataataagagaaagatttttctttggatcaatttgaaacttggatggttcattggaatattaaatgttgcaggtgtacacaggcgtgtggctgaggcattacacaccagtgagagagagaatagtgacggatgactcgaaagagtcagacaaattgggtcaagtcgcgacttcaaatgcatcaagaagacgtttggctggatcttcagtttagacgtaggcccttttagggtccatactatacatcaaaccacaccgcaaagaataaaagagattggtttctctagcctaaagctaagatacttgatcatactcgaaacttagatttctcattttgtaggcacaatatagacttgatctatatttgcttcaatccatcttctaagggtgtttgtccgccttgtttgtcttcttatcagaacgtgtttattgtataaaatgatttatggttatggattattactctaatttctatatcgaatgcttctgcagagacgtttgttgtgaaatatctcggccaaagcaacaagtagaaaacaaagcactttattaaatcattgtaaaaacttttgaagatctattgttacaaactaggatatcatcaagccagagtttcaaaactcggagttcttgaaacttgaagtagccatgtaaatgatacactcgaagaaaaaatgatctgtaaaaaagctatataagttacattacatgtttttgtctggtggctgcattttttgaagttgaaggagcagtcccaggaaggccgttgatcctccttggaggtagcttttgtccaccagaaggaacgcttcttgaagttgaaggcgcattagcggataagccagtcctctttggagcagatatactatacaagacatgatccgtcaaaccgatcaagtttgggggataaagaagtggatccatatagatatatagatactgaggacatgttacctgaaactcttctgaatcgtgttctttttagtttcagtaagatttcgtccaccataaggaatgcttcttgaagttgaaggcgaattcgcagataagccagttttctttggagtagaaatactagacaagacatgatcaatcaaaccgatcaggtttgggggataacgaatgtgggttgatatagctaaatagatgctggggagatgatacctgaaactcttctgaatggtgttccttttaatcgcagtaagatttttcacttcttgactgtaatcaaaaccatcagaagatttgaattaagaaatagattgttgctataaaccttataagtaagactggtgattgtgcaactttgaagtgtacctcttcaacagatctatttttgccttcttcatgatgttgctcttcacatgcccaagattgtaacctgatgcactattacctgcaacaaaatcgtccatataaccattagattacaaaagccagagggaaaaaaaactaatatatgcatggagcatttgcatactgttttttggcaagatctgaccagatgctgcaagaaatcatttagattaaaaaaatgtgttaccccaaaatggtcttttgcttggaggagctttcgagcagaccttagtttgtcgactttgtttccctgacaaaaggaaactgaaaacgattacaagggaacgaaagaagaaaatattttggtcaaagaacatgcttctcatcattgagctaacggccataacaaaagacagattcgtaaaaagttatactttcattttcgtccttgtaacgttctttcagtcgaccaccaagttccttctccttttgttgcacagctataaccttcaactgcacgaaaccatgtgcatgtatatcttaaatatttcaacacttaaatatgtatcaagacttgaaaaaaaaaccaacctcatataagttcctccatttgaaatcatttactttattccactccaggtcctctataagatccttcatgtcctcttctccatagtgcttcttatagaatcccttccaaaacttatcggtgattggactaagatctgtgtcctagcagaacaaaaacaacgaaaaagcataacttacgattaaaaaaacccccagcaaaacatacaaaagattaatcgtgccatataatgagaaaagcttgttacgtcagtagcatcctctatgtgcttcagctgttctagtgtacagtgttgcagaatctgctcaaggagctgaaaatcaaccccaccaacatatccaatgtactttacattatcaatcgctttccttacgcaaagatcaacaagcgaaggtggtttcttggtaagcctctcaaataacatagcagcttcccaaaacctacaagaaaaaacacactttaaatatgaattaacaaggatacacacaagtagactatatcactaatgtacaaagatacagaattcatcagcttatgagaatattcatatgaataaatttgaattttgcctcaaaatttaaacaaaacgttagctttgatcattaaagtaggttcctttacactaaaaaatccatcaatcatataactcataagaacgatgcagatcttcataaactctagagctttctaaatctaaattcaaaggatttgatttatgaattgagatgatccaatcaatcaaaccctcaattccaattcacaattgaaccaatctatttccaaatcgaaaacagtagatgcagaggaggaggttaccaaaaaaattaaaagagagctgaatcgaagattgaaccaggaaggaggggacttgtccaaagaatctcttcgacgatcgaagaaaccttttcctcttcccggaagaatgatgatagcggtaaacagacgccggagtttttgggtttctttaatcgtatgtatactcaccccaacgatgatgacgatgatgatgatgaatacaattggctaacgcaattctcgtaaacgcgcgttcaaaaccacgattatcggccctagtaacgagtaagttattaacttatttattaaccaccgcgcctgtctgatcgcgccttcaccggtttcacgtgaacacatcgttttatgtacactaagcataaaaccgaaccaaatcaaaataaatgaaccgaatattaactcaaactatagattaattcttataccgaatcatatggactgaacaaaataaatcgaaattcagtgaaataaatatagagacctcaaaaagatataatactgattaaaacccaagatccaataaattggtttgatcctttcagtttgataacattcgttcggttcagaattggtttgacttttgacctgtttccgaaaacccaagatccaataaattggaatcgaaccaaaccggaaaaaacaaatggacaggactcatttgcgatttttaagatttaggcaaaactcttctctgtttcgacgcaaaaggaagcatttttaatggacgcattgggtggttgcggcggcgctggtggtttctggggatggaatggcttcgatcaacggagaaagaagaagtcttccggtgatagaggtaagaaacgtaattctggatcgtcggattccgtcgatgtgagcagagacgccggcggttatcggtttcctttgaagcaagctgtgacggccggagcactcactttcaccggtgacacgattgctcagctatcagggagatggaaaaagagaaccgctcttaaacaatcatcttctgagcttgacgaggtttgtctctgaccaagttttggttattttcgagtcatagatttgaattttagaggttttagtgaatgttttgattgtttgaaatattacatgaatcaagttcctagtgtggtatagtgagaattctactgaaactggatctttgcataaccaaaaatgttggtgagtatggttgtttagtgagtagtgacagtctttggttaggttatgtttgatttgaattcttgttggggtgactcatatttactctcttgcaaaatggtctcgtacattggtggaacttggcttgagactaaggatttatgattggatcgttttacttagggggaattgtggaacattttctcagaacatgactggattcgtgcgctgcggatgagttcttacgggtttctcttgtatggtcctggttcttatgcgtggtaccaattccttgatcattctttgcctaaaccaactgcgacaaatctagtgcttaaggtacaaatctaggcgtgttttgttaatttgtacttggaacacgttgtgatatagtttttactgcttatactgatcccatgttaggttctgcttaaccaagtaatccttggtccatctgtgattgctgttatatttgcttggaacaacttgtggctgggaaagctctctgagcttggaaacaagtatcagaaagatgctcttcctacgcttctttatggtgagctaccaattacagagagtaatttttttactattacatagcatcgttcaaatatttactgttcttgggattactgcaggatttcgcttctgggttcccgttagcatacttaacttttggtatggctttctttctctatcattaagtcatttggagagggtctttatagattgtgtgattatgtataataggattgaggtctgatgaaaggtgaaatttacagggtagtcccgcttcaagctcgagtagcgttcatgtccatgggttctgtgttttggaacttctacttatcttcaactatgagcaagtagttacatttatatttgtattcttcagcctcgctgagtgataatatatcattctgaaaggtttcaaatacaaaattactgtttaccaagagactatggaaggctcttctcatcctcactccttcctttctttgagtatcgcacaactaatgtgttactctgatcaaactcatggaaaactatctcctctaaaaactttagtttgagtgtttttcttgagttcaactacttgtgggtgttgggattattagtttcgagaagttactgtataatttttgaatttttatcattttaactctcagtaacaaattactttaaacttttgaatcttatgacttaaccttttaattttattctcagtgattggcctgatttttccaccatttattttatgaattcaaatgcctttatttaccgtattccgtattttagatattattgttttaattttaggcttaataatgtttaaattgtatatttgttgtactgagaaacaacttgatttttatgttttgagatatatagtacggctactttaatttaaaaataaccattaaaccactagattgattttttaccctataaaaaatgatgaatcccgaccccgataatctggtttgctacaattattattttcttacaaccaaagaactaattccaaaagaaaactaatctccagatatactttatattgtggacgccttgattgactgtatatgtgtttcactattacatgttgatagattacatatatgaaagagaagtagagaatcgtatatgtacgtaagactaaccaacaactcttttattttgtaagttggtttcgtggttgagagatatcaaattaaggtgcagagaggttggtcacttttaggtataggatggaaatgtcttaccacatgttaaatatgaaaagaattgctaaataattataacgagttgcttctaaatattagtatttgtttatttatgatggctccactcttttcctacgctccctttgagtccacacgcatctaaagatattcgaaccttggaagagccaaaatgaaccttggagtaatatgtatttttatctacgttgtaaatatataaatgaataataagaataaattttgaatacatcatatactttacagtgtacgcatcatataaaaatttcttatttatgaacaatttgaattgtataacggaaagaacaagtaattaatcaacaattctaatggtgtattatgacttttatgagtctgacatttgaatttgattgcacttgttacttgtgtgttaatgtgtgttgtgcagcaaaagggtccacacgtaattagtccaaagataagggtattaaagtaatttatatatgtagctaattacaaggtttaaatacctaacccaattccttgttcatcatcttctaacaaacaccaaaaaaacagagaaaacaaactttaaacaatggctggagaggagttgttgaaactgttcgagcaaaactggtcagagaggccaatcttcaagaaagacaaagagaatctgaatggaaaaagtagagagaagcgtggagaaaaagagattctagaggaacgacgagaagaagaagcactgaagaattttccggtgagctttcttgtagagagggctatgagtgacgagacgatgatgacgacgagttccaagacaagtttgtttagttcttcatcagatgatttgttcttgtctcctagatcggtcttacccgttaaaccaacgccgatgaagcttcagacgatcctctccggaaaagaagtcaacgcgttcacgattgcggaaagagagagactactttcagagaaggaagagcagaggaagaagaagaagaagaagagtaatgtgagaacaagaaagggaaagagtatgtcggatttggagtacgaggagcttaaagggtttatggatctaggttttgtcttttccgaggatgaccataaagactccgatctagtttcgattcttcctgggttacagagattggtgaagaaagatgatggagtaacaaaagaagaagaagaagaagaagaagaagacaaaatcggtggaaacagagcagcgagaccgtatttgtcggaagcgtgggatcattgtggaggaagaaaaggaaaaaaacaaatcacgccggagattaagtggagagttccggcgccggcggcggctagcgaagttgacttaaaagataatctaaggctttgggctcatgctgtggcctcgactattcgaagttaatacaaaagcttggattctaaaaatgcatgccaaactttttctgtatctatactttttggtcattatggttttcaaattcatgtgaattaaaagaaaaaatctgttcacaagaattcgatttttgtttggtgagagagatctctgatacgaccattgacccagaacaaaagtgtccttgtcggagaagagaatctataatgaggtttttgagtggtgggccaatcatatccaataatgctcaacacttgtcatatggtttattgccacgtcactatcacataattctcacacaattgttgtgcataatcacgttgataacgacttattagtgtattatctatcaagaaactagtgttttactatttattttgtctaggcataataattgatgaaattacgtaataatgaactaatttttttgaacataaattaactgttttgcaaatgttatataagatccaccctctctctctctctctttgtaatttcatcgttgcgttctatacttttcacagaccaatattcacttaattaatgtagaataatatttaaaaaccttattaatcgtggatgatttataacttgcgtgaataattgttcaggattcctatatatatcgagaattaatactttaaggggtaaaccataagtatgtatgttcacattcatacgctcttgaaatcgtttgtaaggaaataattgacacgaacaatctcaatgatcacgagcatattacataactaatgtattttaattttatctaggcgttgcaaactttttttttaaatagtataatacagaaatcgaaaacgttaaatacacttgtttttttcttccttaatcgatgtgagaacaaagctatacaggtctagaacgcgacatgacatttacatatatagatatataatctagtaagaaacctgcttacctatataaactataagtgatttctgtctatggtttcagttgtctcctctggaggcggagtctgggagtttgaaggtggggcgcttatccacgcctcttcgtgagtattccctccatctcctggctgctgcggcggctcgctgtgctcgttcttgtacttcttcctctgtcacatgacatacaccgaaatgagtaaatatgtaatgttgtatgatcattagccaaagaggaaggagagtttactatcatcaattttaccgcttttctggtattcattctgtttgccccagaggttatcccaataggaaggtgtttcatctgtgtttttcctcttcatcattctacttctagcttgattctgaaacataggtaagcacgaggtgatgtttagatattatgttgcaaatagttttccaaggatttcaaaggtgatgaaagttcataccaaaacttttgcttgcctcttttcccatcgagatctcgcctgaaacaggattcaaagacttatcagttagatgaaaattaaagaacaataggctacattgttgccaatttgtatgtgggaataaaaaatgactaagaacatttcagctttgatcagctaccgaaccgagcgggttttatttccttcttaccattctgaaaacatcaactgctcctgaccccattccagaaagcatcagagcaacctgatcaatcaatgacaattccaagagcttaaatgcagcagttcagcaacaaatatacaatcaagaaacctcagcaatgtcttctgtttctaatcaatgaacaacaagatagctacaagggaaatgctcgtcttacattcactctttcaacccttcgcatttcatcttcaagcaatgacaactgtgcagcagaagtctgatggatacaatcaaccgggctgaaaacaaaaccaaaagcatctcctaatcagttctctgaaattgcccaccagaagtaactataacaatcagttgcatctacagaatataaacctaccatgtttcaactgcttgctgaaccaaatctgggttgccacgctgattacaagcccttgctctaccaaagtcttcctcaatttgaaatatatctggagccacattggcacaatttttgcagcctgttaaacaccaaacgcaaatgtagtcactttccagatcatcaaagcacgcagcctctaaattgaagaaagaatacctatacaagcaaactcatcaacaaaaacatgatcccttggggtggagtcatcaagaaaaggattgatggcagtcactgtatacccatgaatttcatcgtaaaccatacgctgtacagggtcactgagaatctgcaatgcaacggtaaatcattaaacgaaaaagcatatggaccttactaaacgcttacaaaaatctataaggaagtcaagtaaaaaactcacctcatagatatcgttaatgaacatgcagaaatttgtggtttcggggtcattgccactcaagtctggatggcacgatttcatacagttatagtaagctttcttaatctcctcctgcgtagcatctggaagctattgacatagcaaaggagagttattaaagtcacaatctttgatcttaatgattgtaacctgtcaaaggcttcacaatttcgacaaagatgaatctagctacaaccatatgaaatgcagagtatttttccatgatacacaagaagtttcaatcataagcaaacaacttaaaccaaaaaaaaaaatcatcacttcaaaatccctatatgcatatatcaaatcggattgaaatagccttggttcttacgagtccgagaacggcatagtaatcatcggcgacatcaccggtggaaagagaagaagcatcctcagttgcaactctcaatcttccgattgaatcggttcgcctctttcctgcgtaccgaggtaagtaccaagatgaagaagcaccggtggtcttcgccgagaaccgcggcgacgcacctgatctggagctaagagctgagttctggaacttcaaaagatccgtacaaacaggggaaagtatctgcgccattgaagaacttcaaaagatccgacccgatcctgttccgatcgctcaaattaatttcaatttcattcgtaggagaagatgaacatttatttgaattaatatttttattatttttgtgaagaatttaaggcgtacgagggagaaatgctgacgtggcaagataagaaccagggaagcttatttggaggaatccgagatgaatctagcggcgatcggcgatcggcgaaagcgtgcttagccgtccgtggcacgtgtcagctagtggatttatatgtctccacacgcttcaactacccgccaaaattttcttatcttgcttatcctcacacgaaattagatacttaaataactgaaactaaagccaataatgcatataaagtacaaagattaagattcagacaagtaaacaaaactgagacagggttttctaaaacagaagaaagagttaggaggaattgttttagccagtgatgttctgggacttgttgagaatgactccttcgtatttcacctggaaccatttcattgcatcgtctttagttactctgtgttggataccaacacgagccttgcaccttctgcgacgtgctacacggtagccaggacgttctaggaccacatagaagtccataccatagattccagttgatggatcgtacctttataagaagtgaaacaaagatcaatgagtatcaccaagaatgtggtgaaccccaagtgttatgacaggatgatttaaggggattgacttacttgatacccaaatcaatgtgttcttgaataccaaaaccgaagcaaccagtgtcactgaagtttcttctgagaagttcgtattccttgactttcaatccactttcaagtagttgcattgccttctcacctctgacggttacatagcatgcgatcttctcgttacgtctgataccaaaagaacgaacagtgtatctagctgcaaaagccacacataacaagggttcttgaaaattgcaatggaagaagctaaaccaaatcatgtctctcagagcaaaccaaaagcgatgcatataaaacagagtgcacaacgcaactatatcagaagcggggaaacgaacagctcctaatttggactggtaggcttatcaagttatcacaaaccaccagataagggacttactggattccaaaatctcaaattcatcatcaaaccatgcacccattcatagacttaactaaactatgtttcccaaattcttctagattactaaatctatcaaccagactatttgtaagctttcaaatatgagaaaaaatctaacctttggagaaaacaggagtctgaccactcaattgttccaaaacctaccaagtaaccacgaatcaatcgattataaccaagtgacaacaagagtgaaaaccacagagaatgggtaaaaaacaggaggaaccttggaggctctggtgagacgatctccactctcaccaacggagatgttgagaaccagcttctgcactttaatgtccctcattgggttcgatagcttcttctccgacgcctgaatttcaaaagtaagtaaatcttcaaatccctattcacattacaaaatcatacaaatccaagaactgaaacttaccatttggaatttgggttgcgaaattatcaccggccgacgggaaaggagagacggagaacgaaacgactatttaaatgttagaagccctaatcctaagtgtaaagaacggcgactatttaaatgacagttttacccttaaaggcccacgcttctctcacgtgactttctttcccaaacagactacttaccttttcttcatcagtctttctgctttactctttcctcatgtggaaatggaggaaattgcttataataagttgtttcagtttcttcgtctcttctcttaaactttccaaaaccctagtattcgatgttttcacttttgatctcacgattaaattggtattgaaagtggagagctttcacgactctgtagcaagtagcactttagcaaggtatgttgtctgctctgtttcgtctttttcatttctatggtaatcaatgtgattgaagagatacatgataacttttgtattagactttgcattgtatgaaaaagaacagacctttgaactcatcaactctgtctagttactgtttctgaatccaattgctgtggttttaaggttttggtatcaatgaatgctaaagatgtaatcagccgtctaccagatgaggttcttgggcgtattctgtctcttatctccacaaaagaagctgtttcaacctcagtactctctaagaggtggaagaacatgtttgttttggtttccaatcttgatattgatgatcgtcaatctgtgcctaagactaagcaaaaccggattgagattcacagaaattacatggctttcgttgacaaattgctagatacgcaacgtggttcttctataaagaagctcactctaaagagtcatgttggtgttcgaggtggcactgattcatctcgcattcaaagttggatttgcaacgttcttgaccatggtgttatggatcttgatgtgttcattactttaaaaggaaaatctccaccagtgcctgcaatgatctttaagagcaagacattggttaagctgagagtaggacgtggttttacaatcaagctttctcaagatgtttctcttcctttgcttaggacattatgtcttgactcagttaattttgttggaggtcataatgttgttggaactcttatatctcgctgtcctgttctcgaagaactggttgttgaggagcggcgatgtgtagattggacttgttccgtgtcttctccatctctaaagagactacacatccgatttgatcgcaagtttactagtatttcattagatgctcctaatcttatctactacaaacactctggttatgttttgggtaagtatcctaatgttaagttggattccctcatcgaagctagactcaatcttcggatggatgaaacaagaatggtgggagtaagaaatggatctctcggttccattcccgctgatatgagaaatctcatcaatggaatcagaaatgttagaatccttcacttatctagccacactctagaggtcagcctcctctatatattgttctttccttataaataacattcttctttttttttgcttatcgagaatgagattcacttggggcttttgatgatttatttcaacttttgtgttattgagtgacaacagactaacacattgtgttttgttgaagctgctttatttctcatgtaaagaaatgccattgttcgacagccttgttagtctatctattgggaatgacaaggcaagaggatggcaaatgctgccacttctgatcaagaactctccaaacctagaaaccctcatcttcatggtatctcatgtcacaaacacatcctaaacaccatatatatattggtaggtcgttaacattactctttttctttgttatgcttcagggtctcgatcactacataacaaacagatgtggggatgtatgtgtttgctatgataccgacgagagcataacctcttgcctatcatcatctcaagtgaaggtgctggagatattgagctatcaaggaacgacaagagagctgaatcaaatgaagcatttcttggagaagttaccgtgtcttgagctagtgaaaatttgcgtggtaaacaacagtaataacttgcaaaccaccatggaaatgaggaatcttatgatgcttccaagagcgtcatcaaagtgtaagatccaagtcaaggttttaacaaaaaataactgatccaagtgatgtgattagtagcaaaacattgtcatattattgtgagtttaaccaactatagtacttaagtaagctttattatttatggatttgaaatgagtgtgacttcattgaatcaagaagaaagcttttgtcatacatattagtgttctaatcttctctcgtgaaaccttttctttattcaaaatctgccatattaagaagcagtaatataatgtcatatacattcaaacccaagtctctaacacattaatacagttacattcaaaacctgaatctgaatttctctgaatctgtttaactaaacagaatctgtcgacttctgttttctaccggtggcgtaaagatacttgagccaaagatctgaaagaagttctgcctcagatcgaattagggggtttttgtgatctcggagaaaacggattccgtttccaatggagtttgtgttaacgaccacgtcacaatcaagagatgcaggagcttctttcaaacgcttcatgaattggatacacctcgagacctctggagaattctcatcactcgcatacttagccgctcgttgtgcggccttgaacaattccaagaactcttgcttctgcatcactctttctttcttgatctatctctctctctcgctctctttgaatatttggtttcgaagcaagaaaatgagagaaatttgggcattaaaatctgatgtgtttatatgcaaaaattctgtaccgccgccttctggtttcttgccacccaagcttgcctatacttttgtgtgatgtatttatattactaaataatgaattttatatgccacagtgccatttataaataagtgaaaaaatttggtcatggaaatttctatgtatttatatgttttaagattggaagaaattctcaaacgatgagaattacaaatttcatgaataaatattaatttctaggatggaatatggatgaaagattattttaagattcaaaacctacatgctattgtgttggagtttataagaccatccttatcaatggactcttacataaagttctaaacaattttgatatacaaaataatgtttaaatattagaaaggctcttacaaaaggagagaataaagaaaaaaactcttagctaagagccatttttcatctcttaaacacacttttttatttttttattcttattttgtttaatataatattttgatagttcttatgatattgttaacaacctattgataaggatgctcttaactctcttatctctttatataaactcatcagatagagagagagagagaccattccaacaattaccaaattatctcctcttgcgttgctttgaaaccctagttacgtcgagagaaagagagagcaaacaaacacacacaaaagaccgatcagaactgagaacaacgatgcagaagcaggagttcttggagttgtacgaggcagcacttcgagcggctaagtctgtgaaaggtgttaagaattcgtcaaaggtttcgaggtttgtggacgctagaaatcgtttgaaggacgctcctacatcacttgcttgtgaggtggtctccaaaacctccatggggaagggtttgagtttcttgaacgatcacaaaaaccctcatattcgatcggaaggaaggcttcttcgggatctttggatgaagattctttacgcttcaggtagagaaaagagccacgatagagaaactcaggtgaagattccgacgcattcaacgatgaagaagactggagattcgaaacgagacaaagtgcgtgagattcttcaaacatctctggttaaagtcgcttctgagattgttgacacagagatgaagacacgagtcactgcttgtgatccttctgtcgtggctgtttcagtggaatctgcaatgtttgagaaattaggttgtttcatgggacctcataaagcaaagtaccggtcgattctgttcaacatgggagatagtaacaatccggatttgaggaggaaagtgttaatcggtgagatcaatggggagagactcgtgacaatggagagacaagagatggggagtgagaagattcagaaggaggttcaaaggattaaagagaatgcaaggtttaaggaagagagtcgaatgaagattcttcaatcagcatctatgatcatgacttagttagcaaagattaagtccatgagtttcactaatgtatataatcagtgttattgtcaaatctcgaaatattagtatttgattgtgataatacaatacgatgattgcttcaagttgcttaaagttcatgaatgttgtttctaaatctgcgtttataaaccaaatacaaagacttaacatccatgacttaagagtgattcaaaaggaatgtgcaaaaccataagtactagtcaatagtcttttagttaaaatatggcttggattttgcagtttgaagaagctcttggaagcttcaaaagatactgtatatcaatgggcacttggaggttgcttacagcacgaattttcaccagctcaagaaattgtaacttcattaggaaatgccccatttgtttcagctctttcgaagttccttgatagctccatatctccagaacctttactcgagatgatgacagacaagacgagctcttccccaaaatgccagaacaaacacatgcatccccacattgtttagttgtgtagtgctctagaccctgaagcatagaggagacaaagttatagacatattggtatatatggcgttgaggataggtttgtatatatatatgtcatgagataccttgaagacaagtgtttcaagatttggagagttcttgatcagaagtggcagaatttgccatccttgcttcttgtcactcgcgatcgatagataaacaaggttgtcgaacatgggtaattcttgaccggagaagtaaaacagctgcaaccaaaaccaaatcagctcaagtaataatacaatatttgagtcagaacctcaataaacgaatccagttttggcatcagaagactgtaacataaaaagatctttactagaacaataaaaaaggaatagcagactgacctcaagagcatcactagttaagtgaagaaccttaacctttctgattccagtgatgagatccatcatgtcagcaggaactagatgagaagacccatctcttagtttccgtaattcttgttcttccacccaatgattgagtctagcctcaacgagggaatccaagttaacatttgcatacttgctcccaaatatacaagaaagttccaagtagacaagaccgggaacatcaagcgaaataatggggatatgaaagaatcggatgcgtagtctctttagagatggagaagacacagaaccacaccattgtttccatcgctgatcctcaagaaccaattcttcaagcagagggcaacgaggaagaagagtttcaaagacattatgatctccatcaaaatcaacagtgtcaagacataaagtcttaagcataggaagataaacattttcatgacaaagcttgattgtaaaaccacgtcctagtctcagcttaaccagtgtattgctcttgaagatcaacaaaggcacaagttgaaattttcctttgaaagtgataaagagatcaagatccgtcacaccaccacgagaaaggactctgtgtatccagctctgaacatgagtttggttttggagagattgattatctttgagatgaatctttaaagcaagcttctttataggagaattgcctttccgattgaacaaagtattcacaaaatccacaaaatcaatgaattctctcggattttcatgttgtctagcgtaatcaaggtgaagactaggaacaaaaacaaacacattcttccacctcgtagagagcgatgaggttaaagcagcctcttttgtggagagaaaggataaaatgtgctcaagaatctcatctggtaaagagctgattctatccataattactctaaacaccctcaaacacagactgaacaaaaaactaaattttcaacagctagaatcaggaacggcagcaacagagttgataagcttcaaagtttcgttctttttgctgttccatccattgtctatagtgatcaagccatcgatacccaaagaaaagagatacctttgctaattgcaacagaggcggcggcttcaattcacgaaagctctccaaattcagtccccaattagggttttggcaatccgaaagaagagacgtcgaaaatgtaacatgtgatgcagtgcaattaaaaagactcttcgagtatataataaaaaagacgcgcctagtcgtgtgctactactaaaacgacggcgagtcgtatgactattaaacgacgccgattcatgtgggctaataacggctccgattcatgtgggctactaaacgacacggttcataattaaataaaacactcgcgaaggcgtgggcttcattacattgattatgaagctagaaatcataattgccacaactttggttatagattgtgggtgattactcttatctgaaaggatagttgtaacgggaaaaaacacacaaggggacaaaaatttatgatgttttattcaagtgaagggcctctatggaaagtggatgataagctctcaaacaacaaaaacaaaggagaaaaggacagaagccaattcgatcaattgagcaatagactacctaagagacaacaaatcataatgttttcaaagattcagcatttggaaaacagtaaaaaaaacttttacgggatgattaagattaatcttttggactccactagctcacttgagctgcaatttggtatggaggtccgctgctctggataacgactgtatcgatactggataaccctttcccatctgcaaaaagcaattcttttaggtttaatggaatccaaaaatgttactacaaggagacgttgggtttgatttgtaagcttaccgtactgcataagtggaatgcattcacataaccagcatattttgaagctgcaggagaaaggtaaagagcaaatcagccaaacaatcatctctcaacaaaacttataagctcccggtatgacttactctttttcaatccagcaggcttcgctagcaaaagggcgttcataaacgcaccaacattctctcgtaaagcctcttcagaaaagctcatctggtggacgttttttggaaagtagtctttattaagaatgaagttaatgaaattcaggtaaacttcaagtctttgggaagagatgtcacctttccaagtggcacatgaagaatagacgttttatccattctaaatttggtatgtccagcttttgcgtctttgactgctttcgtaacatccttggtcacactaccttgctacaacaaatataatattcgttcaaattcatttaagggaaaaaggtaagcatacttactgatacattagagtaagatgctgagtgaaagaatcaaactcactttggggtttggcatcaaaccatgattgttaagaattcttgatatctgcaaataagcacaaaccatatgtatgttatgtgagaagatatcgcaacatcatgttccaaagaatttaaacaagtgctcaaatccaagaaccttgtaaacacggggcatcatttttggagttgcaagacatctatcaaagtcaatcttgccactttctgcagatagagttaaggtacacagataaataatctaccactggaacataattcgataaacaaaaagattgctcaggaaatgagataagttgtggcagagccaaatgcaagcatgttcaattagatgtcagaatgaattgaagtagaatgcattggttcattactcaagatctcttcaataagctcaagaccaccaacgacatcagctcctgcagcttttgcatcctctgcatcagctccctcggcaaagaaagccactttcacatcctgaacaaggaagatcatttcttgtattatattagtggctggtaaaatagaaattccgattatggattacaaatgcatttcttttaccttcttaacagagtggggtagagccaaagtaccacgaactatctgcaatttaaacagtgatagcagtcagtctagagataaagccaggggcaatcaaccaaaatgctaagaacgcgatctttttattaagaataggatagagaaattaatgtatttccagagaaaataaatgcatcacataccagctcagatcttcctttttcaatgcccaatctcacatgcgcctcaagagtttcatcaaatttcgccttggcattgccctgaaccattgataaaaacagcatcagaaatgaaaaccatacgaacaaaagggatgcattgccctcactcactcaacttgtaaatcaactcagcaacaacaactattaccagtttacagaatccacaaatctcacagtaccaccattacacaaaacttgcatgatctaaactaatccacaacgtctaacaattcttccaagactccttatgtttcacattatatagtcatatgatcctaatcatcatagcttcctttataatagtcatttgaaatcccctaactacgaaacaagcaaaaaaattaatcctttgacacaaaataaataaattaaaagaaccctaaatagtgtagcttccattctattacaatggcagctcatattaagaatcctgaccttaatctctctaatggcctccatgagatcgaaaataggtttctttccatgcttcaactctggtttaagcaaagttggcaaaggaagtgaagaagtatcttcttcaacagcattagctcttaaaaaccttcttctagctcgattctctaattcaatcctcttcctctccctctccatctcctctggagttctatctccttcattctcaccggcgacacgatcctccggaagtggagccacacgctgagcgtaagaaaccggattgatcgaaggagagtctttcacatatcggatttcttcacgagtccagttcgctgattctggagactgaaggttctccgtcgattcaacatttttcggttcagatttctgatccttgggtttggccgcgtacgatactggctcgattgtaacagcctttttgcgagattcgtttgaatcgggagatggattcgaatcggatgatgaagatgaagatgaagatgaagatgaagatgaagagaagagtcttgggatttgttgaaatggagacgaaaagggtttgattagaccttggcggcgagcttgagagagtaggagcttcatagctgccattgtttcttcactcactcgaggtttttcgtgtgaaatgtgattttgggggtttaaggagatttctgatttttaacttaaaagcttttctgtaaatgttataaaactttagggaccaaagatataaataatttgagatttttttttgaaaaatctcttattcacaattaataaccaatcttttcttatctcttgaaaatggaactattgttttgtagattttaacattcgatcattaatttattcatgggtatttctgtttcttctaatgttacaagctaacaacagagattatgagagtgaggtcagtttgcaagatatcaaaaatggctgaattgtcccaacaataactcaaacatgtcgtcgggggttagaagtgtcgttcctccaataaccaagttaatgtctggtcttccgctctctgacacagcctcttgagcttccaaaaccttaacaatggaggaaacatagacagttataaaaaatatagccctacaacgtgaatgcgaggtgacttttgtgatgaagaaactcacctctataccgttgatacctccaatgacaaagacaagaatgacactctggtctgccaggcttggttttgcctgcaatagcattgccaaacattaatgtatatcttgtgtaggaaaatgaaagtcatgggtagagagaaaggtctaactaacctgaccaagaccaaaccttccaaatccgcttttaataaatcttccaacagttgaagaatggtattctaaaccgggtatctcttgtttgctcaacacttttgttataagcctgtagactagccctttgtttccagaaggctcgccaggaaagctgctctctgaagccaatgagccttctcttaatggtagattccttgttcttagactcgataacttgtggaggaacctaaataagctgtctactctatcacgcaaatccagtttcagctgcatatcgtcataggactcgtctgctttactattgtcaacttcttcttcttcctcgtcaccccatttcccccatggatcatcatcaagagcatcaatgtctaattgatcatcagagggaatttctttggtttcctcagacttgagacgattcaatctgccctcaagctcttctgtcaacccattaagaaacttgagatttcctgctgatggattctccagaacagcatcgacaatggcttcttttagaaaatgctcttcttgccaagagaaaggcccacctgagccagatgtagggaaattttcgccagcaagaatgtaaccaactattgtaagaagcagggcatcacgaaaagatagcagccctcgtgatgaggaatctggtttctcgtttttcttcgcttgaagttctgccacagcgcttttgttgatcaggtcactaatttgagcagccaaaccctgactcgtatcaccagcacttacgtttaacatcatctccgcactgctaaaagtatcccatttggcactttgagattcatcaagagcagcggctgtagctgcccctaactgaataatccctttatttttcaacaaagacgactggctttgggacaatgctttgatcatggcctggagctccggttttgtagcataaccaggacgagctctcacgttaacagagatattttcgcgacgcaaagcctcttgaagccatttcttcaccagtacacttccatccttcgttttcctatcaatcatggcctctaagtaaggtgttcctctaaaacattcagtagcgacaagagatccatttagtagttcagtccagttggtggtagatttcttgtcacattcattaaacaaacctacattttgtggagcagaggtatatgaatcccagccacgtaaaaaagcttcaattccttcaggaagaccagaatcccgaatcttgcttggttcttcattaagcagttccccaagcggcacttgaacatcaagagaaggacgattgatgcttgggaccccttgtttaagctgtgcttgtgaagaaaatctttctgcccgaggcaaagatgaaaagatacgatcgaaaagtgaatccccgtgacagcagggagtgataagatcaagtgtgcggtcaacaagtaacaagccagcagatcgcttacgacgcgctacatcataaacacttgacatgtctgttagaatcttcccaacattcttcgattggtcaccaagtgaaaatatttccaacttcaactccatctacaattttaaaaaagtgacgacatggtcacaaatttaagaaaaacgtacagaagaaattaaattattgacaaacaagggaaacagatatcttctagtgttctagctcacgtacttcatgaacatcgtgaattaagttcaaagcggttactgcagtgttagtttaccttaagggccagctggtaaagaaaatgtgcggtaagagttgcaccaggaggaacatcatcagtgtcagacatagatccagtacttatgggaggcaaaccaaaactaagagaatcctcatgttgacgggacaaggacgcttctgcgactgatccttgggaaggtaagacaaacgctcgaggagtgaaaggacaaataatcaaggggaagtggtgaactgagacaaccaaaccttgtgcaccacctgatgaaatatctacattttcgctttcaataggctccatagtaagggattcaagtgcagaagagaacttagaaacccctttgtctttagatattttgtcgcttttcttagtatgttcattgtaatcctgaacaagtaaggtttcatactctcgatacgcgtctggacctagaggtgaatcagggatagctgagtgagacccctgtacaacgttcagattaatattcaatgacgcaagaaaagaaacaaatattctgaagagtctcttatagatggaaaattattttgaagaaggcatagagaagcagaactgctaaattaagttagagaatacattacaatcactttgaatttgattatataacgatcactagtgttgataagtcaaatagcttgtgattgttctagaaaataaaaaagccaatatatatatccagagaaaaaaaagagattaaataaagaatgagaccaaggataacgttaaagaagagcacctctgaaatagatgtgaatacggtgcagcgctgaacaccttcatgggtgcttagacaccgtagcatataccgatgagcatcattgagaagtcgagatgtcataatcacaattctcttggcacaatcagactttgaattccaatcagccacctagagcacaaggcatcaaaagtcacatcatataaattaaatcagaagatttctcactttctaggtaaaaagatccccttcataccaaaagtatgaggataacaatcttcctgttctttatctagatcctcaattaccaacactaaccgttgattgataggatattccttagccaacattgtgcaggaaaaaaagaaacggtaacaagcttaccgcatctaaggaagtcatgttttcaagactgcagacagctcgagcacctagttccaagaacaaagggaaagctcctacaaattgaaaactttctgtgcagccagcatcgatatacacaatcgcatcttttacatcctcttctatctacaaaacaaaacatttccaaaatatctaaaccttacttgttcaggattacagtaaggtacttttacatttcccaagaacacacaaaaacgagcaaaacgagatcatggagaaatcgtaatgattcaggtgcagcagatcaaaacgtgtaacaagatgagaccagatgaaaaaaaaaaaaaaaaaaaaaaaaaagagaattcggatttcttacttcgcggatcgaattgagacaagatatcgcgacatcgatcagagccattgctctcagctacgagaattggatacaattggtcgagctagagtgaaatcgccagttagaatcaaattactatgagatgtgttgtctgaaatcagactgatgcctgaaccaccggagaaacactgctttcgcttcgccgggaaatctcaccgacgacgaacatgatagcttaacttgatatcgttcgtcgtatgatcgtcactttgttgggcttttttacactttttgggctttgaattatctttgatttattatggcccatcatatattagttaacgggtctaggatgcaatgttatcaaagggggatatattggagatgaaagtgattaactgaaacataacattggttaacaaatcatttgcactattgaaggatgggtgttggtggggtcgcgaaaaacaaaggcatgctcaagaccgaggctggtgattgggtcatggccattccggacgacgaagacaagcctgtcgtcgcgtttgattagttgcaaacaaacaataagtctcttttcgtgtgtatcgattgatttggttgaattttcttctctctatttgattgggtttatttttactcttttttgtatggttgagaatgatgtgcaagtttgtggataattctatatgccaataatattcccacaccagtgataaccttttatcgctttggacataagtgggtcagacagcatcatcaccagtccacaaccatttgtataaagttaaacaacttaagagtcaagagtcacttattatctccttacacacaccatttctctctaatggctacaacaaccacatcatgggaagaactcttaggctcaaagaattgggacactatcttagacccattagaccaatcacttagggaactcatcttacgttgtggcgacttttgtcaagccacctacgatgccttcgtcaacgaccaaaactccaagtactgtggagccagccgctacggcaaatcttctttcttcgacaaggtcatgctcgaaaacgcttccgactacgaggttgtaaacttcctctacgccacagctcgtgtttctctccccgaaggtttgcttctccaatcacaatcaagagattcttgggaccgtgagtctaactggtttggctacattgctgtcacgtctgatgaacggtctaaggctttaggacgccgtgagatctatatagctttgagaggaacgagcaggaactatgagtgggtcaatgttttgggtgctaggccaacttcagctgaccccttgctgcacggacccgagcaggatggttctggtggtgtagttgaaggtacgacttttgatagtgacagtgaagatgaagaagggtgtaaggtgatgctcgggtggctcacaatctatacttctaatcaccccgaatcgaaattcactaagctgagtctacggtcacagttgttagccaagatcaaggagcttctgttgaagtataaggacgagaaaccgagcattgtgttgactggacatagcttgggagctacagaggctgttctggccgcctatgatatagctgagaacggttccagtgatgatgttccggtcactgctatagtctttggttgtccacaggtaggaaacaaggagttcagagacgaagtaatgagtcacaagaacttaaagatcctccatgtaaggaacacgattgatctcttaactcgatacccagggggacttttagggtatgtggacataggaataaactttgtgatcgatacaaagaagtcaccgttcctaagcgattcaaggaatccaggggattggcataatcttcaggtaagaatctgtgagaagaatctttcaaatttgactcaaacgatacagagtagaaacttttacatattttttccatgtatgtgtgcaggcgatgttacatgttgtagctggatggaatgggaagaaaggagagtttaaactgatggttaagagaagtattgcattagtgaacaagtcatgcgagttcttgaaagctgagtgtttggtgccaggatcttggtgggtagagaagaacaaaggactgatcaagaacgaagatggtgaatgggttcttgctcccgttgaagaagaacctgtacctgaattctaaattgtatttctgtatttttctctaaggtcatgataaatcaacaataagcagttcaactatgtgatgaaaagacccaagttattatattgatatgagtttatgagatagagattccatcaacgaaacaaacattcaaacggttttgctttcttacaatcagaaaatattcttcttggcaaagttacggcattagacgaaagcattgattcttgttacttgctacatcagtagaacttggctcacttctttccacgaagcttagctccaagcgctctctccagcttagaaaggatttgctggttgggtatagctttgccagactcatactcttgaatcacttgtggcttctcattgatgatctacacaaaaagaaacaaacactttgtcatgaaccgagttacaaaatagggtaataataagggacatatagagagaaggataatatacttgagcaagttgggactgggttagcttcttgtctgtcctggcttgcataatggctttctttagctcagtaggcacacgttcatctgaattcacaattgcataattcaaaacatgaagcttcagcatccaatacacatcaatcaataaaaagttcctctcactataaccatcaaagactcacaggcagaaagatagacagactctactcatataagaacagttttccaatacgttgaacactttgaaacaagaaatgaacacattagcctagatacagagcctgacactaccatattctagacactagggaaatcaattcaccattaataaaccaaatgattaaagataagacttacgagtaaggttctcagtgtcatcatcaagcatttttgtgttcagagatgtgccgcttgatgccgccttgttggttccagcattgactaaacccaacacacacacaaaatcaatgttagatggaagccaaatctagaaattgcacataaaaaccaaaataaaaccagcagaaattatcgacctaatatgaacaacaactaaatcagcaatacagatacaccggaaatttcaattgacaacgaacataaaccctaaaaagatctccttatcatgaatcacaataaccccaaggcattgaaggctagttcaatcaaaaacgaaatcgaacctccaatagcaaaatcaagtaaatattatactagagagccctagatcaaaccggataacatcaacaggagctaagataggtctagaaattagggaaaggaaagaagaacgaacattttctgacggtctcgatatcggcgccggatcgacgagcggcgttgacagttttctcgtcgcgcttggcagcggcgttagcgggtttcttacggatcaccaccggctcccaatcctgagttatcggtccaattccggccatggttttttgttctgcaaccgccttttgacaaaatctagggcttctttctttctctgcaggtgacaagttagaaaagaatatgagagaaaactgggaataaaatagcaaaagccgtgcgtgagcttcacgctactttttttttttatttttctaagataataattggtttaacaaaattacataaacctttttatctaaagaatcaaggggaaagtactatcaaaaatttgtattttgaatttttatcaccaattttaagctttgtacattaaagtataacttccacgctatttactaaaagagatgcataagataagttatcatcttttgttctaaattcatattgtaggtcgataaccaagaagtgtttgttggtattagaaaagagttggtatgtcgtttattttgcaattttagttaccaaggggtgatttagtaaattagtaaatggggtccaagttgagaagaaatatctcgtggcacaaatggcaacaaaattaaaaatattggattctcttttaattttttactcttttttactctagagccttgttgttcttcttcttcttctttcttcgtcttcaacttcttctaccgagattgattctatttcttccggatcttacgcaaccattactctcacctcaggtctattctagcttaatcattctcttctgtgtttgtattcaattccgtttggtttttgctctgttgcttgccgttttaactctcgacgcattcgttaatttgagaaaatcgaatctccgattttgagctcgaattttgtattgatttagattacatgtccttcatctgtgagattcttaagattagtggatggtaaatgctttaaaatttgctgattatatagctcaattcgattatatccagttttcaaaccgaaatggttaacgttttgatgttctgaatttgtatatgtgcgattcatttcccaagttcgagtaataatgatgcttttatgattcactgattatgtttggttccgaatcctctgtgcacgatgctcatccgagtcgcatttgattgagaataatttgttgaatcggtacatttttcttatatcaagcttgtttttacttttctttggcttgtttcaggcagaaatgtttctatgttgaagaagaaggaaatggttataagtcttggaagttttagtatcatcagttgtgtcttagaaaactgggaacggctcttttcctctgttaccatagctgagttagcttgagaaacttttgaattggattcagatcatgccttactttgctcagaggctttacaatacttgcaaggcgtctttctcttcagacggaccaataacagaagatgctctggagaaggttcgcaatgtcttgggtatgattatacgcacatattgttcaatgaatctttgtccactggttttcagtttatcgcatctgttatttggccgatcattgttatctttttgagtgcttgtgacaaggacttttttttttttatgaattttgtggcccacaacatgtgaattcgtttatctgatcattctgcaaattacctaataagagtgtattagttaagggtgttggtggtactgagtaatcatatatatctcactttagtcttcaatgcagtggtcccctgttgcacttaccaaccttatttgtaatctatgtttcagagaaaatcaagccatctgatgttggaattgagcaggatgctcaattggcacggtccaggtctggtcctctcaatgaacgcaatggaagtaatcagtctcccccagcaataaagtatcttcatttgcatgagtgtgacagtttctctgtaagcatactgatttgaaaactctatggctgattggtcttgaatgctgtttaaggtttgggtgaatcttttgtgatccactttaggatgattcagatacaaaatagcataagagtcccattttaacttcctaggtttaagtagcaatggttctgcttggaataatatgcaaataccgttcaaggttaaaacactctatagccaatcctgagacaaaaattttagtggatatttaatcttctccttttccgcatattcaaaattaggggaataggggggcatccaaacatggtccttgagagaatctcaggaaccaactattcaagccatgagcctgaagtctgcaaaaaagcctatgacaaatggtctagaaagtatgagtaaacacagttcgagtcaattctgagtctgtctctagttgggtgttttatcttcctgatactgccaccaatgttatctctcacttggttcattttgcctctgttgtcaaaacagataggaatcttctgtatgccaccttcttctatgatacctcttcataaccatccgggcatgaccgtgctaagcaagctcgtttatggttcaatgcatgtgaagtcatatgattggctagagcctcaactgaccgaaccagaggatccatcacaaggtaaccgtcttctttctgttactctctcagtttttatccaatcactcttctggtctaattgtaaactattttgattcataagaagcaagacctgctaaactggtgaaggatactgagatgacggctcaaagcccagtaacaacattatatccgaaaagtggtggcaacattcactgtttcaaagccatcacccattgtgctattcttgacatcttagctccaccttactcttcagagcatgatcggcattgcacttacttccggaaatccagaagagaagacttaccaggtaatacaactaagctctccaaaaacccgatcccagaaccatattagaacctttagtgatattgatttggattgtgaactggagcaggtgaattagaagtggatggagaagtggtcacagacgtgacatggcttgaggaatttcaaccgcctgatgactttgtgatacgacgaattccgtacagaggtcctgtcattagaacttgatgatgatctaatctttacttgtcacataatttgggcggcttcgggtttttattttttatttatattcctttcggaaataatttggggggtctttttatattgcaaacgggattgtacatactaatttgtgatacaccgtgtgtctccgtttcattatattgcaaaagacttctaatggtttttagtcttcggtactagacttctctaatggttgtgtttacaaaatccttaaacctcgttttgcatagttgtgtttcttccttcatatggtaaggtcacaccagcatagaagttgccccgatacgcccaatttgtaggttgtgcagttggtaactaagttgggattgatttggaaatcggagtaaagttcatgggatgtgtgatcttactgtttttaaaaaataagggaatgaaatggcgtcgttggctttttctaagtctaacaaagcaaaactgaacaaaaaacaaaatcacattctggctactacgtaagactaaatcccatctccctctaccaagcggctggctgagtctttattacgtaaggacttagtggatattatcataaaattagtggatacactctatttgcttagtggatttcaatggaatttcattcctctcgttttattttttggtcaatggataaattagctctccactttatccatttcggttttcatgaagaaaatcagaattatcaattatttatgatgatgaagttgaacaaccaaactaattcatagaatcatagtggtttatatgtagttgaagcatgggcttagggactaggatccaaaaaatttgcattgcgatttcaatactagacgtcttaaatggtaagaatatccgatttgtaatctacagggcaaatgagaatagtctagattttggtccagattctttggttataaaaaaaacaaaatgtttaacaacgaacattgatatggtcccaacctagacctagacctagacccaaagaccaggattataaagagaataaagaaagcatttcggggtaatcatggttgaaaattgaaatagatgagcccgttccttcatgagtaaagtttatataatcgtggaaatttttaacatgctgattgaggtgtgataccctttgatcccaaccgctttgaacgcaagtacgcaaccacgaacaaaagtaagcatggaaacaacttagaaaagatcaagagaaaccattactatgttacgttattaatttgttaattgttactcttcattataatgcatttttcttatgagtgtataaataaaacttttgagaaaagaagatcgaagctaataatcatggtcctaaagatacgtaggcatgtgatgaggaagaattcaaagacggtgcctcattttgcggcgattctttagggcaacatgcagaattttttagcttcttgcatgcataataaataaatatatcaactggatcaacgtcctttttacatttaaaaatggttttgtgcatataaaacgtcctttagggaaacagttgttatattttttgtcaaaaaataaatggtttgtacatataaaacgtatctagtaaacattcacaaaaaaaaaaatcctctgaaatggtaaaatataaaagaattttcttggaagaagtagaactcgacaaaagattctcttaaccaaagaaattcatgtcgtttaaagaaattcaagaactattgaaacaatttgaaattatatattccataaaaagagagcatgggaaatggaggaattgtgaatgaagtgtcggtacgtaaacaggttaggacaaaacaaagtttcctcatctttcttagtgcccacatgagcctctacgattccttctctcccatcaatgctctcttcaatcttagttaattacttcgaatgtttgtcctatcttctcttctctctcatctcctatctttctttctctctctatctgtccataaccctagatttgaagatcgagggcgatcatggtaaaagacttcatagaaattctataacattcaagctgtgtttatatgaatacgagcgttgaaatttgatcccatcgcgttttcatatatgttccaaaatgcttgtatagatatgtgtgtgcatagacatagagtgtcggaaatttgcatcgggacgatttataattaatttggtgtagggtttgaggtccttattaatttcacataaaacttggttcaattttgtaaaaagtgtttgtacttatttttcttgatttgaaacttattttgagaatttatgattaacgacagcttatctatgtttacaaatactaattcaactcacaagatgacaataaagacaaagattgcactctagaaagaaagttgctttgcctaatttgaacaattaaaaaattgcattcaaagataatatacccgtaattatttattagttacctctctcgaattatatactgattggtaagttggtaagccctacaaaaacatatagttagccaattctcgaagagaaaccaaatactaatatatggaggtgtgtaacccaatgcccattgaaaagggtcaccaataataaaaccaaaaagataaagacaacttctgttttgtacatacgtgaactcaagaatctttgggaatcacatccttaaccatttgacaaaactcccttctctcttaagtttttatttaaattctgttttcaaacgttgggattgaagaccgtcatgtatttaacctaagtatatgagaaacatgaatatagatcaatagccatcatgataaaaccaaatgcgtagaaacgtaattcattccaccacatagtaatcggttgagaggtagacaatagtttgtaccttttgtctatcagggttcgaatcaatcggcttagatcgatagttctcatgttccgtttgagttccccaatgctaatctgatttttatttttttaagttgttttggagacactcaaaaacgtggtttaatatgacaaaagggtaaagcgtagtctccggcaaaggtcaacttaattggaaattattaaagagaaaattgttagaaaaacaagagtggtttggtcggattgaaatgtttgatacatcattcacaaaacaacaattctaatgacacaaaatattcgactgccaattgtgtatacatatagactggactatttgaaccaatatgcttgatatcaaatatatgattaattaaccaatttaaatagcctagccattgtcacatgatatatatcaaaggcacgttaggtaaacagaagatgttttaagaaatggtatagtttttggaatctgaattcatattcaaattcaccatatttaaatcttgtttaaagaaagatattatttttaagaagtaaaggagataagtttacatgtcattgtcactaaaagaacaaacggatatttttctggtatgttaacaaaaatgaagcaaaacctaataactaatgtgatttcaccaaacggaagattccaacacacttttccattaaaaaaaaacatacaattatacgtaaacatgcatgacatagataagaattttatatatctatataattatatactatagtttacgacaaataagactatattatatacttataagtgtatatatatgattatagctagtattattgaagccaacgccgaaattatcatagagatttaacctctctcatgggtttttttttgtttgtttttgagtaattgatctcgagagctagctaaagacactctcgccggagagacatggccgggagatcttcgccgggaaaatgctccacgtggcttgacctgaacagagaagaaacagtggagaagaacaatgaagaagagtcatcagtggaagacgaagaccaaatcacgaataacgttagacagtatattcggtccaacatgcctcggcttcgttggacgcctgatcttcatctctccttcgttcgtgctgtccaacgactaggcggtccagacagtaggattcttgttctctctctccacgtctctttctctctttctctctctcagctttgtaatgtaattgttgtatgattttaaaggagcgacgccgaaattggttcttgagatgatgaatctaaaaggattgagtattgcacatgtcaagagtcatttacaggtaatcttcatcgtctgttattctaagattatctcagttttgttcatctttttcaatgttttcatgtttctgatttcaagatgtatcgaagtaagaagctcgagccgtcttctcgccctggtaagttagttttgatccgcagacatttaccattccttcactgggtttcataattgatggaaatgacttttgaacaggatttggagctttcatgagtggacaaagaagctatttgatggacatgatcgactctcgatgtatccctcatagcgatttaagacatgcctataactctaaaaccgttccttcgaggtcatacaaagaaacaagttccagttactaaaatgtttcacatttgtatatccgatccgaccaaggaagttaaaattgcattcttttctgtagggtactcaatcaagacgcggtcgttacaaatcttggaggtaactttcttatgcgaccttcgagctggtttagcgggttatgcagaaatgaccgagacagcacagagaacaagactctgcctctactcgaggtaactacctactttcgttttaagagttatagaggaacagttttgttaaaaaccgaggaaggtactgtaatcttggtgaaatcttatgcagattaggaagaagaacaatgagaaaagagtccgagatgaagaagtatcatcagtcaaacgattgaaatcaatgtccggaggtgggatacagttgcctgagtttggaaattgcaggcaaaaaccaacagatgatatcaacacaatgctctcgctctctctgttgtcgacatcatcagaaccgtaaccaacatactagagagatgaagtttaactttaaaagagattcaagagtagagacttttgttttccttagccgtttcatgggatgagtacttagccaggatctggatcaggcttgagtcagatcctgcaagtacttatccttagcggtttctctgcattcaatacaacaccaattctggaatgcaacaaaacacatgtaataatatgtttcctcgtcaaaaccaccaaatcaactacatggcaagtcactagtttgatgaaatagtaaacgataataaaagtcctaaatatataagaatcatgatgatgataccataataagacaaagtcataatcagtatccaaaaaaatcactcaagcagaaagaatagaatacttagttataacgacattaatataaaatcttcttttcttggttcacctcctcttagtcttagctttgaatccaccaccagactcatcaatgtccttctttagctttttcgacttttgcccattcttactcttcacaatgtctggtttcccactcactgcagacttactactactcatcttcttcctcttcttcttatctccagaagcattgagatcatcagcaacctcatcttctccaacactcctatcgaattc

SEQ ID NO: 369 - DNA, 34842 bp, Arabidopsis thaliana
gaattcgtgatggtgttacggtgtatgtaattactgattagtaagatattactttgctgaaaaacataaattgtttcagcgcagacagtaacaataaaatactattgggccttactgtctaaaaataataataaaatacttatgggcttctgagtaaagcccaaacactacactttgttgtacgaaacgagacccaatatattttcttaagacgaaaagaaacttgtcggcagattggcggcggagaggaaggagaattgaagacttgttgcggcggttaaaataactgttgctccgccgcttccaccgacctcatgataaatgtggaaattcataaatgtaaatcaaaatgccaaagttttctacttttcttgctgtctttctaattttgattgttgtttaaattttctttgttgtaagtatgaacattccctttttagaaacctgatactgattgataccattcaatgtttccctcctttttcatgttgaataaatttagaaaaagtttatgaagttgaaaatttggatattatgttcctttgactctcttccttctttgaaaacctttcttaatttgattttgtttctcttcccgagaagattggatgcgtactgatattgttgtggcaacttttattactttggtttttttataatgagtttttatgataatattcaacagtcaaaatcaggactttgaatgttatatagatcaaatgggtcactttcccatttggcacaggagctaaatcctggctaagttatcgcctgtaccttctttgatagtttatttctccttgccgtcgttttatacatcttctaaggatttctgtcctttatattttgtttgatatataaataaccaatagccaaaatgattctagaactttttaaaaatgaatttgttaaggcggtgagaaattgtcatggcaaataaactcgaaaaacaacattgtatttgctaagttaattattaaaagttttcagaaaatgtatattagtcacgagatcaaataactttgtcgagtcgaccaaactttttttcttggactattttactaatcattccatctattttactttctcgtgagaaaaatgttaagtggagtgggtactgactaattatgagatcatttaggtgtcatccttagatgagcatgatttaacttatacatagtttctaccaatttcttatctaccaagtctgatcggcaactgtaagagttgttgtaaataataagtagaaagttgtgtcgtttagtcaagataaaaatattcgtgtggcaaaaatatgaaataactatgttatacgttgatttcaactttttagatgctaatatagtgtgtgtgtttttatatagttaatctgatcagtaaactccaaagttcatttgccaattctctatcacttactgtactgttactttttatatttattgttttagttggaaacaattccacaaaaaaaaatatatgttgattgatccaaaagagttattaaatatttcggatcataacaggaaaagtagtaatcagagtgctctaactaagtacactttggaatgcagttgaaggaattgttttattgatttggtctaccatctaagtttgtgtttggctcccgggtatatatcaaaatagtttaattagtccacaaaggagggcatatataaaagttatcctttggttcctatgtgaatcttattttaatagtatcttttactacatcttttcaatattttggaaaattattatatggtccaaccacgtgacttcacctatacgttttttttttttggacaaaaacttcacctatacgtatgtattgaatttgcagtttattgataatctgatgtaattacagtataatacgtaacaactactgataacgacatgtttgaatttcaattatatattacatcatactataaaattagttgcaataaatgatttaattattttccgatgtcctggacttttctgcataacatagcccaccaatatcaaaattattaaactataaacaaatttaattctttttttatgtgcttgtaaaaaaaaaactttcaaacacagccaaaacaagtcttaagacaaaataacacaaacttaaagtttgaaagcagaacattcggatcattaaaacaatagacctaaattaaattattttaggttttggaggtttcagattctctagttacaacacagaaacacactaattataggaaaactatcgcattcaaaatataaaattaatattttgttattaatcacaaagaccataagaaagatggatgaattcattcttatagaataaaccaatattaaataaaaaatttctttaaaaataatacccgtaaaagattttaatacttgggaaagtctataagatcttgtgtgcataataatagtcaaagtcattcgtaattgaccaagcaccaattaaacaggcaaaaaaaataatcaataaatagataaatatttactatatatatgtatagagaactttttataaagaatgacttgattggtgttctaaagagatcgatgtagtgaagatgagtggcgaaggtaacttaggtaaggatcatgaagaagaaaacgaagcaccacttcctgggttcaggtttcatccgacggatgaagagcttttaggatactatcttcgaagaaaagtagagaacaaaaccatcaaactcgaacttatcaaacagatcgatatctataagtacgatccttgggatcttccaagtaagtcttcttaattattggatcatcccctctataaatatcagcatcgtatattatgatcaactcattacatatagttgtttttattgttttttctactgattttatcaagaaattagggacgtccactttgagatcttgttcgaatcaaaacgataaaaaaaaaatttgtattttgaatgcgataagttagtacatttccatatacttatgatatgggaccatccatccatacgaagatcaggtcaaataaaataaaatttagtatacttacacagaaatatcgcatagtgcgcctttatcatcatcgcatgaagatatagaacacgaactatgtaatgaaagggtattttatttagttttgattttctctaaacaattttccacgaaattaatatgagcagttactgtggattttattaggagtgagcagcgtcggagaaaaggagtggtacttcttctgcatgagaggtaggaaatacaggaatagcgttcgaccaaaccgagtgaccggttcaggtttctggaaagccactggtattgataaaccggtttactccaatcttgactgtgttggtctcaagaaatctctggtttactatcttggttcagccggtaaaggcaccaaaaccgattggatgatgcatgaattccgcctcccctccaccacgaaaaccgactctccagctcaacaagcagtgagttgttttattttgaatcatttcattttatcataaactaatctttttgaacaaataacaaattaaccggtatgcatcagactaacccatcttgtccacttttagtgagacaagtttctaatattcgtggtgttaaatgctttagaaagtcagtcacgaatgtacatttccatacgagatagagctactgagaaagccacatcacatattttctttccacaaaatggacccaactttttgttaaaactagaccagagtagacttaaaaacgaaagaatcatgagagtagtattctttgagatatgtgataaagttagttcacgataatcctaatggaagttacttcacaaccattttatggaatttacagtgggtcaaatgtgttcatctagtcaaaattgatatcatttggtttgaatcaacaaaagtatagccactagaaaatcatcaattggttaatgtattttccaataaactaaaaggcattctagtagctattgttgttcgaatcggattctcttatagttaaattgagactttttcttttcattgagtcaatggcaatcaatggaagttatgtatttttcgtgaattttctttataaaaattaaataatcatatagtataacaaaaaaatgcgtcacgcattcataaattgctttcagatattactacagttggaatctattaaatgggcgtgtcttgtttccacaggaggtatggacactttgcagaatcttcaaacgagtcacatctcaaagaaacccaaccatcttaccaccaaaccgaaaaccggttatcactttaaccgacacttgttctaagaccagcagcttagattccgaccacacgagccaccgtacagtagattccatgtcccacgagccgccgcttccacagccacagaatccttattggaaccaacatatagttggttttaatcaaccgacatatactggtaatgataataacctcctgatgagtttctggaacggcaacggtggagatttcataggagactcagcaagttgggatgaacttagatctgttatagatggcaacactaaaccctagtaataaagtttccttttttcagctttgtacaaaaagataaaacaaacgattgcttttgttttagacaataaattaataattaatgatatatctctagtgagtaaattacacttttgatatttttgatctatagtttgcatcatatgttaagaagaagtaatttgtttcttctcgacaggaataataaaaatcacatatatgatgaaattactacaaatgaattcttaacacgccagaggaaaagtttttttctgatacttcttgctcaagaaacaagtcatttctctgctctttttcattcatctttatttgatcaaatcctctgcactcttcacatcttttcgaggcttaaatcttcgaaattgaatttaactattgtaaatgtactgataaagaaactatataggaatttaggatcaatgaaacagattcttgagatgcttgaagaagtgatcagacacaatctgattagtcctctcggtcgggtgaaatgcgtcccagaaaacgaacttattggcatcactgcaagttaacggattgtcctggccgcaaagaaatcccatctcgaacaatccagtaccgcaacaggcagaacttgatatctctagaccgtaaagattaggtttggtaacaatatcccacatgatatcgtaaggattagcgaaataaatctttattccagtaagctctctattcagttttgtcaccaatcttctcaatctcccattgaaatctacagccaaatcattataactccgagcacagctaaaagggtcgtcaagatttgtcactctctccagcggtagacaccccataggtgagattccagtgaaagacattttccgagctccaagtctgtaaatgtcctttaagaacacctcagcaatctcgaccaggaagtcttggtactgactgatgctgaattgagatctcctgtccggtaatgtgtagtagttctcaaggaaatcgttggtgcctatgcttactatgtacagagattctctgatgattttggcagctctccgatggccgagataggcggaaaggttgctttggtattccttgaagtactcgacctctttccataacggaatcacgccctaaaaatgtcaaacaagaaaattatctcgatgtttcttgttacgcaagaaacagccgtaattaggttgtttgaggtgaatggtggacttacaagcacatcggctgtggaattatcataaccggtgccggcggaggcaaaacaaactccggtagcaaaatcagatatattataggacggatctaggtaggctggcacggtcggtttaaggccataagcctcggaagtgaaatcggaggagagacggccgttacaaaagcgtccggtggcgcgaccaccagggaagtcacgaccgtaaggctcaaaattggctctggccattgttgatatgaagttattattgccggaatctacggaagagtcaccgaagactataatcgccgggatttttgctccggcgatggagacaagagtggtcaaaataatgcataatattgatggtgacaaataatgtgttgccatgctaacaacttgtttagcatgcggcgatggtacctaggaatttcattcagttatatacataacatgtagtatttaataaactaaaattttagatatatatgtacgaattctttgtatatgaattgggttaatttcagtgtactttttaagttattcgaattcggtgaatcaattatttttattaggaacattagatttaagatatttgatctttcatatcttttatttgagattttttttttttttttttttggtttcatatataaactctacacaaagttgattaaataaccaaaaaagtggacaaagttggaagtatttattgaattagaagttggtgggtgtatgatatataatgcatgcatgctcagtgcgctcattaacagatatctacctaaaaccagtcaagtataaaaattagatacatcatattgataaaattgactctaattgtttacaacccttcatagcacattcaaattatgttgaattttagtagacgtgtcagtaatatataagtgaaacgccacatgaatgcaaggtggtaattttgctataacaggtgagaaaacacaaataagtgaaatatgtggaagacaaaaaaacgaagaaatagtgtggaagggtattaaattttggttatagtgagaaaagtgggtggtgaggtaataaatgaaacggcacatgtagaagagatgtataatggtaggttttaataatgtacgtagttctggtagttgcacctccacacttatgatttcgtctgaccccgtgaaccgcatgattcgtaacaatcatattgttttaatagtttaatccaaacctaataaaaactaacgacgtacgaaaatggtgtttatttgttattttttattcttttaacatacgattacttattatttgatattgattaccgatttgttctcaatagttgtcttattagtgattcaggatgttttcttcacattagaaaaacaagcaatttggctacaactttaccacattttttacgtcaaacaaatcggttataatataacactacatattttaaaaaactgaaatgaaatattaatctactaaacacatgtagcgtttgacaaaaaagaaaaagaaaaacacatgtagggtttgttaattgaatatgaaaattgaaaagtagatttgaaagatagacatgggaatatattggaattacgtgcacacttaaaaatgaaatgtttggttgggattataacaaattgaatgctaatcagtttgttcatcacaatatagttaggaatacgttacacttaaacagtattaactctgaaagtcaaattcgaatcttttgctttatttacaaaaatacatctaagtaaaacaacatacatttttctgaacttgatcttttattgatttcattttataaataatcattttagattttaacaaactatttgattcgtataaacacagaaattctgaaaggcagcctttcatgaaattcctcatttgtgtaatatgaatggtaggaaaacaaaattgactggtatattaaaataaaaatctattgaattatgtcactatctttagatcatttctttcaaaataattgattcaagtatttttgtttacaatacaagaatagtgttgcaaattaaaggaaaataataacttttctacttacaaattttccaaagatttgggggcatttccaacataggttctccgttcttgtttcctctatcttttaatttatttattttaaataaagaattttcttaactgttcatatgtggttagtcacagtcaaacacacttagaaagactcttctacagtcaattaaagtatatcatctatttgatctttaatttaattaaaaaatcccgttatagatgtggctggcttttgagctaattatgtgactattgctcaagagcttatatatatatatatatatatatacaccacaaaatctagttgaatataaaaatacgtagaggagagcgtattggaaattaggttgtttatcatagtaaaagttggattaagtaattcttacctgaagttttacttttgtagtactaccaactactgttaagcgggtaacttcacatttcaacgaaaactacgaatcagaaaaacaaaaatactaaagattccacatgtttgaaccagtctcactgaagagaagaccatcaccacctacaatattctcttattttttaaaatgttttcttgtttatttttcttgctttctggtatgatatggctttctgtctcagtcaaatagatatcgaattgtaacttattttaatattttcgattccattgactttcacaaaatcctctactcttttttatgttagctcctcttttgtccttagaagctataattcaaaatcactcataggtctctcttctcttttcttttcttccttattcttgaatggttttattaatattagtaatctcagcagcagcttaatgtcgaccaaactcagtatatttcttcttggcctgattttgttctctgtctcaccattttccggagactgtagaactctttcagggaaacatgagcattactcttcatcccttaacatgtttaattcccaagatacgatgcgtttcagttctgcttcttcttcaacaagcaacgattgcggtttctcctccaaggaacatgatccttccaaggaacataccagagaatcggtgaagcctcaatcaaggattaaacaagaaacaaagagaacaacacattcagttgttgatcttcaaatccaagacctcacaagaattaagacgcttcatgctcggttcaacaaatcgaagaaacagaaaaacgagaaggttaggaagaagattacctcagatatttctttggtgggagctccagaggtttcaccggggaagctgatagcaacacttgagtctggtatgacgctcggttctggtgaatacttcatggacgtgcttgtgggcacaccaccaaaacacttctcattgattcttgacacagggagtgacttaaactggctccaatgccttccttgctacgactgtttccatcaaaacggtatgttttatgatccaaaaacgtccgcttcattcaagaacataacatgcaatgaccctagatgcagccttatctcatcacccgatcctccagtacagtgcgaatcagataaccaatcgtgcccttatttctactggtatggagacaggtcgaacacaactggagatttcgcggttgagactttcaccgttaatctcacgaccactgagggaggaagctcagagtacaaggtgggaaatatgatgtttgggtgtggccattggaaccgaggtctcttcagtggtgcttcaggtctgcttgggttaggaagaggacctctttcgttttcttctcagcttcagtctctctatggccattccttttcctactgtcttgtcgatagaaacagcaacaccaatgtaagcagcaagttgatatttggagaagacaaagatttgctgaaccacacaaatctgaacttcacttcttttgtgaacgggaaggagaattcagtggagacattttactatatacagatcaaatccattctagtcggcggcaaagctctagacatacctgaagaaacatggaatatctcatcagatggtgatggtggaaccatcattgattctggtacaaccttaagctatttcgcagaacctgcatatgagatcatcaaaaacaagtttgcagagaaaatgaaagaaaactacccaatatttagagatttcccggtccttgatccttgcttcaatgtatctggcatagaggagaacaacatccacctacctgagctcgggattgcatttgtagacggcacagtttggaatttccctgctgagaactccttcatttggttgagcgaggatttggtttgcttggcaattctaggaactccaaaatctaccttctcgatcatcggaaactaccagcaacagaatttccatatactctatgatacaaagaggtctaggctagggttcacacccacaaagtgtgcggacatataacctcttgatagattataaacacaaagtaactgtacacaagataacacatgaagaacctattttcttacattgtaccaagattttcaaagaaaagatcaacctatatttatcattggacaatctgatttctgaatacaagcaactcctgctatatgcaaatttgacaaagtatataaatttatacttaagggaagagttgaacatagccagttaagatagcaatagctagaatgaccaaaggaggaaggattacaaaggcgccaatagtagcaaagaaaacagaatcattcctctgagagacctcattaaggtagctttgtctcttaatgttccttttctgagatatcgttaagaatttaggactcactttctttaagttcttgcctaagggaatgctgaaatcatcgtctctgtcaccaacaagtccagccaattggtcacgaatagtgagtcctcttgagccaccaccatcacttaagtaccctgatgattgatataaaacctcaggtgattctacgattctaatcaaaatccaattctaagagaaaagagcaagtcatgtaccatcacttgttgaagttagctgctcaaggagatctagttgtgtgcgtactgatgaagaagacgaagaacctacaaggaaacgaattcgatggtaatcagaactcaaaagatgaaactttcacatttctacatagaaatcacgcaaaaagatcgaaacttttttctcaattcctaagttcagtgaagacccaatttggcaaattccactaaaaaccaagaatgaacaaccataaatcgggtcatgtaccggagaaagaagacgaagaagtatcgttgttgttgttgttgtcgtcagtgacgccgatttcacttcgctcggagcggacacgtgttgctggaggagaagagagttgcagaaggagatgatggctctgtttggatcgagaggaagaagatgggtttgaaattgggtgaagagaagtggagaagaagttcaaggccatcacatgaaagaggctccaagcttcgccactgcaaaaattcgttttattttattttctatactgtgttcctctgagatttcaattttcaatttctgtttgagaggtcaggaaaattttcaaatattgttttggagaaaaaataagaattattttatgtcagaccaaagtaaaccgcctcaaattcgtttgtgacgaacacgtgtgacgtgacgtgttaaagcaaaaatgaaaaagacgacttcactggggatcgaacccagaatctctggtttcgtagaccagcgccttatccattgggccatgaagtcattattactatttgtataactatacaataattgtatcaaatattaaaatcacctagtgcaacatcaatgaagacatagtagttatatggaattttgcttaaagttttcttatgtcaaattcttaaacttataattgagaaatttgtccctatgattcaagtaagaggaaaacatatgtaaatgtacggtttaagactttttgtttatggttgttgaaatatgggcttggctttcctcttttatcttgattttgataaatttatatatgacactttacctcaataacaatttgtgtattagaattctaagcttcttttttagcagtaaattgttacgtatgttttatcataattaagtgttgttttgaagacgaagataaaaagatagtacatgttttatttttgtatctttttatgtgtgtttattcacataaatgttttaaaacggagcatcgagtcttggaagtcgaaactataaaaaaacggaggtagagagaatgtgttcatacggttattgttgtattgagcattgaaaggaccgtggtactaggattgtcggtctcctaataatagccgttgtggatgcttatgtcttattggtggtcaaagcaaaggagaaaagtttgaaaggagagacataaaaattgatgaatcacacacgaaagaaaaacttttcctctttaatccatctttatatctttacctataaaagtgttacaaaaaggaaacgcaataatacacacatacgggtgtatatagtatatacgacaattggatttgctttaaataattatttctatatttgaaaacaccaaaaatcttcgagtgatgaagcttacctatatgtgacttcttttgcttaatgatgggatcgaagaatgccttgcgaatgctagccatgacggcataaaatcaaaggattcaagcataagtttgattgaatctcattcgtttcccatccacctcaataccaaaattttgtagataaattacttaaatcgatttgaagtacgtagtctgttgaatttatgatctgattctaatgacacttgtcaacttgcgccatcaccccatatgggttcattatctatatcattagatttttttttttttttgtaaaaagaaatatgacatatgggagtcaataatagcataaattacacacatggagaagtaatataaatctagtatcaataatttgatcaagagtaatcattcttttctgactttccatcacattttctccatcaaatcacataaattcaaaaactaacgaatcacaaaactttgggagaataacacttgaggacgaatctagctaaaaggaggtgtaagacacgtgagaagcacgtgatcacatggcagcaacaacaatattcagtaaaattggccattcttcctctgcaaaaacttggccttagcctgtaactccacccaccatcaaccaatcacacaacgaccaacatgctagtgcaaacgtttgtagtataaattattagggacttaccatatccaaaatgatctttattaaaacttaaaatgaatatgattatgtttaaaagctgataagatttattaatctgtaggcataaaactttatccaaaagttatgcttcaagtaaagcctccatcaaaggcttttaaatctctctctctctcatatgaattcattttctccaagaaaggcacattggtttcttagatatgacttatggagttgtaacattccccaaaacaaagacaaaaatttctctaaatgtgcatttgaatgctatatattattctcctcgatcaaaataaaaatactaatataaagtcttcaataagcttatagtatattataataaaatatttgaagtacagaaaatttttttgtaaattttgatagaatccaaaactagacatgtgaaaggaagaaaaaaaggtatattgaagagtgagaataatattgacctaaaaattccaaagcctgtgtttgggaattccctcccctatctatctctctatccacttcaattttttttatgaaataatttttatttatttatagataagtaaaagtaaaaattgtaaaaatatatatctttaattcttcaagtagctataaatgtcacagttgacaaatccactgtctttgctttcccttcactgctcacttcttctctctttcttgtttcctccattgcaaacaaagctttctcccactaaaccatttttcaccaaagtttttttcttctgttccccattaacccattactgtgtaactctatatacacacacacacacacttccttgctatattaatattttttttggcttttaaccataaccctgaatcaagttccttgtgggtaaattaattttagctcaaactctacaattcattattggtacatctctgccaattaatttactgttgtttgcttcagaaacagattaaaaaaacggagccttttctttttccattgtttcatctgttctgttctaagatgaagacaaatctaaaggacaaagctttagtctctctcccaacatactaactaaggtaacttcttcagtcttcttttttttccataagacccagaaatctttccttgaatgttttcttttgatatcattatgtgattgattctctgtaaattgtctcttgcttcaaagttaagtgatgcttttttcgatgatttttttaaagccgagattctcttgtttcttcaagctcccatcttttgtggggacacgtaatgcccataacttatttgttgatatgccgctatatttttacttataccaatgaaagtgtgcgtttttttaatttcttactgtgtctgtgaaggttttttttaactcacatctattagattgttccatgtggcctcagattgagttatctaccattgcttctacgctttctgttttggtggctaaatgtgaaatgagaagtgtgaaagatttctttttagtccttgtgtgatgtatgcaagtgtttatatgtgaatgtgatacactctcttgttttaggtgattatagtgaagttgtaagagaagcatacaggaccagagatgccacctgagagttctttaaacgctgaaatgtccaagaagatatcattttttggtttgaagggtttgaagttgtgggtatgggtatgtttggtagttggagtattcatagttatgattctctgcatcttgtctctatggatcacattccgtcggaaatctagaaggtcttcaagcaagtttcctttcaaccaaataccacatgtgtccaaagatatcagagtcgacagggctgggtttcagaatcctcaccccgaaagtttatatatagaaatgaatgataaatccactggaaaaacgatgatgtctcacttgggaagaaccaagtctagtgataatgacactttgagtcaatgtagctctgtgaatcaccatgagagagcttgtagttctcattctggtgaagaaggaggctttggaagtgctgggagacagtatggaggaggacctgtaacagcatctcctttggttggtttaccagaaatatcccatcttggttggggacactggtttactcttagggatcttgagctagcaaccaaccgttttgctccagtgaatgtgcttggagagggtggttatggagtagtttataggggtaaacttgttaatggtaccgaggttgctgtaaagaagcttctgaacaatctgtaagttttcaacttgaatatcaaaatgtttgtcaatcttatgtttttgtaacttaataatcctttcccaattttggtctctagagggcaagctgagaaggaatttcgggtagaagttgaggctattggtcatgtacggcacaagaatcttgttaggcttttaggatattgcatagagggagttcatcggtgagtctcacttgtctttaatccatttgagcaattggattgtactgaatctaaatataatgatgaatgcaggatgcttgtttatgagtatgttaatagtggtaacttagaacaatggctacatggagcaatgcggcaacatggaaatctcacttgggaagcacggatgaaaatcattactggtactgcacaagcgtaagtggtttgaaacagtttagcttttgttggatatgttcaatgcttgattattaaaagggtctgcaatttgtacaactttacaggcttgcttacttgcatgaagcaatagaaccaaaagtggtccacagagacataaaagcaagtaatatattgattgatgatgagtttaatgcaaaactctctgactttgggttagccaagctcttggactcgggtgagagtcacatcactaccagagtcatgggtacctttgggtaaagtccaaaactttgtaccctcctcaggccattaaggttattattatcttctcagatgatgtccttacaaagaaatcattgatgttgtttttgttattgttttcagatatgtagcaccagaatatgctaatacaggtcttttaaacgaaaagagtgatatatatagctttggtgtcttgcttcttgaagctataactggtcgagatccagttgattatggtcgtcctgctaatgaggtgaggcttggttaattggtcttgattttgttaatgtatcggaaaaagttatgaatatgttaatttcctgaaactattgaacgggcttgtatattggcaggtgaatcttgttgaatggctaaagatgatggttggaacaagaagagcagaagaagttgtggatccaagacttgaacctagacctagtaaaagtgctttgaaacgtgcactcttggtttcccttagatgtgttgatcctgaagcagagaaacgtcctagaatgagtcaggttgcgcgcatgcttgaatctgatgaacacccttttcacaaggtactaaaatattcttatgatggtctaaagctgtaacaatatagttatatacatgtttctgtattcataaatgaaacaagattttcgcattttggcaggagaggaggaacaaaaggagcaaaaccgcgggcatggagattgttgagaccaaagacgaatctcttggtcctagtggctcagagacaaagccttagaagaattgtgaataacaaatagatgagatgcaaatgccattagacccggctcagtagcatcttcaaagtcttgaaatgctctgtttctctacttagcaactaattgattgatgataccacacgtttggttgtggaaagttggggacaaagaagaaatctcactcggatgatcaaaagagcctgtggagtgatgatgactgatacaaatcttaggaggcattattatttttttaatatttatatttttttttggctaattgttcctgtcttcttgtctgtacggaacgtttgcggtttgtcagtcaaaaacacgtgtttaagatttcgcaagaaagagagatgtcttttgtagtagtaaatctaatcaatgaataaatgacgtaagcagaaacagagtataaggacaaaagaaagagacaaaataaagttcaactataatggctattggctaagcttagagctcctcctataaggaatccttattagttgttagtaacttagtatttcctttgttacaaaaacaaaaaccaccaaatcagaatgtgaaaaaactttattgaacggggacaaaagaatacgaaactgaattatcaaaacaataatttaagtccaacgtccataaaaaccactaagcttttcttgcatatctgtcaaatgttgcgtcgtatttgtcgtattgttgttgtgattctcactttttcacatcattaaaataagttgaattagattctttaacatgttcccatcacgtggccagtttaaaagctacaacagtaattctctttactttgcataatgtacattaatttcggatattgaagaaaagcatgagaaataacgatattacaagacctagcccaagttgcgtattacataattatgcccataagctctactagataacaaatgaaatagttttgaaaccaattgatcagataagcccatacaaggcccattatttagatgacaattgtaattgtagcttaaccagagcggctaagttacaaaccaaataaaaaggggaatggataatgttaaaccctacaccgatccaatgtcggaagaagaacaaaaccctgatccaatgtcggaagaaagagaacaaaacccgaatccgatgatctacctatgtcccgatctagtggaagaaatcgtccttggattgccgttgaattcaatcctcagattcaaaacggtctcaaaacaatggagatcaatccttggattgtgagatttttgatgtcaatattggtgaatggcggagatcgaggagcccccctccttattgggtggatcccagaaggaagtctgcgtgtgttcagggctccatctactggttaaatgtcaaacctttccaggtactagctttggatcttcacacacaagagttccataatgttcgctcaagaccaactcacgcaacttatgccgaccaacttgtcaaccttgatgaccgtctagccatagcctaatcgtttttgcatcctccttggatactatggatatggaccatggatgttctaaaagatgatggatggaccaaggcttactccatagatttatcctcctgtagagatcttaccgtggaaagtgcattttaggccggtggcggtttctaagcatggaaatgtttacttgcatgacaatgaaaagaggttgttgaaatactatccaaagaccaacctccttcgttgcatctctaaagacacttgggtcatatcccctatggttgagaatgtgcttccacttcggcctctaggctctattcccaagacattcggctacggatccatatctcaggagcttaaccacatgccgggatcgaggatgtccaaatttcttagcagaatcccaactatactgtttacaaccactctagtgtctcaagttgtttaccgctatttgtcttgatgttgactttatactcgctgaatgttgttatgtctgtcagtatattaagtatgaacttgtttgatctttgaaacatttatcttcactcttgcttgtgacttctacattttcattttaatggtgtttttaaacctgactgaatcggaaagagcatcagattgaattatacaacttccaaaatataaaagataaaccagtgaagaaaagagtttattaatgatttcctaaagattaaatattctacatcttacaatttacaatcataaaccggattgatttcattccaagagaacgtaaccattcggatcatggactatcattctacttctactagtcgtacgttctatgttctgaggaacttttttgcagacctgagcatgagactcagcttcttgttgaaacttcttcaccatttcgtcaagctctagtttcctagtctccacattctcttctgccactggctccttgagtccaaggtagattaaaccagcgaccactagcaccaaacctgagacgaacagaacgactgagaaaagcgcaaaggcttgtggaaaatctttggcacctggtatcccatctacgttgattccaaatagaccggtcactattgtaatcaaaagaccgactcctccaaagattcctaggttatgtgtgaccgtgaggctctggtcctaatcaagccaaataaaaaattaagatgacttggagagttatgtacttatgtcatcatctccgaatatgaaaaatctaacctgtaaccatgctcgaaccgtgttttgcatgacatcttggatagtgaataaccgacctcgcacggcctcttgttcattgatcatatcgcgggtgctcttttttattccttctagcaagtcttttgttctattgccttttagttgctgaagaagctcgaacacaatctcttctctagcatgaagcgaccatttcacccgtataacctaataaataatgaacaacaagtcacttgtatgaataacattaatccagattagctgatctcatcttgtagtcaatcaagaaagccttacctgggtcgacagccttctgatctcttgattcaagattgtagtgaacagatttgggtcctcgtacagtctcctggatatcaacaaaaataagttattctgctccatcagacatatgtcaaggaaagaaaatactaaagtaagagaaggctcagttaaagtacttattcataaacatcaactcaacttcatcagctgcaccaaatatatacttccggaatagcctacattaaggatattgatatcatcaatcatcacaaggtcaaatccagagaatgaaaaagaatcaaaaggttctctcaacatttgactcccatctttcaaactctaagaataagataagacaaataggttctatcaaagcaatacaaaggtttaacaatttcattggctacaccgtatagaccatgtaaatgtgtatccactgctaaagactttcataatgaatactaaacttccccaatatatacaacttttttcacaacttaatctagattcaagggaagggaaatacctatcatcccagcgtgcaaggcggcatgcaagatgtgctattagttcatgaacggttctcggaatgcaggctccaccagcaataagcatttcctggtaagacagaaggaaccccagaagactgaaaaccagttttgactaattgatcaacgagtaaaggaaaacaatgattcaaataagaagaacaaacctggacttcagtaatacctaagacactaatgttcaaggcaaagcctttaacgtgcaatgcagtcaccagaaaattctgtgcttgccaagaccttaagacaataggtatgtcatcttcttggatgaaaggatcacccgctgattgtcccaacagctcaaacagcaacccaccagcaactctgacaggcacctatccaccaacatattaacaaatttcagctatagaatcatagcacagctcacattacaaagaagcaacataactcagatttttgttacctcatagaaaatatgtttcattcgttcactaatcagtttgctttcgtcccgcagagcaagactgaccgcgggatgtaaccaatgcgcattacgtaaccacgaggcaataccatgatgggtagcatcaagatgacaccaccaagttggaccagcaagtggtcgttcccagtaaggagcagcaagctcagcaacagtggcttcatcctcatctaagtcaatctttcgcaaatcccaattattatcaacttgaacagtctgaacaagctcagagatcctatcccatccaattcctcgccaataactcctagaatgttcttcgtcttcaccagtaccaaattgatctgtttcacattcctgtttctttctatcacaacaacaacaacactgtttaaaaaaacactctacaagaaaaagaaaaaaagagactaagcactaatatgtatcaacaagttagtaacaatcatcatacattctgagagacgaatctccatggacacttgtgttattcttacgacgaccttgacaaaactcgaaagcacagataagtccattggtccagagattatggtaacctggattcccgttcttgtgattcgcattcatgcttcactttaaatcacagattttcgattcatatcagtcaaatctcgttttctgagtaaaaaaaacaatctcgaaattttaggctgcaatttcacgtaagatcatcaggaagcacggaattcgaaagaaaactaagccaaaggagtcaaacgcaacaaccttccccagaacttccctgaattttctgcaccgattcgaagaaagaaaacaacaatttgactgagagagagagatgaatgtggcacaggtcgaggacgacaagtcaaggctaagaaccaaccacacgtgtacatttacatattttgggccttattggaccttctctgtaggaccaatttaaaagcccaataagagtcgagtatggaaggcgataaaatacagagcagtggacgactctcattttttgttgtttctcaactctcgatcagtatttgattttagttttggtcccaaaaagggtataaatttggttgtaaatagctacaagatgtttaagcattattatgaatctctctgttaaagaagacaattgtcatgaatcaaatacttaatcatctgttgagaagtaggctgccagaaacttttcttttttttctttttttgcaaaataaatttgttaactattaatcacaatttttggtgacaacttaaccatctcctactcctcacaatcattcttttggtgtctctaccatttaataattcaccaaaatctccttacttaaactcacaaactcctcacaaattttctgaatctttcagttgaacatataacaacattcataacaatggctggaggtacagctctaactccaacctctgtaggatccaagtctgttccaatgaggaaccatgaagcaacagagagaggcaacaccaacaacaacctgagagcattacccaaagccgtccaaccggtttcatcaatcgaaggagagatggctaagaggccacgtggcagacccgctggctccaagaacaaacccaaaccaccaatcattgtgactcacgacagtccaaattccctcagagctaacgccgttgagatcagctcaggttgtgacatctgtgagactttatcggattttgcaagaaggaaacagagaggtctctgcattctcagtgccaatggttgtgtcaccaatgtgacattaaggcaaccagcttcatcaggagcaattgtcacattacacggacgttacgagatcctctcattgcttggatcaatcttgcctccaccagcaccacttggaataactggtctgaccatttacttagccggacctcaaggacaggttgttggtggaggagtggttggtgggctaatcgcatctggtcctgttgttctcatggctgcatctttcatgaatgctgtttttgatcgtcttcctatggatgatgatgaagctgcctctatgcagaaccagcagtactaccagaatggaagatcccgtcctttagatgacattcatggactgcctcaaaatctgctcactaatggaaactcggcttctgatatctactcttgggggcctgcgcagcgtgtcatgtcgaaaccttaatactactgctctaatctccacgtttcatcatatcaaatgccttaatcttattatctcatttaccttggaatcaaagataaatgtgtctgtaggttgagagagaaccgtaagtctggttaagaaactgaagcttatctccctttgtagtttgtacctgcaacagtaaaaagaaaaaactgaaaaaagcaaaagtaaatgattatgaattttaagcacaatcctctaatttaatacgaaaatattacaatatttttatccttgatccaaagtgaatgttggccattaatagcagaacatgtgaagaatcatacaaactggtgatttctctttacctgtgtgataccaattgcagttgcaccgttccagcaattatttaggaaactgagctagcaaccaacttctgattttactccactctcatcccagtttcaacatgttatataatctgtaaatctctagaggatttttgagggtttcactaacaagatacaaactcttgacgtttcagatatctggggattaaggaaataaacgcggtttctcatgtttatgattgggtactttcatgagcaatgccaaaaacattagtacgtctatcaccttaaacatcatagcctatttccctaaatccctatttcattatctaactaccttgaattaaaatcagtacttctgtgggtagaataacatgtttggtgatgctgaagctaatcgttatgtacttatatctagccagtgaagacgaaaatatgtgaaagttttctccttgcacctcacggaaaacttagtagataaatcacaaacacattaaaactgacatcgaatgataaactaaccttcaagcacaaacttccaaacttttctggatttggatcaataacttgtgctgtgcgtttccaaaccaacattctcgatgaagtttctttgaaagattccgtttaggacgctttcctgtaatgatcacacacaacagaggcactatacatggtcagtgtaaactgcatagcatgtcatggcattaattagagataaagacatataatcatgcctgttataaatttcaatagttggttcaacacatgcataggctttaaatacgtctccaggcaatgatataaatacatgcaaatgtacatgatagacaacaaatcatcatcatcaaatataatcatcaccagtttctccatttatttttctaccaaaaagcaagaaatttctcagaaaatgaagacgaagatgttaataaccctctttgcactagtttcagtagcaggaacatcagaagcgactggtacacttgctgcacagcagaacacaagcattatacctacatacacactctggtgcatggaaaatccatatgcctactttagaagagtgatttcgagcctaaaatgggcttgcaaaaatggtgctgattgctcaccattggaaaagggtggccgttgtcaagacctcgacaattacagaagccaagcttcttatgcattcaatgactattaccagaagaatcctatacccagaaactgcgatttcaatggtgctgctgtgcttacagttcaggacccaagtaatactaaacactttacattcgaaaaaataaaaccaacctctgatcaaaattcctagagttccattgtgatagtgtctatatacgtcagaactgatttttcataatcatcttcaatttgtgattgttgttcttcttcttatatctgtgaactttgattgcaggcactccaacgtgtaagtttccatctaacaggtgagcataagattcatttttttttttccatttcgttaaccttccggaagaaaaacacagtagatataatttatataaatcaatttttcagcactggtccatacccactgacttcttcagtaacaagaactgcaactccaagcctacgaagcttcttttggggttttgtattcacatacctggcttatagtgctgctcagatagcttgacctagaagaaaactgtagaacaggacaatcaaggtgtggttttacgagaagaaatattttgtataaataacaatatgataaattagtataatacctaaaatgatatcttccgctacatctccaaaactatcaaattgcttatttctctgccagataagtgaaaccaatcctagttgtagcatcaaacaattcagcgaaacctgatttaattgtagagacatcccagtttaagatatcgagtaaactgtaaatctctgcggatttaggatgcgttcccccacaagatataaactcatgaacttcaaaatccacttcaatcgaactgcagccaacttctttctccatttgtctttccttcatcaaaagcctctgctcaactgcctcttcgaacaagccataagaagcataagcattagacaagagaacataaccacacgtttcatctggatcgagcttcttcaaacattttgctgctcgtttagccatctcaacattaccgattttcctgcaggcagaaagcaaagaactccatataacagtgtcttcttccaccggcatattctttatcaatgcttctgcttcttcgaggagccccgctccacccagcacattaaccattaaagtatagtgttttattgatggctcaatcatatatttttctttcatcaatctgaaaaattcatcagctctatgtacttccccggagtgagcacaagctgttaaaacaccaatgaagctgactgaatctggttccaagccagaacgctctaactccgagaacaaatccatggccctttcctcgaatccgttattagctagaccaagaatcatcgaattccaacacgataactgcttcttaggagcacactcaaacacatttagaccttcctcaatgcacccacacttacagtacatatctatgagtgctgtaacaactatactattcaattcaaaccgattcctcactatgtactcatgtatccatctcccttgctcacttgctccaaggtacgcacaagcattcaacagactcaccattgtaaacccatcaggtttcacatctttctcctgcatctctcgaaacatatccaacgcatccttaaatctaccattcctcacaaacccactaatcatcgaattccaagaaactccatttctctgcggcatttcatcaaacaggttctgcgcctgatcaatcaatccacatttcgcaaaacccataatcattgaattccaagcaacaacatcaaaacctatcatccccagaaagattctccaagcttcaatcaaacacccacaagtcacgtacatatgcaacatcgtattccgtataaacgagtcgtcttcaagtccctctttaataaccatcccatgtaattgcctcccatcacgagcttggccaagtctaccataagctttgaacaccgaaggataagtcaatctctgcggcttcacagacggagaagaacacaacatgtcaatgaaaatcgaaatagccatctctggaaacgagctccgtgagaaaccacggattatagtgttccagacaaatgggttcttgtgattgatcctagtgaataccaaataagcgtaattcatgtctgacggagacgcacagcagaaggcgaggacacggctcgcggtaacagtatcggaaattaaaccggttttgatgagactggcgtggatttgcttaagttctctcatcgtactacattgtgtgtctatcaatcggagataagtgttgccggagagggaacctgatgacggcatcgccggcaccgtcacaccggagaaggataagatcgtcggagacatttttgtcgatttaagtttaaaggttggataatttataggagattacacacgtgtgacattatcgccattgataatgaacaagacaaccacacgtgtgtagtttttcttctttctgaacttaacgattcaattcattgcaaaagaagatcaatcaacaagaacagagtacaaggtttcaacaatctgtctagttatttcagcaaaagtgatatgattatttcataaatgatcatccaaagcacatctcttaagagtataaaaccaccaaaagtccaaaacgagcaaagaaccaggctttatctctactgcttcaaatctgcagagcatcagcaatggatccagcgaggctcaagacttcgaaaggagccttgtttccgatggccttaaccgtctgtggacaagaatccgtgatccagaagtaagcaaacgcttcttctaatcctaattcgaagaaacaataacattgacttcagtttaaagatgcaacaagcaagatatttatagaacaatgaacaaagttagttactttttctttcattttcacagataattaccgttcttcttgtgggtgaaacgctcccacgagctctttgggaagacaccatgagttacataagcactcaccttcacagctccatgcgctgccaatactttctgttgtgacaaaaagaaagtgaaacagttaagatgagtaatttcaaactagattctcaacaaatctcatataacatcagaaataacaaagattctgatcaaaagcctctcttgagttttgacacaacacttgtgattcagaatttattcaagattgctataacctatatgaagatacaaaatgcagggatatgagaattttgatacctggcattcaatgagtgtacccccagactgcacaagatcatccacgataacaacgtgacaaccagcagggtttccttccttcagcctgactattctcttatcgccttcacgaacctttgtacacacaacctattatgaatcaaaattgagttccattagatattgtgcaggtcataaagatgttcaaatgaagcgttataaaatatcagttttagatagctacaaaccgtgggataatgatccaacagcttatggaaacgcttccaggctccatcatcaggaaatgcaactatgacctgcaaacaaatggaatcaaatttagattattgagcaaaaacaaaaaagaacagccactgaaaacacaagtggatgctatcagtaacagtttttcatgaactaactttctcagtttcaggaagctgttgaaggcgtttagtcaacaacgggattccagtctcaaacaaaggaagaacctgatcggcaaagtaaaacctttcctgcaacacatgaacatatatagagagagtgatgaacttgaataattccacaaataaatgtagcaaacccccggggatatcagaaataaataaacaaacctgcaaagcgtgaatgtcatagatgacaacactagtcggaccaccgcgtgaaatggggatattagagacaatccttgccatggtaaaagcagttgctacatctccttcctcttccattctctcaaaggagccagtggggaagaaaggcaacaccaaagtgaaggacgcaacaaacaatcgagggagcaagtaaatgacagagatctgctcaaagatgacagcaggggaactgaatgaagcaaggaacgcaacgtgctggcctcggatatcatgtgcgttgttgataaatagattcgggaatccatcagcaaaactcctgaaagcataacaaatgaccacatcaattcacatatcctcaatgccatctatgaatcaccaaaaactatccaaccagagattcatttaacagtaagagagaagagaacttaaaacacttaaactgctatattcttacatagaaaactgaaacttgctcaaaagataagatttttgaatacataagcttcaaatcaaacaaccacacatgcaaacacacagattctggaggaaaaccaacacaagggaattttgtttcagaataaagatatgatttttacttaacctaaactcacataaacccaataaacatcatccagaaacacaaaaagagaacccagaaaatggggaaagagggaaaaacctccagttgatggattggagagtgatgtgatcagattcagcggcgatgttgcgagcaagttcttcgcactctaagcagtaaaagagatgaactttcttcttctgtaattcagacacgatggcgtctgtacaaatcttggtctccatgatgttgttggctgcgttctcagacattgacgccgtgaaagagtccgaatgtacttgcgacggaatcggatacacaaaaaaagggtttaaaggttttttatttttctgaaaagcccttgttttttttgttgttcggctgacaattttgattccttgcactttatttctgtaccccaaatctgtaaatgatacgtttatctttattttaatttcaaataaaaataaaactttaggtactgtttactgaatgtatttccattaatgttgtcattatttccattctttgatatttgaaaaccttcccaaactctatcaaatcaatagagaagagaaatctcggtatcaaaaatctgatcaatatctggaatctgtaaaaaagctgggaagctgcatcattttcattttcattttcattttcctaagtcaaaactttttatatttccttcttaaacaggcatgaaccaacgcaattagccaaatattaaagagtaacacttaactagataattccaccttaattttctttaaactgagtttttttgtcaactttaaagtgattttttttttaaagaaatccaatcgagaatatatttatttgaggccgctatcagctcgcataaaaaccttcattaatatttaatactgcaattttaaaattaaaccttgattagtgtgacactgacactcaaataaatatactatataaataggcccgtaggtcctgatcctactcttgttggacaaggccttgaaataacaaaaccaaaagtttccactcaccaaaactgggctccaataatttctttttctgagactaacaacaaagaaatttcagataatttcttttatttatctgagaaaaaattaaatcatttttcgaacgacaaaaaaaaaaaaaaaacatttttcgataagaatatagaagatgaattatacacattgaaataatgacgtggagccatgtgtgctacaatatggcagcacgagaacatatcatgttcgtctctcaattatcaatccactgtcgtccatcttaagctcacgcaacacatccttgcgtgaaccacacgcaccactcgaagcaagatccaccgtccgatcatcccacctaagtctcatcccatggttcaaccgtcggatgaaaccctcgctacgtcgttcacagtaatccaacaagctaaccacatacacagacttttccttatccttccaattcccaccaaacttttcaaagtgacgtcgttttcggctctccacggccaaatactccaccatgccggccacaagctccggcgaagctcctgactcgtctccccatagccatattctaaccatagaacgtcgcaatgcagattccacggcgttgctaaacttttttctttccgtgagagatgggcttaatctgatcacatactctccatgacttgcacctgaagttaccgagaacctatctactctatcactactgtttccacagaattggacggtaacgtggtttacaggcttacggagacgatgaggaacaccctcgtagagaaacctctccacaaagaagcttgcatcgagcaatatccgcactgccgtatcatcagattcgaagaaaagggcgaatcttttaccggaaggagaatctttagcatcattgatgatacttatggagaagccttttgaagcctcatggtttgcccacaaagagattgctccgacgagaagtatagagaaaagccgcagaataatacctgaatccgattccgttgctaagcctttggtggtgggtttggctaggaaaggttgaagaagagtctgatccgtcattgaaaccatggatagatgtctacatagagagagacgtgtaacggttttgtaatgataactaattgagacagaaacttataacgaacctgttgtacaactaaatactgatcatgtctttcacatggaaaggataatgtacacgcaagaggatgttatatacacatgactgatatagagagaagtttccgaatataaagtatacaacgtaatgtactaatagggatgtttctttaatcggttgcttcgagtgaagtaatccctaaaaactggttactttgttccgtggagaaaacaagccttaatactgtacattctgtttcttccataaccgcgccagacctgtacacttagtttacctttgatggtgagttagagttcccaactactagttttagtggggattcaagaggactcttctgcagcattcttggagttaccgttctccctcggattttcgataagatccattgtgtaagaccaatctgaatcaggcgcggttatgttccaaatgcttgaaaacagttgctcctgtatgattcatagatacaaggtgaaatcggtggaaaaatctgaagatactgcatatgcattttgaaatcatgtatcaaaaacaaaaacaaaaatgagattttgtatcggataaacatacgtgatcattggcgtcttgaccatcatcatggtaggagacttctggaaacaattgcttttgttccttcatagaacttggagtctgcatgtatgacgcaagggcagactttccttggatctctgcatatgccaatgaagcaactttcccactgttgaatttctcccatattttaccattgaaagtctgcagaaacacacattatgaatatcttttagctataacaatctcaagccattgaatcggataattaccatatccacaatacatagtcaacttcatgactagtgaagagaagttttaaagacaatactgaagagaaaaggtaaagaaacctgttggaagggaacgatgtgcaatggagagaccatgttgataaaagcgtgacccatgttgcatttattctgtatccagaaaaaagctagattgttagtaagttctcaggtcatacaagtgcatcatgagttcactctctcttatagtataataccttaaagtctgtcggcaagcatagaaagtcatagtctcccttgtgcttttcgtcgatttcagccaccagcatcttgtaagtgtaccttacaaaacaaagcatttgaaatttaaacattgctcgaatatcttagattgagatcaataaaacgcttacttgtttgggatgtttttgatgattaatgtagttcggatttcatctccactagcaatcctatccaagtcgatatgatatctcccaccatctatgaactgattctgattgtgactctcgtggttatgtatcctaccctgctcagcaaaaggttcaggccttactgattgtaatcctctactcccaccgaaaggaactgtaggcattgaagacatgccaaagccagtgaaatcctgttcactactgttccccggtagactaacaccaaggtttgcttttccatgagcactgttatagtttctgttgattcccatatcactaaatccaaggggtatctctggtgatcccgtgtagcaattcatttgtgtattaaaatgaatgcttgagggagcagagcccacatgatgctggtattttccaagcaatgaagcctgcctctcagcaaatggaaaaccatgcctgacagtgaaaggacgttcagtagatgacgatgacgacgacactccagtgtaaccaggataattcatatgctgaggagggcttccccagcgatagcggtgatcagatgaagtcccgaatcctgaggagtgtggagctataaacctcatggagttggaaattccccctgttatatgctctggcaaagaatgaggttgcccataggaaatgttgtgcatcaatcccttattcagaatagtttggtttgaatgattcaatagcccttggtcattactgactggtgaaaatccatgaaagctagaaggatgagcaggaagaattgaagccagtcctggcatattgtctgagttaactggcctgaccattcctagaccatgtggcctcgtaaaggcatgcgaaggagagcccttcactgggctaccaattggccagttacctattaagtagattgaatgaattacggaaaaggcatgctaaccaatcgagagaaaaagttgataaaagaaatgatcaatatgagattacctggtggagaattagcaacatgtgaacctacttgattgtagaaatttgtaacttcggttctctccaaatcttgactttgtgacgggaccgacctgcatacaaaaagtttccgttcacagtgtatgcaagataactcaattctttgacatatacaaagtgcagaaaactcacagtcgacgagcccctccaggacgactaagttcgagctttatacattttccacctatctcgcttctattcagtgctttcaaggctgtctctgcatctctaacatcatagtactcaatgaacctgtggaatcgcctgtttggggtttctctaatctgcatttacaagtcaagaatcaataagcaggtgatatgttacattatgtaccaaacaaagagaagaatctcttagacatagcatatgcacatttgaacgcacaagttaaattacctctcttatttcaccataggcaccaaacagctgaaggagctcatcattcgatactgttgtgtccacattaaaaatcacaagagttccttgattcatatccttctctgatggattttcctatcatgtggcataagctgatgatgagaaaagtactaaagaaaagctgaaacttcaaatcaagaatatctctcgtagtccatactttaggaatggaaaagtgaatgtccagtgtcctttttcttaaaagtgtgttctgtagtgcacgcattgcggcatgagcagctcgaatatcgtagtaggatatcataacaaaccccctgcttttacatgcagtgtacaaacttctgatctccccaaacggctggtgacaaatagaaatcccatcagcaagagcgagcaaacctcaaatattctatgagttacggctcaacgagaaagatgaaagcgaacaagtgttgattacctcaaaaagggcgcttaactcagaatcctcgacactgctgttgatattcctaacaaataatgtccttgaaggatgttcaccgtttggatgttccactgaaactctaccagccgtattgggacgtttacgaggaacaaatgcatttgcagcaccgcgatcagaaatctgcatccctgacgcatcaacagcatgattatcttgggattcaacatccaactccataccccctcccgtgcaaaagacatcacactcttcgagatcgtcaagttcatcaggcaacccggtaaaattaagctcatcaatgaggccaggaaggagctcattttcatcctcaggcagcaatatttctaaagcatcgggttcaacatcttccaaagaatctttctctgagtttcctatgacaagtttgttcagattgggtgagctttcatcaaaggagagccaactatctgaatcagtcatattcactgcaaacaaaaacaaaaagatattagcactgttcttcaagtaaatcaagaattaaaactgaataactaaaagaagctagtaggacatacgcttttcatgaaaaagtgtgggcaatgagcttgagaacatgctgagatcacttgaagaacgatatccagtgcctccattaaaagcttcagatgatctactcagcaaagatggcatatctagatttgacatagccaaatcaatagatattaaaaaaattgtgagaaacaaaaattgtaaattcaatcaaagcaagaaagaatctattcataccagcagatagtgatttattgggttctagctccatctttttgccttctgcaactgcagatatgaatcaaatatcaaagacctgctagttgatttctgattttgcatcataaagcagaacagtaacttgctaagatcattagttctcgatcacaagctactcatgtgtttcctagtagtccatacatcaacaaacataactgagaagaagaaaatcgaagcaagaccatgagttggtcaactcgatgaatagaaaattttgctgcttgtggcgacaaaacatcatcagagacagagcaataaactcaaatcaaagcttaaacctttgaaacaggtcaaaaaccgattcgatgatcagtgaattc

SEQ ID NO: 370 - DNA, 90283 bp, Arabidopsis thaliana
gaattcaagagaaggttaatatagactctgtacaacatgtcatgagtcttactagagaacctttctttcttctcccccaaaacaaggaaaaaaaaacgatataatacagtactttccgatgtgtcttgaattacttttggtatccgattaactttggctttgcagagaacttacatcatcagcttttgtgtacctctcacatatgaaatctgcttaagctatgctcgatgttttggggaaaagctaattcagtttgattgataacacatcattagaatattgttgaatcatgttattatgccacaggcattggatcctccggtgtgtgagactctgattcttcgataccgtaattccatagttctttaagctctcctcttaccaaccccagtatgacggccaaacctacagagagaaaacacatcaggttttgtttgagaacgatggagaggagtgttcaaaaacagatggaggaaagggaactcaagcttctggttttaccgagtgtgcagggtacgatgtacaatagtgccggctggccatgtccgtccataagatacagacctaggtatgtcagtaatagacctacaaaacagaacaggaagaaacaatgtttctgttaagttccaagactgtgaatgtgagaagccatctcgattagcaagctatgttattttatagtcggaaaatataaaataattgagatcatttactctgttgtataagctatgtaacgccattaatgttcacagagttagtaatgcgtggacacttacctattccatagccgatagtcaaccagaggaagtacccatttgatattaccctcttttttatcttgtcatatctgagatcaaagagtggagcaagtattaatcgtgggagaggattggatgagagaatcgttgagaaagacactctggagaaagtatgggcaaagatggaattccaagttgttctttgaagctctaagaatgtcactgactaaaagtacctggaagcaaaggaaatgagcaaaccggggaagaggatgtccccaaaaccaatcatgtcataaccaccccaaggatcaaagaaccgaggaatccttagtagcatcggaatggactccccagtgctgctgtctccttgggcaacctacaaagaagggagtttcaaataagaatatactggctgagcttctctgggcccttcaattactcaattatcacaatcgactactattcaaagttattgagttataaagttacttgtgtaagctgttgacaaaacgacaaagatactacagccctaccataacaaatttatgtgtcacaaaacaaacttcaatgataccttccgaaacagcatatttttttggtcagaattgcagaaacgaaacaaatcacataactagcccctttctaagcctaacctggataaactgagtgtagcaatagaaatgataaattttcgactttgtaagagatactcaccacaatcataacactctcgtgaaatatcaatggagatatgaagacccagaaaatgtcatagacaaatgcgcagcaaagaagtacagtcgcaacctggagtacagaccattataagcataacagagaacaatcataattcactacacagcaaactagataaaataccttgatgttaggtaatcgaaccacttgcaaggcagtgatcatcaaacatatgccctgtcaacaagatgacaataaatatttcactaagtgcagcccaaggaaccaaaacttctcaacatgacctcttcctttatggaaagagtggaatatgaaactaaattaacaaaaatagcagaagcggtgataagagaaataatgagaggaaatggtatctagatgcatgtagtgacgaagaaaaagagagctatgggagttaccaaaatgtcttggccaacccaagaatacgatgtgtgacgttttataaaccagaaaacagcaaacgccaaacaaacaatattcaccaaaagcgacaacactgacattgttccaagcaaagggagcttcacagatttccgagcaagatgtctgcattttctgcaggcggaacaaacatatatctgttaagagatgttgaccagaaaaagagagaagtgaaataatcaggaatatttcagaatacctcaatataacagccataatgatgttgtgcataccctgaaaacaacagccactgcgttaaattgacggaaaaagcacatatacatttaatctaaattctagacaggttcaaaaccgccggatgttaatgaaattacctgcatgccgccaatgcagaaaaatatggtgagcacccatacaaaccatgatgacatgaagtagaaaaggagcagcagaaatatggaggctgttacaataaaaaatacagcaccagtgacacttatatcaaggatttccttctctgggtcatcttttctggtcccagcactagaaacatcctggaaaaaattcagtaaattatttttttttctttaaaaagacattgttaattcagctacataaactgaagttttgatcaccaagtctacagaataacaagaggctgctacgcaaagtatctgggaaatgtaaactacgtgtataggatatcaaaggcagttaattgtagaaaccatagcatgcaaaagtgcttaaccacaattctctggtacacctttgctagtatgctgtaagattcattagcttggtcaggatctgtaagctctgaccacagtgatgcaacgacaacagttcccacagccatgagcaataacaatccagctgtgaggtccacggcaggacgctttggagcatacaacaaaagctcaactgcatcataaagaaactggacttagcctaaaagagatttatacgaataccagatggttcaaattgtagagctacaggaccaacaagagaaaaactgaagtgcgaaatcacaaaggctcaccattcttattgtcaaccatagacttgttgagagcatctccgcttgacttagagatcattaagacaggtatgctcacatttagagatgtgtccttttccatacatcccatctcatcaagatctgataacagatcatgagtaaatcatatgatccaaagctacgaaacacgaaaaacatcaatccgaaaccgtattgaaaagaaaaaaacaccttctttgtcattaatgactaagagagcagaagcaccagctgcctcagcatgtttggccttctcagtgaaagcacaattgccacggatcgacaaggcaatatgtccatctaactggaacaaacaatgtcaatacaagatatcaatgaacattgccaaaaaaaaaagtcagcttgcacttccaaattacatggtggaagccattgacttcattctaaaagcaagaagaaaagagaaactgaccctggaagagagatgggaacaagagtccaaaggatctacaaaagcagcaggaaatctaagagcttgatcaggaacagaaggcaaggcagctccaaattgagcagttaagccagtaaggaagtctccttcaacaccatcaacccaatttaagacctttacctatatgaagatcatttccaccaaatatagaatctcattaacaaagagagagagagaaggaaaactagatcaatcaactccactgaaccagagagtgattagatacgaagtaaagataagaaattgaatgcaccatttgaaacttattggtacagccaggagactcgaggctggaatcttcggtccacgatacatcgtcggccgccgctaccgaaaaaccaagcaggagaagaataagtactaaggctgaatatcggtgattcggcggatcaaacgacgacatgacgcaatcgactgagcaaatcggagagaagaagaagaagaagaagaagaagagacaaagagttgctgttaaaatctttctgggatatatcggacggtcgatattatagtcttttttatcctctaaattcaataattcttttactgtttctattgtgccaatttttgagtgattcattaaaactatatgatatacgacagctctttttgctcaactaatcaaaaatcataaattaatatatgtcgcattatgtaaaatataatggtttcaaaagtattttgagcagaattcagatccccacgatgtattttgacttgtctagtatgtcaaacaaacaaatagaacagttaagtagaggagtttgattgtaaattctaaatgtcatcgtaccggccggtttaaatgttcttcatttgataactatcaagaaaaactaaattatttagataactaatttatatgaactcgatttatctgtttatttaacaatagaaatatcaagaaaaacgaataattcaggagagaaacaccttcttggttatataaaattacaagaaatttacagtttgtacttaaaatcttttccctttgaatttcgttttgagctaattacaaaacaatttgtttttttttttctgtttggttccctttgtaattagtaccttaatttactctgacaagatgaatatttttccaaaaagaaagtaaaaagagaaaaagagtccatgacggatattcaaaaaataattaaaacaaaaaggaagggaaagaagaaagaaaaaggcctttgtttttttaaagagaagagaagatctctgagaagaaactcctctgacgttttttctccacccaaatctctctcaactctcaagctcctctctttttcttccttctgcaacaacaacaactgttactgatctctctctctctctcccaagtttttattttattttgatcggagatcgagatcagctagacatggctcctgccatgaagatcgtcttcggtctcttgacatttgtcactgtcggaatggtcatcggtactttctctctatttatagtcctctacatttgatttttaattttggtcttcaaagtttatatctttttttttgttttctctcggccaaattgactctgtgagaaattgaaacggctctttcgtaaactcatggagattgtgtttctcttttgttcctggaatctgcaggttccttgttacaattggcctttattaatagattggaagattcgtacggtaactcctctttctttcttattttcttcatttatacttgtagatgtgtctttggtgatagaattgcaaatataggtatctgagctcttgagcaagggattgagaggacattgcactacaatgtcaacgaattcgtaggactagatcagggattttgattgtagtttatgcttactacaatgaagagatgatccccttttggattttctattgcttgttttgttgttgtggtgtccttttgatttctaaattctttctccttcttattcaggaactggatttccgtctctaagaggacttcgaggacagaacacccgctatctacgaggttggtgtgatcatttctatccaaaactatgcttgcatttaggttgttaacataatagtctctttctaactatttgaatctcggctttatgacaagactcttcttatagagcttgatttgtggacatgttatgataccgaatcgattaatggcaagacttgtttattttcagatgtctcccggtgggcaaatgacaaagatgcagaattgttacggattggcaatgtaagtatatcgtatccattttgcagttgtttttttttcttagggcctatggttgcctaaaaatttcatttatatacctctacagttgaagaattggtacatggaggagaaaaattaaattgtttgtagtacggacacatttcttaaatatactatctctttgtgaaactatgaaaattacacacacatgtatcgttttttgttttacttctgtaaatctaggtccgttttgtgtgcttccagctaatgtttattttctttagtgcaggtcaagcctgaagtagtcagttggtcccctcgaattattgtgcttcatgactttctcagtccggaggtatatacaccccccactaataaattctagttcattgagttagctgattgtagaatagtctgttcttgctgatgttaggcctttaagtagagaaaaaacttgttcatatcatctttattctagcaaggataagctaagatttgatagaaaagcaaaatcttaggctcagttctaagtattatcataagaattagcaaaagagcttttggctgttttttgtcttcccattaaaatagttttcttgtttctcctgatatgtatatttgcaggaatgtgaatacctaaaagcaatcgcccggcctcgccttcaagtttccactgttgttgatgtaaaaaccggaaaggtattggacaataccttccttttagttctgtagaagaagtaaaatttctattacatccactctctgccttcgattgttcagttgtttcaatcaaacattggacacaaatagaaacgctctaggtttgcctgcaaagtctaattcattctcttccatagtagacatattctagttatgctttcaaagtcttaaccatactcttccattttcttatcactttcttcttgcttagggagttaaaagtgacgtgaggacaagctccggaatgtttctaactcatgtagaaagaagttatccaataatacaggtaagtcactctctcatatcttttaaaggcgtgccattttgatcaactttacaattttgtaaattatattccttttcgtttgctattattaggcaattgaaaagcgaattgcagtcttttctcaagtaccagcggaaaatggagaacttattcaagttctaaggtgcgtgcacaaccgcaaccttactattttttaaatctaaagtaaacgaagcttttttcttgttttgatgaatcaaaatctgctgcagtgcagatatgagccgcagcagttttacaaaccacatcacgattactttgctgacactgtaagtctttggttctgttttcatatatatatatcattagtagattggtaaagaaagcttttgctctgattaaaaaaaaaactaaaaagaggctacagtatttaacttttggtttggtcaataatgtttagttggatctgtacttcatcttctccttcttcatcatcttagaacatttagtttggaagtacgtttattgtgggtgttcatcatatttcctcgtttcttttcttatggttgctacacagttcaatctaaagcgtggtggtcagcgcgtagcaactatgcttatgtatctaactgatgacgtcgaaggaggagaaacttatttccctttggtataacactttctctctgttcatgcaaatttcagaaaacaaaataaaccaatggtgtaatatctctctctctctacttgaaatgcaggctggtgatggtgattgcacctgtggtggcaaaatcatgaaaggcatctctgttaaacccaccaaaggagacgcagttctcttctggagcatggtttgtttcttcaatctctctctctatgtctctacacaaacatgaatcaattggactgctttgagttcaattacttcttgtgttattcagggactcgacggacagtcagatcctaggagcatacatggaggatgtgaagttctgtctggagaaaagtggtctgctactaaatggatgaggcaaaaagctacttcttgaagaactacttaaaactttttaaaacaaaaagaaaccacagggacttatattgaaaaatgtcatagtatctcagagttttgatttactctctttttgacccttcaattttagaatttatcatttacatacgtaaatcaatatgaatgtgttttacattttaacctctccaacaaattctaaattactgttagcatataactgacacagaaaacaattactgttacaaaagaattaactatcatttcaccgaaataacgaaggagagtggcattttggtaaataagaacaaagtctctatttataatcgcattttggttgacttgcttcaatcttgaccacagcaaagagaaacaaacaatggcggcttctctgcaatcagcaaaccctacattgtcacgaaccctagcttctccgaacaaaccttcctccttcgccaccttccgatctccatttctcagattcaattcaacatccgtcgcttccaatttcaaacccctagtttctcgagaagcatcctcatcgttcgtcactcgctccgccgccgagccacaagaaagaaaaaccttccatggactgtgctatgtcgtcggcgacaacatcgacactgaccaaatcattcccgcggagtttctcactctcgtcccttcgaatccagaggaatacgagaaactcggttcttacgctttagttggtcttccagcttcttacaaggaacgattcgttcagccaggtgagatgaagacgaagtactcaatcatcattggcggtgaaaactttggatgtggatcgtcacgtgaacatgctccggtttgtttaggagcagcgggagctaaagcagtggtggctcagtcttatgctagaatctttttcaggaactctgttgctactggtgaggtttatcctttggattctgaagttagggtttgtgatgagtgtacaactggtgatgttgcgactgttgagttgagggaaggagatagtattttgatcaatcatacgactgggaaagagtacaagcttaagccgattggtgatgctggaccagtgattgatgctggtggtatatttgcttatgctaggaaagctggaatgattccatctgctgctgcttgattttgacttcaggtatgattctgtaacttgatgatgatgatgatgaggattggtaataggttaggattgagatcgaatttgtggaatagtctaggaagcttgacattgaattgaacgatgcaaaacatagttttcaatggttctagttagagaaagagaacacagtagttgggattctagttttgtgttgtttaaaatgtgttggtttagtttttgtgtgagattgataatgacttgttattctttctcttcgcttaagacttactttatctttccattggttcaatttctagattgtacatctcttgattgtagttgttgggagggtaaaagttatgatgttggctgatcttttccatgctcatatccattaagacttgagtgtccgatagtagaacaatacttcactcttattttgtctctaagactcctttttttttttcctttttttgttctatttgttttgcaggtgtcaatggaagtgcatgagagtcacttcaaggatcttgatccaataataagaatatgtaatgtttccaaaagcttatgaacctaatctatgttttatgaatatatatgactatcggctttagtcttcagtatcagtttcttgtttacatttggatgtatcagctgctaaaaaaatgcatagtttcccatcccatttgaaacgacgttttctctcatgtcttccactaatataatcttctggtcatgagaacagaacaggagctctgtttttctcacacaatgatcgaacacacttttgtcatatagtatagagaaatattaacacttctttttaggcatccgtatctagagtctttgtttcactgtgacctacctaagtatatcaaaacgcacgtttggaattctgaatggcactttcgtaaataggagggtacaaacatttctccttttaaattgttttcatcgtgaactctctcactcactcaacaaagtaaagaaacaatggcgtattctcttcctacatttccccaagccttaccttgctcgtcaaccaaaacttcttcctccttggctaccttccgatctcctttcttaagattcaatggttccacttccttaatcccctcctctatctccatcacttcacgtggcacatcctccccgaccatcatcccacgtgctgccgcctcagaatccgactctaacgaagccctagccaacacaaccttccacggcctctgctatgtcttgaaagacaacatagacaccgaccagatcatcccagcaggagccgcttgcaccttcccatcgaaccagcaagagcgtgatgagatcgccgctcacgctctctctggtctaccagacttccacaaaacacggttcattgagccaggagagaacagatcaaagtactcaatcataatcggcggcgaaaactttggttgcggatcgtcacgtgaacatgctccggtctgtcttggagcagctggagctaaagccatagttgctgagtcttacgcaagaatctttttccgtaactcggttgctacaggagaggtgtttccgctcgagtcagaggttagagtctgtgaggagtgtaagacaggagatacggtgacgatcgagctgagtgatagtggtggtttattgactaatcacacgaccggtaaaaactataagctgaagtcgatcggtgatgctggaccggttattgatgctggtggtatttttgcttatgcgaggatgatgggaatgattccatcattagcttaatcctcttccataaccatgatggtgttcttgtatgcataactatttgatgaatatttgtgttttagagttttctattttcttaacttttttatgtttgtttgatttggtattgttgttgttacctaaagaataagaaatcaaaagcaaaatagaccgacatgttccaagatatgtgaatatggtgagtgtttactaaattatgcgaatattgttgttgcaaccttattttcttccaagttgggcatcaatttccctttttgggcttagtcttcttttgtttgtaaatttagtttgttttagtttattgttggcccatttctgtagggtttggcccgttaagtaagtaccatgtaaacccagaaaatttacaacgaaaaccctttagcaaaaaagtaataattccgttggtaacttttctcattgtagtacatggcatattttacttactctactaaccaatttggtttggttattgaaaatttggcggtttaaacaaaccgatataaaataaccgttaagcggtaaaagaaaggacatcgctaaacctaaatttgcgactcctactttataacgccgctcttcttctccattgtttgtatactctgaaaaacatggcaactacagagctaaaaccctccgccgttaaaaaccctaaaagaaatcgaagaccatcacatggtccgaagaaagatttgaagaagaagaagactaagattactaagaagactaagaagtcgaaagctcccacctttgataagaccattgagaagagtagaagtaacgaccagaaaaccgacaacgacgaagacgagcaactgtattcggaaccggtatcggcctctgagcagctcaactactttttgaatcatcttgactccgccattggtatcaaggtttcttctttagagcttgaacccattaaaggttcgtcctttgttttattctagcttggtatttatgtacttctgtttaagtatatcttattgggtttagatataaaaaaatacgagctttgattgttcattcgacttatcaatgcacagatttcccaagttctgatgaagttaagatttgtctggtttaattgcagatacgtgtatagttgagttatctcaagggttggatcaagatgtaagcaacttgggagaacatataaagctttcttgtgggtcttcatggagagagactctttgtgaaggagagtcacttgaaaggaaagttgaaccgggaaacccatctgttcttgttattagttcctctgctctgagatctttggaacttctaaggtacattgtaaatatgtgtacttgtatctttgttattgattgatataatgcttgattgaatagaaagttgcttagactgagtcctgtcttatgtatgtaggggtttgcattcattgactaagcaatgtccagcagtgaagttgttctcaaagcatttgaaggttgaggaacaggtagtgttttattcttataatgatttgtctatagagaactgaacttaattctaagcacatagaaaagagagaacaaattgaaactggcattttgagttatttcgttattgaatcttgttttggttctcttgtgtggaatgcattgttcttgcttctctggaacttgggatatgatgacaaaaatacgatatctctaaggctaattgctgtgcggatgaaatgtatttgcacgtcagtctgatcccattatgtatataacattaggagttggtgcatgctcatgtagttcgtttctttcatttttagttaatgttaaggatttgggaagtgatgataagatatatcaatatatcataggcacatgcaatgctgaacgatatatatttgcacgtcagtctgatccctttatatatatataacattaagagttggtgcatactcatgtagttcatttctttcttttttagttcatgttaaggatttgggaagtgatgataagatatatcaatatgtcataggcacttgcaatgctgaacaatatatatttgcacgtcagtctgatccctttatatatccatcattaagcatttatgcatatactcatgttattcttccctctctctgtctgtctttcatgttaagagtctgggaaatgatgataagtatatcgatatttcagaggcgtatgcaatgctgaacgaactatttgcacgtcagtctgattccagctcttgtttttgtttcttaatttgcatataagaagactatagaattagattcttctgctttggtctaaatatgaaactctcatttaaaaaagaaatggtttccgaaaatctttatataaatttctcaagctcattgttatatgactcgaattattaactctagttcattgtgttgcaggtatctctgttgaagaaacgggttaatattgggagtggcacaccaaacaggttagtaaatctcatcacatcctttcattgtttccctttacttgtatctccatatccttcttgctctagatcctgactgtcctcttgctcttctatgcaggatcaaaaagctagtcgacatagaagctttagggctttcgcgtttagatatgattgtgatcgacatgcacccagatgtcaagggattttccttattcacattgcctcaagtcaggtttggtttctcaactcttgaacaagctgccccattatcatcaacgagtggaattttttctgatttttgttctgttatatttgcagagatgagttttgggatttgtataaaaactgcttccaccagagagtcctagaaggaagacttcgtatctgcatgtatggtccaaagccttctccaaacctaaagaagaagaacaagaaataactgtttattaattgtatcaaattcttaaaattaaaaaacaaatctaatactaatctcttttttcatctccaagattttacaaagaattctaacataacccaggatatgagatttctttgttcgagctgattatcccatatctttgtaatgtttcacataaaaaaataattggacgtcgaagaccacaaatcatcataacactatttgctgagctgaaatgaagtcataacactacttactttagattcagggttagtgctcaatgaaatggaacttaccagctttttcattaaacaggttatagaaagaaagtagacaaaagatgcaagatgaagttgctggaaatgcctttgatgcagtccggaactattgttttcatttcccttgtatagttgtgtatgcaatgttttattgtctgtttcatctttcttttcacttgtgactgtaattaaaaagttgagtgaaggaagcccaaaaagagcatgcacaaagtagaaaggtaaggttttagattgagtgttagtaccactctagttttactttctttagtgaaactcatttaccaaatattcacaatgatatttttcatatagaacttgagattcactgaaaaaaatcattcaaagtcaaatcaatagtataaaagtatattatctatatgtccatgaatgcagaaaaagtgtgtttgtccaatagatggtggggaagaagatcccataaatgcagaaaatagtggaaacaccacccaaatagcttctagatgtttgactttagaactttccattaaacaagagacattcaaagtaatgtctttttagttttgtgaaagatgatgatcccattataacatacttttaagataacgtagatttctcattgttttgctttttagtgtacagtacatagctctgtttcattagagatgtttgtgaagacccctatgatatttttagtgggataagtggaccgagtgaaatgctcactccattcaacataaatggttaattagcaaaattttgatgaatacttcattccaccatactttattccactagctagacatctatttgcatcccatctgttttcatctcatgaagtgttacaccattcatttcgaccaaaaaaaagtggtacaccattctccatatctatgcgttctgcttcagtcatttctaattacatatcattggcaagagttttaacagtagtatgattctcttttaagtttatagtatgattgcaaataatgatataagattcgcgagacaaattcagataaacatacttaacttagataatgacagaaacttctcaagactttaaaagaaattaaaacttacgaacctcataaattgatctagaatgtagtactgtaaacatagtatagaaacgtctaaatctcttaatcaatcacttaactaataacggttccaaattatattgattacaatttaaaattagattaactttatccttttttcatattattaggtagcctactggcaaacaagaaacgaggaagtgtgtaataattcgatgttcttatatttaaattaaataatcttaaaatagttagagggtccatcttatatataaaaaacattataggtttgttgccaaaggagaaaaacaaaactcaaattaatgtttatgtcaatttgaagcacacgtattgcttaggtatattatgtgtcacattttttttggattagctcgataggatagtgattggtggcttcaaactgcagtggcgaggagagaagtcgttcatgccggctctaaagagttctgtgaaaagccaatctaagccaacacatatcatttcccagtcaatactcaatagacagtgaataagataattgctgcaagcatatattaaatgattttgagtatttgaatatagtacatttctagaacatgtatgtaatgttacaaaaatgataatcagaaaatatgtaaaaaaaaagactaaaaaagcaattcgattcttactttttgtttctgataaaatacagtaattctgatgatggccaaatcattcctctctgatttttatcgaaagtgacaactttattcgcaaatattcttatgacgtaagcatgattcatttatttgttgctaaatgcgaacgcataccttccaatttaattcatcggagatacagatatgtttctgtaacccaattttgatgacgtcaaggttacatatgtgtctatgtatgcaaaagtgacacgtgtcagatccctatgtcacacgttggctagtagaaagtgtctagagataatctctcttattcgttcacttttgaactggtcttcgatgttaatccatattttaaaacttttaaacttggggatgatcagaagattcaattcatattggccaataaattaatttattttaaaagttacgacattgtcttatttattagcttaaagtctagtttacttttcactctcttatagctcagaaacttttcactttatcgtgaactattgaatccaaatttgcatattgatcaatcaaagaaagtaaccgagttattcagtctagtctataaccgaatcaacaacaatgaaaactgaactgaaaataaacttatataatcttggtttagaattttgcttgtcatacaaaaatcataacaactacaagtttttacgtgaaaccatatttaaaccttcttaaaccaaaacataaaccatagtttcagtatcaatatagtttggttataaaattattctcgtttttctgtcatttgactgattaaattagttgcaagacatatcagaaacatatagaacaaatgttagatcagagtgacgtgagcatgacacaatgcatcccgtgttgattccaaacaatgcggcggtgtaagctttttgaagcccatcatggcccacaaccaattcaaagacagtcttgatcctctctcttctataaatagacacacagaatcacaacaccaaaacacatccaaaattcgtttattaccgagaaaagcaacaaaaaaaaaaaagagagaagagaagacgactttaaagtatatgagagctgcaataaacagagcaaattcacttggaggtttgttttcatttaggtttatcagaaacatcaaatcaatgtcttcttctacttcccaagatttcgtatcaagacctgttatcaagaaagtcttcgctaagcttcagaaagaaggcgatggagccgtcgttagacgtggcatttccaggttccttgattagtctctctcttttttttttctcttaggaaaattaaatgatttttacaagtctaagaaattttctgggttttttttcctatgaattcaggagtgagcagaagttgttagatcctttcttgatgctagatgaattctccggtaaattcttatttatttagctatccatttaaaaaaataaccatttttatttattaattatccatttaaagaacagatatttattgatgattttctaatttatgtttttttctttggagcagtttcgcctccagctggcttccctgatcatcctcacagaggtcaatatcaccattacatacataaatgaaataaaaaccattttcaattatctaatgtctctctaacattttgtggaaattatgatgaacagggtttgaaactgttacatacgtactagaggtaattaaaatacatttttttaattatgaatcttctaaaaatttttataaaattatcttattcgaatttttaaatatgtggtttagggaggaatcactcaccaagacttcaaaggtcacaagggtacaatatatgctggtgatgttcaggtaagaacagaaaaaaaaaaaactgtttaattactgcataacccaaagagctttaaaaaacctaaaaagttactggacatttttacagtggatgactgcaggaagaggaatcattcattctgaaatgcctgaagaagaagtcaacaaaggtttacaactttggatcaatctttcctccaacgagaaaatgtaactaaacccacttgcaaattcgacattttggactctttttaaaccggaagttgactcttcattttcatttcgacaggatagaaccaaactaccaagaactgtcgcattcagacataccaaaagcagaacaaaacggtgttgaagtcaaagtcattgcaggagaatcaatgggaattcaatcacctgtttacacaagaacacctactatgttcctcgatttcactctccaaccaggagctcaaatccaccagaatgttccagaatcttggaacgcatttgcttacattctagagagcggtgaaggcggcggcgttttcagttcctcgaactcttcgcctattccagcacacagtgttgtggtgttcggaccagggaatgatggtgttagcgtgtggaacaagtcatcttcaaagcaattgaggtttgtgttgattgctggagaaccgattggtgaaccggtggttcaatacggtccgttcgtgatgaatactcaagctgagattgatatgaccattgaagattatcactatggtaagaatggcttcgaaatggccaagtattggaggtcacaatgagaaagaactaataatcaccactactttattatttccggttcttttctttctatttttaattctgtgttctaattggataaataaaatgaaaataaaaatgtttttttttttggtatcttttgctaaatttgtgggtgggaacccattaaatccgaggctgactatttttcaagttccaaacattgtcatcattattaaggaagtcttccactattttagtttaaattacaaattgttcatactataatattaacatatgaagaaagcataagacactttatacgattcttagaatatctcaatgtgattatgtgaataagacagacaaaacaattgttaaataataaataccaaacgcgtattaacataatgaagtgacattaacatgattgttactttaaacatcttatattaaatttgatagcgtagtgaggtttatgcattttaaacgtatttgttactattaataagtataattatgttatcatttacagaccattttataactaagattaaaacgtattcgaggcagattggaatttatctcaaataactatgtgaactcttttatctataggttatacaattaaataacatcaattacaatttctgttattttggttcgacattatgatttaactatagtggccgcaatgaatatactgacaacattgcttcaactgccacatctattcgaaattaataaccaaaactgaaaattgaaataaatattcttatcgttttgtttagataaatttgcgggccatcgaattaaagagcagttggaaaatatcaaaattgatttaacaatcataagtttacaaaagttacaaatgagaacataacttatacactaaccaaactttttctgtatgcgtaacaaagaaactcaaaacatctttctctcttcttcttttactttaactgagaactataagaatatatctctgcctttctataagtttaccaggaacacaattcaacccgaaaccaatcctcaggacaaagagaaaccgttacaaagatgttacctcgaacagcaagagaatgtctttgtcccttcgttctcgttcttaaccaagctaacacgattcacagtcagctcctctttgtaagaatcagagttcaattgctttcgactaatgttgctatagatctcccgaataaccatctcgaaagccgtctttacattggtcgagtccaacgcagaggtctccatgaaaaacaaaccttcagactcagcaagactcttgccttcctcaacactcaccgctcttatgctctcgagatcacatttgttcccaataagcatttttgctactgttgtatcagaatgagctgcaccaaagattcatcattactgtcaaactaactctaaactcaacctatcacaatttcaagctcaatagagtaaagatgcaaacatgaatcaactaatcattgcatatcttcatcattcagtttcatgataatcataaacctaaagaagtagataaatttgacttgactttgaatcaaagtcttaagaagtcatcataaatcttcagatctaaaaattctaaccagcagcatcactatcgctatgattcaatcctaatccaaatccaatctctactctattcaaaatcaaaactcagatttacagatctcacttcaaattgaataaattcactcaaaaatcggagatcgaaacacatactgttgagctcatcgagccagcgaccgacgttttcgaaagtggagctacgagtgatatcgtagacgacgagggctccaacggcgccacggtaataagcagatgtaacggcgcggaagcgttcctgaccggcggtatcccaaatctgagctttgacctctttgccgtcgatgagcatgctctgagtctgaaactcgacgccgatagtggctttggaattgggattgaactcgttacgggcgtagcgagtgaggagattggatttgccgacggcggaatcaccgatgataacaatcttgaagaggtactcttcgcctctctcgtcgtcgtctgacatttctccttcttcttcttctctgtaacgcctttgttggagaaagagagctttgtttggattttattaggttgtttgtgagcgcaattaatgagtattattttgcgcatgaaattaattccatcataattaaccaaaattcatattatgatttatttctattttaatttattaattatgtatttttttataagaatcttttctaaattgatgaaataaacttcttcaaagagtacacattttttttgtgtgtgtgtgtaatttacaacttctaaaataattggtaaccaagtggattttccatatgagttttcaaaagaaaaaataaattggtctgagtacatttatttccttgaaataatgaatttggttcaattaaggttttattttatatacatttgttgaaaacaactatgatcctcctgatgtttttctgagatttttattcacagatcaaaattcaaaacgtaggattatattcacacacacaaacgcgcatctctttcaatctcaaataatgggttttgctctaagctaaaattaaccaactttgaggaaaacaggaaaaaaaaaatcgattgatcgaattttaagttataataaaggtcaagactttcagagagtaacaaaaccagccttcattaatccatcatcactttctttagacctccaaaataactcctttttgctatgtttctttctgtcttagaatttggttcgtaagtgatctccttttcttctatactttattgcatcatacttggaacaatatcattcatcatcgcttcttgcatgccccacaagtacatctctccattcccttttccagtgactgcacatatataagagataattttaaaaaatcatattaatttctccatatgcatacttagcttgaataagacattgagacctagacatgtgaataaacgggacatcagaatctaaccgatcaaacatgacgtagaccaagtgtatgataaatatatagtatataatgtataaccatctattatgcatgattcttaacttagattcttagaagagtctactgttaacgacttaacgtattctattacgaaagtttttaacaaaatttaagatgcatgtatgatcagttttatttcaactgggtgaaaatgatataaatgaacataacgaaaacattttcatgagaccaacgcaaaaacccttttgttaagagatcatgagaatgtaatattttaatttcacgtgcatgacattttgatatgtcatgaaattttctggaagaaaaaaaacacgtccgagtaaatggttgatccatggttatgatcatattggacaataactaaccattatattaatataactattttctaaaatactaaaatttggctttaaggtaacattttcccaacatagaaggaatatgatcaccctttgcttcaatttgagaaaatgtcacttttgcatatatagattcattttgtatctaaggacgcacctctacttggtgctgaagacctttgatatgctcaacagccaaatccaacatatctgcgtagctcgtttgctgccaaatttttcaaacttattatagatatgtaaaaccacaccaacattacattaaaaacagaaataatatcacttaccttgtccatattaggcacaagttcttgtagcttcttcagcttcccgcttatcctcgttcttctctcctatataccacaaacacgcaaaccaaatcatatataaaacctaatttttactcttgttttctttggtttcaaatgaattcaccttttaagtttgtatctagacttatgcaatagtaatcaccataataatagaataaactaaccctttcagcaatgctgcgtgggtgagtcgcgaagccgcgcttggctctagccctacaaggcaccgagtcctctgggatgttcatcaagttctccattgtcgccatttccagagttgtttgcggcatgctatactaaaagtcaaaaccatatatattgagatgaaaatcaatgtataaccactcaatgaatatcataaccaaaccaacatcagtgagaatgtttacacaaaaatcatttggtagcaaagggcttgtgaaaaatatacataaattaatcataacccttctctaagctatttatatctattacacaaccactcaactctggcttctacacacagaaatttggctatttgcactttattggcatttatttcaacttggaattctgttgtggatatggaatttaaattgggcttgtagaattcatattgtatatgacgcgcactatataataacacttgttagcatacaacttgtggaccatacatataattaaacacacaaatcatttaattgccaaggacttgtgaaaagttataaaccttctccaagcagtttatacacatgaacctgtgacatagacattgctgttggcaatatttcaacatggaattctattgctaactttatggaagttaattaaactgatataaaatttcatacgatatgataatatactttcttagtatcaagttgtcaacctattatagatcaatcataaaccttctccaagcctatagaaactaataatacacaaaacaactaacattggggatattcactcttttctccctttacctagaagaatccgagatttattaactttgttgtataaaaaaataatctaaaagtattgatacacatacataaataacctcaaattaaagttatagaaaatacctgagtttctaaggtgaaaaagtcggagttcttggaccgttttccgggttgatcaatggtgaaactgatatgagaagacgagttgtcccaattgttagtacgattatttccaaaactcatactacttgatgcgacaccgtttctagccgctgcagccgcttcaacctccgagattcgcggtagagaattatgttcttgatggctactactcccactagagaatctcagctccgacttcaacctcgacggcccttgctctcctcctccgccgtagcctccgtttggccgtcctagagaaaaacctgttccttcttccatcaacaaatttagattgaaagagaaagaaagaatgtaatgtaggtttataacttgttatctcagtattttaataaccagtttgattttaaaaatctttagtacaaaataagaagagaatgggtcgtcttcgaaactcgaggaccccttcctttgtctctagtctctctacttatatatattttaattatcgccaatttggtagagaataaggattcctgaaaaagaatcttagaaatattcaccattcgaattccaattactatcatatactatacaaagtagtatgtatataataatgcaagagggggtaaaatttcttggggctcgcacatggattacagggaatgtgaaccggacatatgcaatgaaccgaagatcaaattgcacaaaaataatataaattattacttgcaactaacactatagtaataaagcttattatatataatgacaagtaggcgtatccaaaaatcaaaatagtgaccatgatcaagccatgtcagcaggggtaggccatcatggctgctttgtcagaagaaaaagagcaagtgggatggatatattatttccaagtggactatacttttatttctttttgtaacgattcgttttttaacatatacttttggcaagtgtgtgttttatattgcattattaaaataaacaacttgccactattggaaatacgtatttgattattcatgcatgtatatatacgtgtgtacacatgtatacatatgactaagatcaaccatggttaatctcttcagacataagctgaaagagaaaggtgtgtataagatctagagatagattaagtattgactaaagcaaatagatatattttgagaactacatgtgtattaggttttcaattacgtggttgatacttattggtctttaattaaaacaaaacaaaagtcgtatggagggaaaccaaacaaattccaacctatagacaaattacttaagtcatcgaaacaaaaccaagactacatggtttagattacagtaagtcaaaacttacgtgctacaccaatttacttgccgactttatcgatgtaaaataacatattcattttttaaaatgttttcgaatactaatatggaattttaattttgtttttttttctataccaaatttgtctaacttataggaaacatatatttattaaatgttgtaacaaattttttaatgtgcaaaaaaagttgaacacttaaaaaaaaaattcttgatatgtgtataattgtataatatgtaaattatgtcgactagattcagcactaattaaatccaattaattaggaggagaactctttggtggggtgaaaaaaaagttggaaaaataaagaaacgaaaaagttaccgttgggatcagtgggaagatgttggtcgtagaatccagccggagagcttctgtgtcggaacaaagaagacgaagaagaagcgttggaatcgaatccgatggaagatggctcgcccggtaaataatggccgacgaggttgggattctgctgatgctgctgctgccgctgcggtggcggatgatggtgggtttgagggccaagagaggagaaatcacgggtagctccagcggctgagtcatattgattggtgtcggcatcgccgccgccgtcatgagcggtggacttagaggaattaggagggtacatgaaaccggaaaagaaaaaccctacaaaagctaatctgatgcttaggaaaaaatcttgaggagagggtttgagagaaagagactttgagtagttattaattaatactatatgataatgcaagagggttactaattatagttaggactgttaaattaaattaattaaactaagggtgacaaattagagcgatggcttgtccttgtgccttgtgggtgcttgaccaagagagagtctcctactcacggtcccgtcaacgcacgtgcacctcacgtggttgacagatggtggcttgacgttatttgcgaatttttcttataacttagcatcatttttcttataagatatttcgttttattaggttaatcttaattctatcaaaaattcaattttaaatggagttattattatgtatgacggtatcgatataatgattccgggcatattcattgataaactttacagcctaaaatgccaattttatattctcataagagagaagcaaatatcaaaatgatgatggactgtacaaatgttagtgaatacatttacagagaatcgaagccttcattattttttgggtgatgaaattaacatggatattagtttagttatcgtcaagtgggtcattaagattccattttgtattaatatgggaatcaaattgttatttaactttgtactttattatggatacttatagtttattctgattttaaaagtctatttcattgttcatgttttcgaccacccatatgatccaagagaaaggcagaccatgacaaaacatccattttacatttatacgtttagttgattttataataaaaatacacatgcactttttattaaattaaaccatggtgaacgtccattgattaggatatagaccttgtatttgtttttaaacagttgatttagattccacatttatgtttaagatgggcaaagatcccatttgttccatgatgaggatctttatgtgactttgttgctgattactatatgtctatatctatactattgtttcatcatttctagggttatgttgaggagtatgaacatattactttaacgttttaaattttgctaacggatcacgtaagtctgttgcgacaagacattacaagcaagacatgtaagtatattattcttacttttaggttgtagaatttctacttcatacagaaatatttaactagttcttttgattgtaggatggagttcttctttttgggcggaaacaaatagatatcgtaactccactgcaatatttgatttcaatcttcaccgcatctatctctccgtcaactcctcgtctttctccttccatcgttttcatcaaatctaaagaatcaaaaattgggtacttgatttcttttacttgggccatcgactaaacttttatttgggcttttatgcctgtattgggctatttagccgatcaggccttaaaagcttgtaacatatattttcttatcctttttcaatagaataacggttatatatatatataaaaaaaaaaagagtacagagttggcccatttgaatcaatatggactatctattttgatttttcaggtccatgttcaaatatcttttacccatgtgtttttttacctgtgaaatttgctattattattatcaatttaaatgaaacagagaagacaacaaattatatctttttttgccggccaacaaatttttatctagagactagagaggcgagttagttgccgatcaatctatttatttctatctttctcaattttagaaaattcggttggtcatgtaatacgattttctgtctctttttggcgaaagctgcaaaagaaagtgtgtcaagaataacatacttacatgtcttgcttgtatacatgtaagtatattattcttacaaaagacatgtaagtatacaagaataaacattctctagtatataaaagaataaccaaactaaccggattgaaaattttagataaactttgtctcttccttgtataaattggttttaacctttcttagcaaaaaaataaattggttaacctaactatattttattattttcttgatttttagttgtttatgtagagtgtgtatatgcaacaactaactaattaagagatatcattggttatttgatcgaatcactttcacttcatgacagctaggtggttccaagtacgaaattccaaatgtggatgtgtgctcagcgattttcttacgtatacacagttattgattttttttgcgttgtgtaaatataggtatttaatgactataaatttttgtatggtatatgcttgaaaaaaaatttaataaaggatttttaatatgttttcaagaccaaaaattagtgatgatgcgatgagtggaaattgactcgttacattaattttggtttcggttttagtatttcagtgcagttttgattagaaaaatgctctggtcatggcaactaaaggttgtctaactttcaacggggttaacaaccctacatgaatcagaccgatcatgattttcttaaaacagtttatgactcagttaaaatcatacaaaatttcaaatttaccaaccaccaatattaaacttcttaacaacaaaaaaaaacctattatgtattctcaagttctatgcttaaaaatcttgctattttaaaaaataatagacgataaaaatgtgagaaatagttagaatatactgtattaaaaccacaataaaagtgaagttaatagctcacataaattaaatgtcgttgatttactttttttcagtcaaattccaagatatatcttaaagtatttacataaagtaagaaatatgcaatattttgttcttatagatacataagactaagaaagctacaaccactaatattattaaaatcgcttgtaaatgagatttgggaagtattttacttagtcataattaataaagcttctataacattgcactagaagtctataaagataattaactttagccctagaaaggaagcctctaatctctttttcacgccattttcgggcatagccaccaccaaggagatattggtactcttgtaattaataagaattctaacatctttacactatatacaaaaaaaatatgtcactgatttttgtttcagttgcctttatttatagttttggcttgcagcagttgatacgaaaattatgatcactacaatatgtggttaatatatagtcattgtgatatgaatagtgcgattgaagttgttttgccaaaattcttattactcaacaaataattaaaatagtaaaagactctagattatatgaaatgtagaagttagaacgttctaaagaattttatataaaaattataggtccctaagttaatttgttttttaaaatcaaaataaaaaaagaggtgtacgacaaatgcaaacgaatctggaaataaattatcttctaagttcacgttttcctcaactttctgacaactgtaagatgctgtatctttttattaattggataataataacctaattaagctctgttaatatgtcattttcctagtttaattttcatcaaattgttttttcgtattagttgacgggtaagctttcaagtaaaacgagactcgtaagcagcaaggagttgtatttttttttttttcttggtttggcaacttctttgcatattttgtcataataatcgaatatgagttaatatactttgctgacacttagacccttttccttatttatcaacgacttggacatcaactatgaagtatgaactatatcaaaatattttgcacggaatatattaataattactaattagtctcttttaggtctaaatttaaatatgaattacgttgatagttgaaacagtaaggattatttttgaaaaatctattacaaactgcttaaaaatatttaataaaatctcttcgttcttttgagacaaaaaatggaatgaaaatccattaaattcaaaacaattcatagaatagtcaactccatgtgataaccttgtgaatttgtttttacagttacagttgtgaacctttagttcttattaatttacagctatatttgtttgtgataaatttacaccagtatatttgaatcatcatcttgtaagtatataaacatattaaagatatacacttagaattcgtatcataatagtatatagtgatgcagaacatatatgcggttgtctcttttagtggacaactcattcgttgttgtgattaatggatgaattattcgtggtaaattttgacaatttaaccacatcaattggttaatctccacaaattgtcggttaactgatcttaatatatttaattgcaaagaatatcatcgagtcgatacctataagagcatcttactaggagcaaattccaagatagagcagcttagtttataataaagtagtgccaccttagcttctatatcattcattcaatagtctatttagaatagtaacaaaaaaatgaagtttttgttaaatatttcgaaagaaaacatataacaaaataaataaaactaaaacaaatagagaccaaaagatgagacatatgaggaaggctaagttagttgttggaggctgctgtccggattacgccgccgtggggtcctttagccaactgttaaaattaccaatgagcgacttttatgctcgtatttttttttattttttttggtttgtgttacttatgcagttatgctagtttcttaaaaataaaataaaaaaatgaaaattttctaatattgttttcactataaaacttctctgataatttgtaggatttaggattaaactgatttttggaattaaaaacctagtaaaaactgaaaatgattttttttgtatttttgtttttttataattgatggctgctgattgcaatggggatgttggcaacaaagtcaagtaaactatggaagtaaccggttgagccggtggcatcacgaatgacttgaccgaaacgtggccatgtgttgctatagttaagcaatgtggaagttactatcaaagtatgtttgagcacaataattccaacattttgttgtttatcggttgtcgagtcatatttgttgctactttcattcataaaataccatttaatttgctaattgtattataaaagtgttgtcaatgaaactctggaggtgtataatttctgatttttttggtctttcttttctatttttcttagtagaaaatataatataaaacgtatttttgtgtggttcattagaagcataatatctgagtttgtacgattttctttaagtttttagaccaatttacattttagtggcacatatctccagtctcagtgctatcttttaatgttttttttcaccttccaaataaaaactttactctaaacaaaatatagtcaactactgttagatgaattctcttccatgtgagtggtagcgtatagtagaaatatgtttgaaattatatggttatactattttgtcgtttcatcgcatttttatatacaaaaataaaaatactatatatacaaaattacaaatttaacccaaattaaatatactactgtatatatcacttaacaaatctcaataactatactgtggtagccaatattattatatacatatagatacataatatctttgtataaaatgtgactaaggtaaaccaacacatcacaaattctcaattatatatattgttatcagttaatccgtccgtacatctataaatgtaaacatcggtcaaatttcaagtttgttatgatattgatttattttattcaagcttagaaagtgtcggtgaaaattatctaacttataagatatacttgttgtctttgttactctctttagaaaattgaaatcgtcttagttgtgttttacaactagtcaaaatagcatgttagttgaattgtaacaaatgatattattaactaatttatctagtggcattttaaacacagtctaatcatttatgcgctgggcattattacgtgtacgtccacgcatatagtttgggatcctttcgcgttgaaacaaaaaaaaatcgcaaatcaatatatcgaccactgttactaattaacggtttataataattaactttatttgaaagtttaattaacaatgttacggtgaggtacttaatttttatttatgtaggatttgtacctagaatattgtcaagtgtcattcgttgatgaaggaagacacgaggcaatttgacagtttccgggtctttttaaataatttataattcgattaattaatggacacaaaataattaagtttccattaaaaagatacataaacgcttcagaaatcgtacagacaaaaaaaaaaaaaacgtacagacgaatatgctttttgtgtacaaattatgtgaatgcatatacgtatgtatgaatatatatatgtgtgtgtggttttcaacaaagccagctacaatatttaaaatctcttgaaggattttatgtatagttaacgaatttttaaattttgtttacgtctcgctaacttttctttaaatacctatactacttgaaagctttaactaatagcatagctagcctaggttcgcaaatgtattctaactaataccaatcctagttttattagatgcaaaatgaaggacttatcttgtagttgtatcatattgtagagagacttatacagtaattctaaacaagaaactcaagctaatcattgcctttgaaaaactatacaaaacactatttgacatatgaataagatagttttaacttttcaaatagaccctgattaacgacaggagaatattaccttacatgtggtgttactttttttttttttttgttaaagaacatgtggtgttacttaaagaaatatttttttgtaaagggcgattcttttgtcgttaaggggggtttcgatcatagttttcgttctcgaagaaatcaacttattgtattcattttccgattgtaatgggttcctttttcttcttcattaaatttaaacttatttaagtaaattttaaataatatgaacgagagtcatatagtttaatgatttttgattatatagtttgtcgcaatatgattatccgtaatatttccgacatgatgtatattgctgactaaaaatttataaaataaaatctgatttcttataaacttgttcaatttcgttttatatcttcttcatttttaatcaaatatttttattttttaattattatgtgattttccgtttcagttttataaattcttatattgaaagaaattttttaacaaaggaagatttgggtatatatatatgtaaagaatttgcaactagtgttttatacacatcgacatataaatgatgtatacaaaatacttagggttgttacaagaaattctagataaacattaccaaacccaaaagatacttttaattcagtactgccctttagagttctttcatggcacgccattgactaatgactagggaatcctataacaatttaaagtattagttggtcctatttactaatgaatattattaaaaggtatagggtaaactaattctctgtaaaattcaagaaatcacaaacacatatgtgttgataattaataatactatcttggataagaaatttccacattaatattcatatttcgatgagagatatcctacaacatttgagagtttggctctctagctatggggtatctaatttataattgttttttttacaaattatagatgtttaaagtaatttaataactaatattattttctgggtaccaaattccaactttattttttcgctgatgtgaccgtaaacttaccaacgacgactatggtacttatgaaacttttaacacaatagatattacttataaagtttttgcttatatactattttacatggacattaattgactgatacatgtgaccaatctaagtgcagaggatttaaacactttatcattagaaaatgataatattattttggtttaggttaaattaggggaatccttggtgtatcacaatttatttgttggaaaagtgtttattcgcacatgtgctttcttgctaattcttttcaagttctagccaccctttaactttaataattgatattgctaaattctaaaaatatcataacaatgcagacactttaaaaattaaaggaaactaatttgtgaaatttctttttcttttcacgtgtttacaaaaatctcatcccaaatattgatcaaatatgcaacttgtataaaacaagaattatttgaactaactatatgagctcaaactaattgaccagtctatatatgacctcttttcttgttttaaaaattccagcatgtatatgatttttgtaaggagaagtatatgattattgatgggcactcaaaatctgaggaagtttgagatacacaagtggtgggagcgaaaataaactgaagtacaatttttctgcaccttctttgggaaacatagataattatacttgttttttattttgaaatagttatactttttgacgacataaattattctttgcatgatttaaaatttcaacctacatttatgcttgcaatttcgtaattacttccgcctttattgctcatctttaattctgccttttcttgtccttatagacataaacatttgtgtgtttgtgtgtgacagcagtatttccctatctgaaaaacaagaatattttgatttattagtagtttgaattatgaattgcaattaagttatgattaggtagtgataattatttctcatggggtagtccttttcttcaaatctcttgtggcgatggttcgtgtattaaatcgtcatgtgccataataccattaacctagctgtaataatttaatgtaccgttaaaaaggttacagttgctctgtctatatgttattactcttagccccgtattagctctcaaagcgtacgaccacgcaaaagcctgcaatgccactaattaagtttcattccacatgccatatatcttcttttgtcacgattatatttcccataattgagatttcacatgcactctatagttttatgtcgtcatgatatacatacattgggaaattatacgaccaatacgagtaaacgaaataaaaaatgaatggtcaattatatgacacaattcaaattctaaacggaactaaattttagcctctatggttatgtatactattattacagtcgataagtgtgaagcgagtcgacgcggtatatcatacaccgatcgagccacaacacgcgacctctcattatattaaaatcacatttttatgccacaaatcaaagtcgttgttgttaatttggtttaattgaactttgtattataactcggtttagtcttcaaatacagctgtcttcctattgatcgctttgttatcttatgtcagccattttaagacatttgactttactctcataatcatccttttctgtacatttatttgattcttacggttctaattacctttctatatatatgatatgtttttgtcaaaagcatcaagtgtttttgtagtttatatttgtagtttctaagtttatgactttggaaaaattaggaacgttctggcaccacattgtaatatgcatgatcggaaattttgtggtcctcttgccataattttcgcgcaccaacaagtgtttttatagatttcgtgtaatcgtttatttttgaaatattttatagctttctgttgactgtatatttgtgatttatacgcaattctttaacatatacagaaacagaatgtcggtaaataaaaaagaaattatataatcgaaaatgattgtggtagatgtcatcgtgattaacatagcttaactagcatcgaatagcagcatgtaatttaaaaatgtttcattgaaatatatgtgtgattttcaatcagaattagtttggctttatttcaatctggtggttggagattagttttctcacacagtggaaatttcctgatctattatcttgtttattataaaactaagaaaaccaataattgccagctaatagcaaaattaaaaaaaaactataggaaaaaaataacgaagatatagaattagtccctaaagaacaaagcccacctccaacgactacttttttcactataaaaacaactcttttccatgcagaaacacaatcaatcacttcttcttcatctttcctcaaaaataaaaacattttctccaatttgttcttctttaataatttggagaaaaaaagtcttagctaagactgaacattatccggtgaagaatggcgactccggcatggagtcatgccaaggctcaatgggtagtcgccatgttggcgttactcgttggctcggctatggctaccgaaccttattactatagctctcctccaccaccgtatgagtataaatctccacctcctccggttaaatctcctccaccgccttatgaatataaatcaccaccacctccggttaagtctcctccaccaccgtattactatcattcaccgccgccgccagtgaaatcccctccccctccttatgtttacagctctcctcctcctccggtgaagtcccctcctcccccatactactaccattcaccgcctcctccggtgaagtctcctcctcctccatactactaccattcaccacctcctccggtgaaatccccaccaccaccatattactaccattcaccacctcctccggtgaaatccccaccaccaccatactactaccattcacctcctcctcctgtgaaatctcctcctcctccatattattaccactccccacctcctccggtgaaatccccaccaccaccatacctttacagctctccaccaccaccggtaaaatctcccccacctcctgtctacatctacgcttctcccccacctcccacacattactaggctcatcaaattcaacaaaatttccccattattcaagtaagtcctatacttatacctttacctcataatccgttttaataattgtgccctaaataaaatcggaatttcttctttcacaggttttcttttaaaaaatgaaataaaggaagggtcaaagtcaaagagaagaagaagtgaaccaaataaggatcgtggcgtggaaatcagaaacaaaacatctctaacaacgatccacatcacttcctcttcttcaatgtcgctcatcttccacttgtgcatcattatctttgcgtcttcgtcaagtcaaattgtttccaagacccttttagatcgtatcatactcctctttgttcccttttgttgttaagtgaaaaaatgggttttggtaatttaattgttgtgcatacattttctattttgttattcttccgttaatgtaatgaaagagttgttagcatataaaacaaagttcagtttcttctttctttggattatgcgatatacagtcataacattttctatcttaaaacatagttccaacgacaaaagtagttccaatgacaaagttaaaagacatattcttttaggttgggcacgacattgtttcgatctgttcgtccagagaaagttatcattgcttcaaaaggtgggaaagtggaagtaacacatcactttgatctcattggatcattaataattgtgtttatgtaatacgtcagagactcactttcattcaactaatttccacctactctttttgtttcaaccttaaaaaaaaaaaatattgagcaatactatatgcttaatacaaaaccattgactaaaattaaagaatgttgaaatgaattaatatcaaagttatagtttatattcttctatttaatcgaaacatggaaccaaacaaaagcaaatgaaaagcagcaagtgctgaagaattggttcgaaataagtggagtggttgtactttgggctttgggatagcattagctgattttgaggcccattggctaaacgtatttggtaatttgcctccaatttttttgtcaccgtcattttgtttgttgtttggcaacgacaccttccaaactttatcgttatgcttaagttgattttgataaattaatttgataatgatgaagtgaaattcaatgaagctaataaacacaattttgataaattaatttgatttcaacagtactgaaatatatagtattaggtctagtagcttccaactccactagacataaagcaattttgtcccaacaaaagttttggaataaagcatattgtatcttctcatttccaaactgtatatgagaatagaaactttataaaactggttagaccaaagtaataattatgttgttctcaattaaacagctgtgatttttcaaatccaaacattatattgatttggagcgccttaataatattctccgtgtttagttgcgctgtcttatttgtattattctttttttttttcactatttcatttttatttatttattttatctgttgaattttctcttctggctgctgttttcctctctctctctctctaaactcgagaatttttgtagagagaggaggcaaagtgcgaaagctaaacgcagatccacgatcaatctcctccaccttcaaaagccttcaaaagtgtttcttcttcgtcttcttccttttattatctgtgccttgacagatccacgatccgattctggtcaaattttacatttctgcaggtacgatcttagctctttttgttctttcatgttcattattctttttctggatctattgtttccatttttaaatttccggttgatttttttatcttgttcgatgtgattctattttgtggagggatgttattagctttaagatctgtgtgagctgcgtttttgaatgtgaatcttcctttttattcgattttgattgttaccgtttgaatttttagtctgcttaggagtcggattttgttgattttgacttcttctttatatcctttaattgttgcaaaattcggaaattttgttacgagctggggattttttccacttccttgagattgttttagggtgaatctgaacaaagacaaattcgatcattgctgattgctttgttgccgttcctcaattccatgtatctggctcttacgattgtgtaattgaaatgagattatgatgaagaatgattcgtttgtttctttttgttctatctatacatttgtggtgatatatatatatatctttgtttgaaacgttaatagataagctgctcatactagttatacaacagactccatagaaggtgacatttgtttaagatactcttgttcctggaacacatacgaagatgaagaaagtcttcggacaaactgttagagacctgtaagtattttcgtacccgaaatttaatgatattctcaatctgtgtgtggtttatttcttttttcattgacgggatgcttcattttatgttccatttattcagtaagagagaggtcaacaagaaagtgctcaaagttcctggagtagaacagaaggtaatggatgctcttagcttcttctctctttttcttcttatcagaaattcttccgcagcagagatttagatactgttttccatttttatgcttgagtttatcaatttctttatttgtttctaaaaggcttttataaatagagagcttatcttggttgcattcatcgtcttgctaaacaatgtaaagcgagatatccaactttctcttatcttgttttgtctgtgctttctcttattcaggttctagatgctactagtaatgagccatggggtccacatggatcacttcttgctgatcttgcgcaagcttccagaaattagtaactacgaccaccttccaacttgctatattttgctgcgattttggacattgcacaggaattataaaaacatgttacttctatttcagtcatgaatatcagctgatcatggtggtcatatggaaacgccttagcgacaccggaaaaaactggcggcatgtctataaggtaaacaatattattgtcttgctggcttaatttgtgttgaatttctgtagcagtgactaaagtatttcatgctgtttacctcttctctctccccttcaggctttgacagttttggagtacatggtaggccatggatcagaacgtgttatagacgagattagagaacgtgcatatcaaatttcggtaatgactaccttgagtacattattttggaagtattcaacatcaagagaatcctttagtgctatatctcagtagttgactatcttacttgtatatatgtctattttccttgtggcagacattgtccgattttcagtatattgattccggtggtagagatcaaggaagcaatgttaggaagaaatcacagagcctggtggctttggtgaatgacaaggaaagaatagctgaagtcagacagaaggctgctgctaatagagataagtaagtttgcttgtcattgtatctttctggaactggtggatagttttctctctgtgtgagtctcggtggacactcgtttgatttcttgttgctagtggcttacaattgttattatgcttctcggtagtctattaattggtagtactggcactttaactgtattagcttctgaattttgaaagtttttatctcgagaaaaaaaaatgacatgtcttttggttcattcaaaatatgctgaacatatcaacctacattattttacaacaggtatcgcagctcagcaccaggtgggatgtataagccttcaggcggatatggggataaatatgattacggaagccgggatgaagagcgaagtagttatggaagagaaagagaatatggttacagagatgatgatagaaatagtcgtgatggagatcgtcattccagggactctgaagaccggtatgggagagatggtaatagggatgatgattacaggggaaggagcagaagtgttgataactatgggtcacgaggtaggagttcggaaagagagcgggaggatgatggccattcttcatcacggtatgttaaatttcaagtcgcctaaatcctgaaataaaaaaggaaggggaaaattttgaagattatcaactccatttggatagaatatttttattttgaatactagcgtagatgtccttgattttaaaaatcatttcgaaccgcaatcttcttagtctagttccattttcaaattttaaatggatacactcctttttgtcctgtaggggcagtggtgctcgagctgatgataattctcaggatgggaggtaatttctgataaatttctactgaagtttaggcattcttttattgtatgacaactcatctcaccttctttcgggattataatggtagaggggggctccagaggaagttttctgaacaaaatattggcgctccacccagttatgaagaagctgtcagtgattcacgcagccctgtatatagtgaaaggtgatcattttctgctttgaaaattgaaagctaccttggtttttattggtgctgatgaatctttctatgccagggatggtggggagaccccacaagttaccgctccaggagctgcttctcctcctcccccacaagttgctgctccagaggctgcttctcctccaactggaaccaacacagccaatacaactgctacttttgttaatgaatcaccttctcagaaagttgagactttcgatgaatttgatccacgcagtgcgttttcaggtacagaatactcaaactcttgcaattctttagttgtatcttgagatattttcttagtttttcaaactcctcggcagcatagagattacatgaaaatctttaatcaataactataactaattcagtaaatgtttcaaggcttagttggagggtgtatgattgtattctcatgtctgtatggtatatttctatcccattaaactctgcttgttctgagtgtggccgttgtgttcctttacttttccagctggccctccagcatatgcatctacagatggtgttacagctcctccaactgtgacttctatgtctgcccctaccacctcaaacagtgttgagatggacttgcttggttcccttgcagacgtattttcatcaaacgcattggccattgtaccagctgattctatctatgttgaaaccaatggacaagcaaacgctggtccagctccatcgttttctacatctcagccatcaactcaggtatatacactgagcttggagtatgaagattatgatggtttcctatgattattgatgactgttgtttggattatgcagtcatttgatgacccatttggtgactctcctttcaaggccttcacttctactgacaccgactcaaccccacagcagaattttggagcttctttccagccaccacctccagccttcacttcagaggtctcacatcctgatactgctcataactttggctttggggactcattttccgccgttgccaatcctgatcctgcttctcagaatgtgcaacctccatcgaactcaccaggttttcctcaagagcaatttgctacatctcagagtggtattgatatcctcgctggcattctcccaccatctggacctccagtacaatcgggtccctcaataccaacatctcaatttcctcccagtggaaacaacatgtacgagggatttcattctcagccgccggtatctacagctccaaacctgcctggacaaactccatttggacaagctgttcaaccatataacatggttcctcattctcaaaatatgactggagccatgccatttaatagtggaggcttcatgcaccagccgggctcacaaactccttactctaccccaagtggaccagctggtcagttcatggcacaccaaggtcatggaatgccgccatcccatggtccacaacgaactcaatccggacctgttactctgcaagggaacaacaatgtcatgggagacatgttctcgcaagctacgcccaactccttgacgtcatcatcatctcatccagatctcacacctttaacaggagcaattgagattgttcctccgcctcagaaaaagtttgagccaaaatcatcagtctgggcagacacgttgagcagggggcttgttaactttaacatatctggatgtaagatagatttcaccataccatttaaggaaaaaaaaacgtctttagcaaactttctaacattgtttttgtttttctacttatcgcagctaaaacaaatccattggcagacataggagttgacttcgaggcgatcaacaggagagagaaacggctggagaaacaaacaaacacaccagcaacatcgactatcaatatgggtaaagccatgggatcaggcactggcttagggcgttctggtgcaactgctatgagacctccacctaatccaatgacaggctctggcatgcccatgggcggaggaatgggtgttggtagctacggaggtatgaaccagaaccaacccatgggtatgggtatgggggccggaatgaaccaaaaccaaccgatgggtatgggaatgggacccggcatgaacatgaacatgaacatgggaggatatggccaaggctatccgatgcaaccacaaaacccagggatggtacctagcccaaacatgcctggcaataactacaatccgatgatgggtcaaggtggttacaaccctcaacaatcctatggtggtggataccggtaagatcaagccaaacatgatgcacttgacttcattcgtgtaatcaagaatacgctcgcctgtgctttttctttactctgggatatgtaatatcagtcgataaaagtactcaggttacattattcatccaggcaacacggctccacgaattttcttctctgtttgttcttgccttactcgtcactcatcattcatttttatttttttctggtttggaccaaattgagagcttgttgtgaaatttgtaccagtgtgagagtggcaaaccttgctcgggtctgccctttttttgttatatgcatataatttgatatatacacattcacttctatttctttattttgaagatgtgtaatacatttctcattcacggaacaaataaaatctttacatttttgtattctctttttaaatgtttcccggctgtatttactttttcttcactaggtgtgtgtcattctagaaagacttggattctgtcacctgcagtgtctttaaaatctaacaaaattttccctccgacctcatctgctgcatcgtccatcaattgcttcaagttcacgcctcctaaagctgcgaattttttgaggatctgtcaataactatgcctaagaaaactgaaacagaataagagagacttaggagtttttgaatacctggaacaatgtttgtgacaccttccaagaatccggcctgttccaaccataagacaagttttgcatcagctcagataaaacacgaaaaatggccctcgaaagtggacttaccggaattctgacatcgagtttctcaaacccatcgcgtccgatgattttgatcctcaaagatcgtgaccagatccgcgaaaaggggtttcttggttcattataaacctcaggtgttatgacttcaacaatcaggtcctctctctgttctggatcatctttagccacccgttgattacgatagacgctactgctgctcacttcttgaaaaggataaaacatatatttagttattgatttgacatttcccaaagatgttacaactgaaaacttccatgtctcacctctatctgatgacgaggtagcgtaccgcttctcttcttcctcgtaagtgtcaaaaccaagaatctctccaatttcttctaaagacgccatgcttcctggtggaggaattcgcccacccttgattgccaatagagcgtcctgcaagtgttccacatagttcttaagtctctttgccaccacagtgaagtcaacacattattggcagaaacagaaagattgtgacctgcattgcttgaatagatactccaatcaatgaaattggatacgccactagcttatatccaatctcttctagctccagcgggtttagaattggaatttttcctccgctttcaagcatattagcctacacagaccacaaaaatgtatcttcgtatctccagggaatatatcaagatacagaaagagtagtttccggcgcaaagtgaagttaccaatttaggaactagtggatagacattgcagaatgctttcatctcttctctagaaacaagagaatcaacggagagaacatcagctccagcatctgtaaaagctcttgccctaatgagtgattcctccagagatatcgcttcacgggaatcagtttgagctacaattacaatgtccgaatcacactctctacgtgcatcaaccgcagctttaacacgcatcactgcttcctctctagaaaccactcttctctcactcttagtattttcacaacaaacttcatcattgatgataattcctgcaaagccagctttaatatatcctttgacggttctcttaacattcatggcattaccgtatccattgccaccgtctccaatcaccggaattgatacagattgagtaatttgttgaccttgatcaaccatttctccataagaaattagacccttatccggtaaaccaagccgagacgctgaaatcgagaaccctatttgcataaacagattcgagtaagtaatcatagcaaaacatactccttatcagattcagtgaagctaaaaaactgtaaagtcttcaactttatggagaacacaatcaacaacagtagacgatcaaattcacaataaccagatacaaattgtgaagaattggtttagcaaaaattaatcagtgatggatttataaatcattaccagaggtgatacagtaaggaaacccagctcgttcgatgagtttggcactaagagcatcgaagcaacatggaccctgaagaacaccaggggattgcataatattccttagcttcttcgccggagaagatggaagtttcgcgtttcccgattcatcggaaactacggtggagttaacggcgccacgaaatcgtcttgagacagagaaggggttcgcaaataattctccgacggtttgtgtgaaagaagaagaggcagaagaagggaaaaaactcgatttggattgtttatgaagaattcgaggaggagaagagctgcaaaagctaagtgccgccattgaagccttgaaggattcacttctgttcggtaaaagaaagaaacagaaattgatcaaaagaaagaagttggacaaaccgaaacaacaagaaccagaccgaaccagatttaataattaaaaaaaaaaaaaaccatgtcacgtgagcttttttagggttcacgtgatcatctctatcgtcgaaatacaagcggcggacttcaaaatcataacttttttcttcgctcctctcttagcatcgccgtgaatcgttggtctcagtttctccgtccatctttgattcgtcgatccgtaagcatctattcagtttcatgtcttttgttctaaactttttggtttgattggggttttacctttggttaattaaagctttctagattcttagtgtttggattgaattctgtaaggtttggtaaaactataccaggttagttgctatctagctgcaatgggtacagagacggttgtgcatgatcaggcaagatgggcaatggctgcaatggaacgaaggcttgctgttgcaaaagctcagcttcttcaacaacaacaacagaagaatgagaaagataagaaggggacttctgatgtagatgtctctatgaaagaatctcatcaagctgattcactgcctactccctcaaagacatcaattaaaaaaggtttgatggttgagtataaacgaagaatgattctctctagcaactctttattgaactctgattgtcatgggaatttggttttgtagtagatcccaaggatgatgattctgttgcatatacaaagttgtcccatcccgttgatgagaatctgctggcaaccaatgttaaggtatattcagattcttgaggagaacgaagctcggccttcttctgtatgatagataagattgctcaatgtgtgtgtttttttgtgattcagttttctagtgcaaagggaactatagtagacaaggttttgcataaccttcttcgaagcggtgactctgctcaaaagtacttgcaaggtactaaaagtgtgaagctggataactatatccttcttgataattttgtacagtcacggtcttcggcctctggttctaaaaaggcatcacagaaggattcaaaacgttctaaaagccgtatgtctatgaagcgactcaagaaatctggtgctttgcatatccctaaagatctccaaaagtgagttctttatattttttttttttttttttgctgtcatatagattgaactggctcagcctatgcatctgagtctattattttggtattcttaataaagtttaagtgattacttgttcacttgtgtttgagtgcaggtttgatttgtttaagccaatgcatggtatgtgggaaagttacatgatgaaactcatcaaggtgaccgggtaagctacttatctgattaccgaaatactgattcaaactatgtgctttctataaggacgaaactgatgggagtaatctagtatacacaatcattttaagcttggtcatcattcttagacaatttactttttgcaggaagattcaattatctttaactcttctctcagcagatcttcatggtgctttcatgtttggtaatccttcattctttcacaaatctgtagtactaggatatgatcttttgtctctcactcactttccaaaacttaacttctctgtacgcttaaacaaaccttaaaactagtccttttttttcatattgtaatttgttccaatcatagcaacctattttacttgtgacagttgctgagtgcaagatagcatcattcactggtgtacaaggcataatggtgcgcgagacatccgaaacatttggaataatcacacgagatgacaaatttcgaggtatcttaaagcttttttcaccaatatatttgccataaatatcttgaatcgttctcttccccagcctcaaggcttaacttagttattgtaaacaatctgatacagttgtaccgaagaagctctctgtcttcatcatccaactcgactgctggaagattactttacatggggacaagtttatttcaagagacaatattgttcaacgttaatgctaaaaatgaagctctagtcgtttttcttagctagtggtagaaagcaaccattgatgaccacagaagcatcctaatctcacaagattttgctttagatctttccttatggacccaacattttaatatatttcttaatcttgaattttgtatgaatcctctgtaaatatactactgtgttattgttaatactaatttttattattagaaaatgagtgcttatatctcagaaatccatctggggccactaataaagacaagtacagttgaagattccaaggtgagtctgacttaactaaagtaataatatttcacatcactgtcctctctctctctctgcagctctaaactgttttgaaacctaattgcagaagaagtccagacaaaaaaaagaggatgaatccatcacaacaacacttaccaaagctatgtcctaagcgcctattcctcttcttcactccattcttattgttctctctctattacatcctcaccactatcaaaaccatcaccatctcttcccaagatcgtcaccatcctccacagcttcatgtaccttccatttcccattactactcccttccagaaacttcagaaaaccgatcgtcaccacctccactactactaccaccaccaccatcatcctcatcatcgttatcttcttactttccactctgtcccaagaacttcaccaactacttgccttgccacgatccatcaacagcacgacagtacagcattgagagacactatcggagagagaggcactgtcctgacatagcccaagagaagttcaggtgtttggtcccaaagcccactggctacaaaacgccttttccatggcctgagagtagaaaatatgcttggtttaggaacgtaccattcaagaggctagctgagttgaaaaagactcagaattgggttagacttgaaggagaccgttttgttttcccaggaggcgggacttctttccccggtggtgtgaaggactatgttgatgtgattctgagtgttttgcctttggcttctgggagtatcaggactgttctcgatattggatgtggagtgagttcagttacatgaatagacaccagaacttgattcatcttgatattttacagcagtattactactttcgattatgatggattccatgtgttttgttggacccaaaatgtcaggtagcgagttttggagcctttttgctgaactataagattttgacaatgtccattgcaccgagggatatacatgaggctcaagttcagttcgcattagaacgtggactccctgctatgctcggtgttttaagcacttataagctgccttacccgtcgaggtcttttgacatggtccattgttctagatgccttgtcaattggacttcctatggtaatgtgtgtatttaaatagacctgtttatatgatttagttcactgtgttttgaactgcttgcttcatccactctgcttctgatactgaaagagagaacattttatccagatgggctttacttgatggaggtggatcgtgttttacgtcctgagggatactgggtgttgtctggaccccctgtagcatcaagggttaaatttaagaaccagaagagagattccaaggagttgcagaaccagatggagaaactaaatgatgtttttagaagactttgttgggagaagattgctgaaagttacccggttgtcatctggagaaagccttctaatcatttgcagtgtaggaaaagactaaaagctcttaagtttcctggattatgctcttctagtgaccctgacgctgcgtggtgacttcactttcccaaaatctaatttgctctgcatcttcaaaagcttaagcttgattcggttggatctttttattaataggtataaagagatggagccgtgcatcactcctcttccagatgttaacgacacaaacaagaccgttctcaaaaactggcctgagagactaaaccatgtgcctcgaatgaaaaccgggtcgatacagggaacaactattgccggcttcaaagctgacacgaacctgtggcaaagaagagttttgtactatgacaccaagtttaagtttctcagcaatggaaaatacagaaacgtcattgatatgaacgcaggattaggtggttttgctgcagctttgatcaaatatccaatgtgggttatgaatgtggttccatttgatcttaaaccgaacacactcggtgttgtgtatgatcgcggtctcattggaacttacatgaactggtaaatcactcaaaacgtctctgatatcatctaatttgacatctcttataccatattttccggtttttgtaggtgtgaagctttatctacataccctcgaacctatgacctgattcatgccaatggtgtattcagtttgtacttggacaagtaagatccgtccctaacttgaaaactttgatttacattcatttggtgatcaaagtgtaatggtttctttttctttgtttcttatgatagatgtgacattgttgatatactcttggagatgcagaggattcttagaccagaaggagcagttataatacgagaccgttttgatgttcttgtcaaagtgaaagccataaccaatcaaatgagatggaatgggacaatgtatccagaagataatagtgttttcgatcatggaacaatactaatcgtagataactcaattaaataaaactctttttggtatcacacactactacaaaaaatttggaaacttttgagagagttgttggtttgggtttaaattggacaattacaaaaattaagaggtgcatttagatattttgaaaactttaatggacctcataaatatttaataacaaacatgtaacgacgttattgtgacggtggcgttaagtcgttaactgcgtctgatctactcgtagcttcttcgttcttcagcatttgatcggagtaggtaaagttgtggatctctttgtttcttgctaattcaaattgattaaggttcctgggtttgatcggctctagctaggggtttatggtactcgttatataattcactgaatttagggttcaagggttctgattgatctgcagtgacctttttgattgacagatggaagctctgtcttctcttacgttcaagggttctcttccagaagccatatttgaagccaaagggaagaagaagctttttgttgtctacatttctggtaaattaatggaattttatttctctcttgttggaattcgaatatgagtgggatagtgttaggagatttgtttctcctgtagtatctcatctgaatacgatttctgatcatacaagaatatggccttttaagaaaaagtttcaacattgaagagagccataatcatattgtgagctcaatctcaaaaaatttaaatttgtttccaaattttaggagaggatgaagagtcggataagttgaacagattgacttggactgatgcatcggtaggtttctcttgtttttatacttttcattctcttcctctattgttgaaaatgcaaacaaggctatttttcactcatatcattatcgtatgtttccttataaaggtggcagattcgttgtcgaagtattgtattttagtgcatatccaagctggaagtgttgacgccacaaacttctctgcaatatgtatcctttctttttatcagagaacttaagatagctgatctagtcgaaagctgtttctatggattttatagagaatgcttcgtttcaacagactttctatagaatctgtcttgtaggcttgtaataagttttaactcacgtgtgaatgcaatagggatctttacatcagtttctagacccatattcatctgttccttgtatagctgccattggattcagtggtacacaagtttggagaaccggtaagaccatatgtactttagattttaagtatttacacgttatagtcaagcaaacgtactcaagtttgttttctatccctttctatctttcagaaggatttatcactgctgaagaccttgcatccagtttagagaaagcgtggttaggacttcatatccaggtacgtgatagctgctttctcacttatggtggtgttcgtccttctatacattttcagttgacttttctcattttcaggaaacaactgcaagtatcttttcagcagcacttgcatcacagaactcagagacacctgtttctagtgcttcgagtgttgtcttgcctcccggaagtgttcctttagatgcagcggttgcatctccatcgacggcttctagtgttcaaccctcagagacaaagtcaacggtaacatctgcatcaacaacagaaaacaatgatggcacagttgcagttaaggttgtccctggagctgaaatcatttccacattactttagtttgttgttttgcttacatgatgcagcctttttttaaaacagggcaaagaatctgctgaacccagtaatttgtgtgatactactaaaaaccagccagcaccctctgttgatggaactaaggccaatgttgaacatgaagcgacagagacccctttgcgtgttcaggcagaaaaggagccaattcgtcctacagccccaggaacaaatgataatacatccagggttcgatcttctgttgatagaaaaaggaaacagggaactgtgataaatgaagaggatagtggtgtaggtgttagtggaagggacattaatctaacaaaatctgtcgatacaaaagagaccatgaagccaaaggatgaaggaggagaggaagaggatggagaaaaatccaaaaaagcatctgacgttcatttaaacattcgattacctgatggtagtagccttcaggagaagttttctgtgacaagtatattgagaatggtcaaggattatgtgaacagtaatcaaacaatcggactgggtgcttatgatcttgcggttccttacccacgtaaggtgtatactgaccaaggtacgtaaaatctacaatgcatccaatagatttttatttttatttggtaaagaacattttaccttaaaaccagcttcatcttgatcgaagatgatgttttctgccatttaggttttttttttttttttttctggtcagtttggactagtgtagtagatacataactccattactcttaatctctgcagatctggataagtctctatccgagttgagattgttcgatagacaagcacttgtagtagttccgcgaaaaagagcaaccgtctatcaaagaggaacatcttactcggagtctaacaacaacacagaccctaatagtggcggttactttgcttatgttagaagagtactgtcttatgcaaacccgttttcatattttggcggtggtactgccaacgcatcaagctctgttccagaacgtcaaacaagtatgcgggaatatgatgagtttataaaatccattctaatgcagaaagtcgtgtaattgctaatctgattctctctttttctatctataggaccaaatacggaggtgagaaacaatctggggcaagtagggacgtcctttcaagatccatcagaaggtaggagcaacgttaggaataggagaccaaccacttctcggattggaagtaacatccatacgttgaatcacaatgaagatgaggctccgtttggtgatggaaacgctttttggaacggaaactccacacagtacggtggtggaagcggtggagacagtaatgatagacgatgaaataagagaagttgaaatctgtgtggatagatacagaaacagctcgggtgtttactttttatacttgactctttatgaaccatttaagagaccagctgcaaaatgtatcctgatgcgtttccgttttttcggttgctcgtattaaatttaaatctaaaaaaactagcaatttctgtttgattaaattcggttctagaaattaattagtgtcgtttgattaacttcggttccaatcataacaaaaatattagagttaaatggttgcttaaatataagaatctgtatattcttttctatgcaagtgaagacttcattgaactgtgaaaaggcgttcactgacagcttcttgttctcctagcggtttcccttgtgctcatcctcacaccttccaaaatattatcaactcggataacaaaacatatatatgtgatcaaccagacaattttttaatatatatttctatagtcaacgatgagtacgcattttaataatccggtgaaagattagtcggactaactaaataatttttttgacatataataaacacttggaccccccaaattgagccttaagaaaagactaaaccagttctattagttgcgtacaactaacgatgatcaacttgagtgatttatatcggagatcgtgggtagtgatacgggtcaacaatataaggatttagagatcaattaggaattgaagttaaaccttttcaattttcttaaagttccctgatccttattcattcatcgtatccacaaccattcttaacattgcccatggctaagacgctggacctcttttggcacgaacatcctttatatgaaaaatatcgtatgttcacttgccaagagtgccataggagtgctatacccttctttgaagttttttatggatgcttcagatgcaatataaaatggcatccctattgcgtgccaaggtcaacgaagaatattaaccacccttgtcacccgaaccatcccctagaggttctcctccaagggccacctagttactctgacgagaagtgcagcctctgtcaacggaaactctccaacttcgtttaccattgtaagttatgcaatttcagcatagatatggaatgcggaaacaggcccccgccccacaaagtggatcatccaaagtgccacgagcatgcactcaccctcatgggaagggaagtatccttcacttgcaatgcttgtggtacgcatggtgaacggaacccttatgtatgcctaccatgctctgtcatgtttcattatgattgtattgatctaccacacgtcatcaacatcaatcgtcatgatcatcgcatttcacattcatatcctctcaaacgtgggaattgggtatgtgaaatctgtcgtcaagatatcaacaccacgtacggaggctattcatgcaacaaatgtccagatttttttgttcattcaaaatgtgcaactagaaaagacgtgtgggatgggaccgaactcgaagggatacctgaggaagtagtagacgttgcgccatttgaagtgatcgaggaaggggtaatttatcatttctcccacgagaaacataacttattccttattgaggatgtttttatagatggtgctgaagacatgcattgtgaagcttgcgcccgtccagtctcttctgagaagcactacaagtgcgtggaatgcaagtttattcttcacgaagagtgtgcgaatcttcctcttacgaaacgacatggactttccacaggtatattttatcttcgcttcgggaaggattttagcgaacaaaatttcagttgtgatgcttgcaatagagatggaaggggttttagctacaaggatgaagagggtgtggtactcgatgtgttgtgtgcgtctctctctttcttcaagcaccccaaacttcatcctcacacgttatttctaaccacaatagatcgtggtacttgcttagcttgcggtgagaataaactcaatgtgctgcgttgtgttgattgtgattattctttggattacaaatgcgccactctaccattagtcataaagcataggtgtgatacacattatttagttttgcgctctggggaggaggcgcctgaaggtaaatattggtgtgaaatctgtgaagccgaaaccaatcctgaaagatggttctatacatgcgatgattgtggggtcgtgtgccatattgaatgcgtaaccggggactttttgaacataaaacctggaataataatgaagaacagggagaataagtttgaagtgggtttcaacgatcacgattctagaccaaaatgcactgattgtggctctcgttgtaggttccctaggtttttcaaggttactagaaaaaatattgagtactactattgctcaaaagcttgttttcagaatgcgaaattctgaatgcctgaaggaaggcgaaaggaaggatttggaaacataaaaagaatatgggtttttacagatggaggctgtgtaatgtttttcaattattttcagataaacttgttttctatatttggatttattgttggtttgctcattcagttcataaaactatttatgagaaagagagaaagagagagagagagactttgaaggtaattattcttcacaccttttattataattcaccaaaattgggatgtttgttctattcttgatcacacgcctctctgtcgcttccttttgacgttttctttcttttcttagctttttcttttatcttttgtgttttctgtcttttcttttccgtagttatttgggattccaaatttttttcattcctaaatttctccacgagctcatcacctcctttcgtctctgcctctcatttgtctacaaacattttttccttttgattcgtctctctggtttattgctcgttgatcgtttgtttctaaattgcattctgatttctgatggatcgtgattttcatcgtcgtggtcaagtggtaagcattacacgcaaacacagctttgatcattaaaaatgtcatcttatttaaatcatgtcttgagatcacgtaatggtcttaggtcaatcaagatcaacgcgcaacaaattctaatgtttttacaaaatttgaaaatacttatctacaaatgtatttataaagaaacctaatttgcctttgtgttgatcatgatagacaattgttgttattagcctgttgatttgaaggcagagtcctctgttttcctgcaacatgttagaacagctcatttatgtgttttggtgaaaacgcaggcgaatgatcgtacacaaagcaactttgttcgattggataaaccgagagctgtagacgatcttgatataggcaagagagggaagatgcgtaggtggttgtgctgttcttgtcgtgtacaagaatcttacccatcagctgaaaataaccgattgaaaacccctcctactcgccattacgactatggtatcgctctttcttcaccttacttgtgattgaagtaacctatcaaattttattcttggcctcttttagttgcattccaaatgtgcttttggtccattcctaacctttcaatatcttttgcttgtgtaggacgtaacaacaagaaaacaccagctcctgtgaagcctcctgttttgaaggagcctccgcctattgatgtccccgcaatgtcattggttgagctcaaagaaaagactcagaattttggatcaaaggcattgattggagaaggatcctatggaagagtgtactacgcaaactttaatgatgggaaggccgtggctgtgaaaaagcttgataatgcatctgaacccgaaacaaatgtcgagttcttgactcaggtctctaaagtttcgaggctgaaaagtgacaattttgttcagcttcttggttattgtgtagaagggaaccttcgtgtccttgcttatgagtttgccacaatgagatcattgcacgacatcttacacggtaagaaagatttctttctgctcaaacatcaatatggcttaggatggagattgataaacttgatgctaaacagggagaaagggagtgcaaggagcacaacctggtccaacacttgagtggatgcaacgagtccgagttgcggttgatgcagctaaaggattagaatacttacacgagaaagttcaacctgcggttatacacagagatattcgatctagcaatgtgcttattttcgaagatttcaaagccaagattgctgactttaatctttccaatcaagctcctgatatggctgctcgtcttcattccactagagttttggggaccttcggttatcatgcaccagagtaaatatgcttcaacattgatagctcggaattttcttgattcttagtaactgaaagaatgtaactttgggtttgcagatatgcgatgacaggacagttgacacagaagagtgatgtttacagttttggagttgtgcttttggaacttcttaccgggagaaaaccggttgatcatactatgcctcgtggtcaacagagtcttgtcacttgggtacttaacttacttaatttgactctttctttctgagactaccaaatcttttcttggttataactttctctgtaaatctaatatccaggctactccaaggctgagtgaagacaaagtgaaacaatgtgttgatccaaaactcaaaggagagtatcctcctaaagcagtggcaaaggtaatgaacagaaacttcctagtcatttaaataactctagtggaccccacttacaagctaaaatgtgtgttttgatggtaaatacagcttgcagcggttgcagcgttgtgtgtgcaatacgaagcagagtttaggccaaacatgagcattgtagtaaaagctcttcaaccgctcttgaggtcagcaacagctgctgctcctccaacacctcaaccttgattcttctttgtggttcttgcttactgattatcatggcttcaaggttttgtcttcactttattctttctatctaccatggaatgtaaatggttattaaggggaggtggtgaggagcaattgggatttcactccatggaaatgatctgtgttaactgctttttgatgggttgattcttatgaaatattctataacttttgtttgttcgtttgaacatataagctgacacttctctttttttaggcaaattcatgggaaaatagcttgaatatacagaaatttataacaccatgattttatagtgttaaagagtgtcacacaaactttggactagagtcactcagacactagactaagaatatttctgagctattcaattactttaaaatcacctgttaagttgagtatgacagtgttttgaatggttgtcctcactagaagttgaaaaatcagcaagcaattcaattaccagtgcaccaaacccagagcctcagctgcgcttctttgactatcttcactgcaacacattccaacaaacgttttcagtagagactgtcgctcttcaagcttcatgagtttctccaaccctcttgcaaccatttccatctcagcctgaggattagtaaacaagagaggcagttttgtgaaaaccatggaagagatttatggagaaaaaaatcttcaacttgtaaagaaacaaaagcacatacagagtactcgttgggaggaaatatgcgatgaatgaggcatattttcgacagctctgccaccgattcagaatgtttaccttgtatttccaaagcctgcagtaacatcgaatttgcttagaataaaaattaggacaaagagtaagcaatactgcagtaaatatacacaagaagaaggctagaaacgcacccaagcttgtagaaaccatgaacgtgtgcgtgctgcaactgctgcagaaaccattctagcagcatctatctttgcaagtccaatgttctcagcgagcccagcaatgaactctcgggcatcttcactacaaatctcaacagaagaagactcccacggagctctacacgagagttaccaaacaagttcagaattataccaaaagccaaaccagtagaatctacttaacaagtaaaggtcaatagatagaaacctgctgcaagcgttcaggacaaaatcaatagatgttctgtaaaaggaatctcctgtattttttggctcaaaagtgacttgtactccagaaattctacatactctacgcagctgtatataatttcatagcaacaaagaaagataaaaatccaattaattcaaatccattcaagataattccacaatctagtggaaagaagaaagtaaacatatactaacttgaataatatcatcatccgtgatgtcttttccgctggttctgttatcaacgatcgctggaaactaaactagtcagttacatttgtaggacataaccatgaacacacaagtaatactaataccattttgtaaaaatgaaatctttcagcttttaagctttctacctgtaaacaaagcaaacaaaaagtcagtctttaagcaaaagcttgcatgaaaacataaatcaaaccaaaatgaggacttttgcatggagtttagaagcaacctcgaacgattctgttggcttccctctgatagtcttctttgtcgaccacatcaaagctctggctagtcaatgaagtcggccaccatttcggcaaattattctgagctttaaggtggagatttctaggcgtagagttacttcgagaagcttgatcagaagctatgaagctcttggaatctcttgaagatgaacgaatgttatcaacagagacgaccacttccttcccaccaagactcctatctctcctaactacaaatttgggattactttggaaattaccctttaaagctgatcctaatttcacaagaaccctaattgcaaaaccaaatacgaatcctagtataaccacaccgccgacgaattgcatagttgattttttgcacgagacaacgactctccggttatcgtcgagtgagattagtgtttgcaagtcggagaacgcgtctttgctggaatcgagaaacaattggaagcggtaattagctagagttgaaatacggtgaacgtctagggttaagctgagactttggtcgtcggctccggagggagaggaagtggagatagaaagaagattgccgtcggtgtggtcgtaggatgagccattagatttccggttccggcgaggacgaggacgacggcgtttaggagtggagaaggataaaactggagctttatagatttgggatttggcggcgaagagtcgtgggaaagaagaagaagatgaagaagaacacgaagtcatgttcattgtgtaatgtttctcacttgtggactgagaatggagttagttgaagagctccggtttggtcaaaccaaccggttaaagggttcggattatgactctctatagcgaatcagtggcttttaagtgacatatatttattttaaaattacatgtaatgtgtagagttgttttgttctatctgaaaaagaatacaggttttaggctttaaagatgtttcttaacgaacttaactgactctttgagagaaggacccaatctcacgaagtttattgcgctgaatccggcgggtacgggtagtataagatcgaaattccctgatctctaaaaataatctttggccaaaagaattcttttgaagctaaatcctgcaacaacaagtacaaatgtaaacatgggacgggaggttccagattatgattgatgagtggaggaagttttgttacttacgctgagaaagtttttatctgggaagaagtggcactctgtcatctgattcaatgcggtgactagcctgcggtaacaaagaaggaagacataacaatgatttcagcttttgagtcgaattttttttacaagaaatggatttcagagaagatgggaatgtgtatgttctttacctcttcagttgctcctgctgccatgttgatgaatgagtctttagccctgaagtatataagagaagaagaaaagaagttaaatggtgtataagaacaaactttgtatataactgtaatacggtttcagataaagaattgaacacacctatggccatcctttgcgtcaactaactctatgtttccgttttgttgttcgtcttttgcttttgaaaggggtgaaaagaactgcacaaatacaaggtagagaaaacaagagatgaatcagaggcagccttatagaggcttgagaaacggtttgtataacattacctgatgcattgaaatgaaaactatagaaattcccagaagaaaattcattgttaatatatgtccaaagagtgctgcagatgctatgccagtaaatattgtggctactgtggacgaatatttcttcaagattgtatctgagaacatatggacacaaaggcaactaaatatcttagaatacaaccttactgaacggtttatattttccaagtatagcaaaattcaaatttaatttattgaaccaccatatccagaactaatccataaattaactgaggtaacaaagttgagtgttatttttacctgcatatttgaagaaaaaggaggatagaatcccttgtgctgcgttgttcagtatcagaaacatagtagccctagaatgtccttgtaggatgtcaaaactgccaggacctgtcgacacagtggcaagattgtgagtactgcgtttaacaggatttaatttaagaagcttttttttgcattctacttaaatatttatcgtattcttctctgccatgttaatataaccatacctttatatataacagttcctagtattccgaggaagttgaatatcgcaccataaccataaagaaataagttctgcacaagggaaattaaagctttacattcagaacccaggagaggatcatggtcctagaatttgactagactaaagaacaagactaatacaacaacattgctaagagagatgactagaccaaagaatagagcaagttcaacaatacgagccaaaagaaatgtatcaaaccacagtgttaacacagccagctaaccataaaactgaaaaaaagagttcaacaaccaagccaagagttctatttttactatagaaactgctactgtgatggtcatgcccattccagcgatgtgcctcacagatactagtactaaagaatcaacagctataaccaacagttacaaacaacggtcagcacaagccttccccaatattattacaaggctctcatttatgggatgctatatggaaaaacaactatgtaccaagattagctaacctggagataaatgcttgtgtcatactgactctttagagcatactcgttgtagacagatgccaaagatgggacagtaacctgcatgatgacgtgctgaataaggctctaacatgaattacaacttttcattgatgcagcaatgggagcacttccatactaaatttctaagagaatcatatataaaagccagaagataaaacttacaaagataaaggtacatatgtatgcacccgtagcaattggaacagccacagttgtagctccttcaggaagagaacgcagctgatttatactaatccctatcagcaacaaagcaagtgcttcccactacaacaaaaaataacatattaaatcccaataagagtaggagataaggatggtcaaatagatacatccataattatatgtatgatactataataatcacacatacaataaccaagaataagtgaagtgacctgtatgatggaaaaccgacgcttcattatcatcttcagtagtacagcaatcaccagaacttttagattgctgagcatcttcacagtagcaggattgaaatatagctggcacagcagaaaagtgaattgctgtgtgaaactaaaataatagaaaaagagatagaagcaaatagaagccaagtaggctagataaatacaacaacagagcttaatgtaactatcttgtgagcaattgttcagtgcaactttcacagcacactcaaacatctatcaccaaaagccagcatgacatattgcagaatgccgatcaggacttgggaaagataacgattatggaaagtagagggaaataacctctacttagaaatgataatgtaataatatactcagggaccagtagtgtcaagaccaagaaatgaaaagtaacaaaacagagtttgtcctcgagaagaagttaaaccaatgatcaacaaatttgatcaaattgagaatatactcgaggagaagcaaatcaaggattcttacaaaacccacttacgaactatgttagacagccacattaggcttccttgcattccaaaactattgctacgttcctatggtgtcaaaacaccaaatgatactttctcgccacaaagctaaaacctttttactatataactcaagacagctaggaaaattttcaatgaaactacatttctgcagcttaattaccaaaggatgcacaaagtgaaaaataagaagcacatgtacctgcattgtgaacttaagatagttattaatggcatacaaccctgctggaacagcgagaagcatattgttccgagctgcctgcgaaataaaggctcaagttactgcaacttgcattatatatagtttaagaaaaaatgaattactcagaagtttcgagtttaataatggggactaatttaagaaaaaatataatactagatgatctaatggtgacataacatctacatttcgaacaatcatgctttgaaaaccagatgtataacatatgccacacccattggacattaagatttcaagaaactaatcttactttgagactatgccacaatcctagtaattctaaattgcctagttgccaagatgatgtacctggacaaacgtggaaagagatagtagaggtttctctccaactttttggtgcctggcctacaaatattaccacaaaaaacttaagtattaaaagggcggccaattttgtatgggaaagcaagacacgcgtggaaaaagcaatcagactttaaaccaagaaactttctctatgcacaaaaaaatgaatatgagatccgtctcattccattactagttaatcaaaactcagcacgccaccataaagatacataaaagaaacggaatatgatattatccctctaaaacaaccttagcaattggtttaagtcacctccacaaacggaatatagtgcagaagaaacatcaccaagtagttttaaatgcaagaatgaaacccaaatggccctcaaacaaaattgatatttcgaaagaactgaagtcaattcagaaacgtacctggaataatagcatgaccatcgcgaaaataactttcgcgatttctgtcaagaagttgacgctaataggactaaagttgaactttccatccactttagacatgtacactaagacgggctgtaaggggataaacgaaaacgtaaacttttaacagaaatttacaaaattggaagaaaaacaacaacctcctacgattgtgaatgattgaacagagagatatgatgcatgattgcatggtagtagtagtattgagatagagatatgatgcgtggtagtagtagtattgaaatggctaatgttctaaccaagccgttgtaagaaaaagttacctgtagaccaactagcatgcagtcaccgactaccaaaaagacattgagagctcgttgttttgaggatactctaatcttgtagttgtagttgtcataagcccttgaaatagctttgctactgggagaaaccaaccttgaacgacatacgctgcactcagccatcccgttcttcatcgacctttcccaagccaaccaattctagactgagctaaacctgaaaaacagcaatcaagcaaaaggaaacaccttctgaacaaaagatatcaactttaaagaggaactcaaacaaaacgcaatcagatctcaatagctacaaaaccgacaattcacagagaaaatgagctaaagcagatctcaaaaccaaataaagaacaagaatgtaaggtaagagcagaatcaagcataactagtagcgtcattgtaaaaatcacatttttatgaacagaaataaaactctgggaaaataaataaggaaccagatcgatcaaaccaacctgaatagacgtataagatcagctcaaaaacgcattcccaataccaaaacctcctcccgcctaaaccgcgtagatccagaaggactgctctcgtctatgtaagatccaaattacagcaattcaaaaggatatagaactctcctcaagcttcacattcagaaactaagcagagagagatgaggaagaagagggtatgaatccgtcggtcgattagagtgcgctcttatgctctcgcacgaccctttgtgttttttttgctttgatttcacaacaccgttttattgcgttacctttggaaataatttaattaaacaaaaaacatcccacaaaaatcaaattttaacaaaaaaaaaaattggatttctgtctgtttctggcgttgacacgtggtgattgctgattgtgacagaccaataagagttgagtatgagtggtgttgaagctttagtgacgctgacgtgtcatgcgggtgatggaaaggattgtatttgtatccaagttttggctttttggtccaatgtttctttcgcttggacttacatttataaaaggaaaaaacaaactttgatttttgtttgtttatgtttttagttaatgactcaatggtggttcgtaacttcgtttaatactatttttttgttaatttagtgtaacgtaaacacgaatattaactgattttgttgttgtaggacttatctaattaaggactataatataatgttaatgcattcgttttatgaactgagagcttcatcattgtgatgttaaaacttgaataagaatatggagtactaaacaagcaaatttaaaatgaaatttttgatataagaagtcttggagtcacttatcatgaattttattctatctttttttttggtactccactttaaactaaattttgaattggtcttgaagtattttagggtttgtctgaatttgaataccgtaacaataaacgaattcacatgatcctagaaatatgtgacatctacggcatatgatctataattcattccttaaaacaagatacacacacaatatgcatgcactttcgtgtagacttgtagttgcacacaaaacattatcgaacacataaacacaacgaatgttttcacacttcacactttataaatgattcttataaagttgtaatgaagtttcattttcgttactttaaaagaagattcaccagtgttacaatcagttttcagttcggtcataaaaaattttttgttcaatcacaacatcatttacttgtgaattatccccggatttattaccaaagcaaaaccgtatttagaatgaaattctgtataaactaaaactgatttcgaaccaaaacaaaatttacttgtgacaccaaattataacttcaaatttaatatattgatacattgtttacattattaagattaattactgtacagtgattattatatccatataaactttgctaattttattcaaagttgaaccaaaattaataactttcagattctaatacaaaaccgactaaataaagaaaatgaagataaccaacttgaaccaaaccgaataactactaaccggaatctcaatatagactgtgtgttgtgtgcgaattcgtcgtctgtgtttcatcgaccaaaaaggacacagagaagaattgaagaatccattactgggttcgaaccatcgaatttgatactaatcggaaccctaatctcgaaatcagtgtatgtccttcctccgtctgctgtgattctcaatttcccggttggtttttttaaattctctctccatcggcctttgttgattcatctgtgtgctcgttttgatcttcaaaattcgattataagtagatacgaaattgcctgcatgattcagtagacgaattgctttatctatgcccagctcgattgaattcaatctaagtgttttctcggattcgtttggtttgccttggagggcttggtttactgaggttgaaagtctctgtctttggagtcgaattcgataatggtggcatttttttttgcgaatagtcttcaaaatatatggcccttttcgatttttcaaaacagtgacttgaaggaatcaaaggagcttgttcatagactttcgttaccagagagtacaaagaactttgtgtttgctattagagttcctgagcatgattcaactatttacatacttgctgctcagaatttatcagagagatctgctagtgatgctgagtgtcttatacgagaaattcgtcctggtgcggtagttgctcaagtggacaaatcagcttttggggaagctcaagttgaagagagtgtattaggaaatgggattagtgattcaatccctacatcagcttttaaagttcttatacagtgttttgtagacaaggttaacaaagaaaagtatgaaagtattgcagggattgtggttttaagggagattttcgggacaagttttaatggtcatttattggctgccaaaagggtggctggggaggttggttcgtcgtttatggttctggaatctccttttgttgatattgctgccgtggaagatgcaggaggcaagatgcaaagtctagctaatagtctcgtaccacaacttaatggctctgctatattttcaagctcgcgaaggtttctgataactaatgatgtccaggcacggatgctgaagttgatatctttgcagatgaatcaggtcaataaaaaacttagcccatcaagcagtgttgcaagtggaatttccagtgagatacagtcctgtagtcatgaagttcctccatttgctcaaaccatttatcccttgcttgttgaccttcatgatatattcagtgatctcccatctattgggaaagctctagccaatgccagaagaatgttgtctgatgttaatagaggggagtctatggatacagaggttatttctgaagtttaccttttccagattgcagttgaaggtctaagaattgctttgaacaatgctggtcgcctaccaatcaagaacatgggaagttcaagccgaaccgaagttcagttttcacagctctcttctgaagacaaatcttacgcacttatggcagatcttcttcgtaaccaggctaaaaagttcaagaacattgtagcaatagtagatgcatgtagcctcgcaggtcttaggaagcactggaaaacttgtgttcctcaagaagtcaaagatatgtctgagtatatgctacaagattttgataacgacgagaagactaatgattcaaagttgaaacgactgttatctgataaaccggtggtagcagttggtgctggtgcaactgctatctggggggcttcttcactatccaaggccatttctgcttctcctttcttcaagattgtaactttcaaagtcccgggatcattgaacctctttttgacacatacccataaggcagtgacatttgcatttaccaaagtggcggttccgtctaaagcaatggcccccggttttgctagttctggagccaaatcaacatctttggtaaaagcatctttatccgccgagaaaatcagagcagtaacacatagcattatagcttctgtagaaaagacaagtttatctgccatgagaactgcattctatgagatcatgaggaaaagacgagcaaaacctatcggtaccttaccattggtgacatttggagccagccttgcaacttgtgcgggattgttcgcctatggagatgggatcgaatgtgcagctatgtctcttccttcagctccttcgattgcaaacttgggtagagggattcaaaacttacatgaggcgtctctggaagtgagaatgagagaaggcaacaggatacagaacgccatcgagtcccttagacaaagactgaagaaagtaaagttttaacgaagaatagggtatatttttatactttcacttaaatctttgttttagcttactgtatatatacatactctctacatgtttcgtgttcagctaatggtttggtttgcacatgatctctagatggtcacagaaaatagaagctggtttcattaggagagatccaatggaaatagtgtattactcatttcctctttaagataaggaagaagcatcaataaaatcgattgattagtaaaacaacttcattttgcatcaaaccaaactaagagaatacaacacttcaccaaaattgaaattttctgttctaacataaaacttcattttagatattgaattagctatgctcgagtacatcagatgatactagctagcctcgagcctttaattatggcatcctctctccaacgcagcagatttgatgatattaagcgattctaccatatcatcacatagtcgatgaggatctggattcacagttgcatcgacagctaaactgatgataatcttgttcacgtagctcacgatatggatattgaataccttgttcagcaaaagaaaacaacaaacataaatatctatgctttatacttgtgatataagacgtttttcatatgctatatacttacttgtgatcctgttaatgcacttgctgcgacatacgatattggatggtcaaaaatacttatatcttcgtttggacccatcacacttgaatatgtcaatgttgtatgatcatataacctctttgaaacagcttgtactacctgttatatatctccttataatcagaatatgatatatgggtcaaatagttgatgttgatttcatacttcaccttttctccaaaaaaattcatggtgaatttgataactccgtaaaagttaaacgcttctagggaaagtatttttctatcgatagtagctctggctcgtcggacgtattccaatggatcagcttctgatcttacccataaaggaaatataacaacacctacaaagtttccccatgcatattttgcacctttcgtcatcatatcagccagatcctacattttcatattttataaattatttagtctcttacttcattctaattacgtaagaatgttgtcttgtaagcaaaaatttacaatcaaagttacaaatgattttcacctcgatctttgtatatggtcttaagttaacagctacggtaccacgaagatgaattatttctaaggattttttcgtatcgacgcccattgtatgttcatctgctaaaatatatcaaatattagatatttattactttaatatagtgacattgtcgcattgacaaaaagagaatgaaactatagatttaccatattttctactcatatatgagagacctgcctgtgtcattccaagaagaatacatcattgaccttctacaaaataaaaaataaaaagacatataacggttagtgaaaaaagaagaaactacaatcaatgggaagaaaatggtaagaaatactataatatgtataaatataccatttgcattgtgttcttcaccaacttgacatcatcaaggcttattattctatgaatcagtttcctaggttgaattccacccataggttcactcgaaagaggatgtttggtgtctcgcaggaaacatagtgtgagaataaactttaacatttaaacaaaattaatgaagataaacctcatcatagaccaaaaagaatcaatacgtgtttttgttgcggatgctttagtaggaagagcgatagtaggcagagcgttggggtcagatgttttcctcgcacaagcgagtagaagtgacataagagatattccatcgctatagatacgtcaactgaatcttcaagcaaaatgaatataaattcagatacagtgaaatgaattttttaatacttattttgaagaaattataaacatatatcgtaaatatgtgtgaaaattccatttttacttgttacatagcaagttgggcgtagggataaactatatgattaccaatatacaagagaagcgagggaacttgatcactgagttcatgattcaataatattgttctagtttaagtagttgatcaattcgcttcacatgatattacatatgaattaatagtaaatactattttcaatctttttttggtattctaatattcttgttgttcttatatcctcatcatcgttattatactacttttggctattattttcttgtttaataatttctcaatatgatgaattgggttcgcatgaaaaaccgatcgacattatagaatttttgaaatcgcaaggttttgcaatcgttcccgacaagagtttgcgttaaggatctaggctttagatctttactttgactgaatttaaaattctataaagactcctgataatactagtagtagatttttttgctagataagtatatatcggtggttgtagttatttttttttgctcaaacatcagttttgtttttctttggccttcttctgtctttaaatatttcattaaagacttttgatttctcctgtcatgtcagatgtgatcatttcaggttcttattagtggggtttagtgtaaatataaaaccaaatcaaaaagtatttttcttaaggatcgctaacgaaatgaatttccctattagttgcccattgatatcaaatgaaactatacgattattcataagtaatactatacttcatcaagcaaacccaacactgactctagacaagcaaagatagatcataacactttgcgtttattgaggaagttaaatagaaaacacatttgattccaaagcactgtgagatagagattcatcagaagttatcatatctaggaatacagctagatgattatcagagcatcaattagttcgcagattaagaactattaacagaggaacatctaaaatcgattcaacaaatacattgagcgattatcatttactaaacagacgaagatctcattcactgaaaccaagattcataaggatcattataaaagtatccttcattatttcttcagtcgattcatcgggaaaaacaattttttatcaagaaacccaaagatcgatttcagatggaatacacaacaagaagagcgatttagagacgtgtaccttgagtctcggtgataagagagaagaaaactcggtgaaaaaagagaatgatcttcagcttcttgcttctttggcgctatgatctcacaggacaatttgaaagagagaaacaacgactcatggttattaatgggcttttaataacaaaaaagggacaacattaatgggctttgggcccattcgtaatattggtgatttttttttctttctttcaattcggcactgcagcttccttagggaagcatatagcagaaaggagattaactatcaagggttaataaatggtcaggtttttacctgaggaagaggaccaagggaacaaaacttgagtcttatgggtttcatgtgtccttgacgacgagaatactcctacaaggggggagatctcaaacccgtgggcgtgaatcacacgcataagaagctgctaatactccatcttgttgaattgcaattccatagacattgtgactgtaaactacttgcaaaagcagcttctactccacaatctccatgctttgtcaaagcttgttaacccgaggtatttcccatatgggtggaaagcaacacgtgcaacacaattcaaataacctttaaaactttgttggagtgttccatcagttttccacagctctgcagttcgatcagcagaagcagttgctcttccttcctcttgctgatgcttttgatcaaaggagctttttcagttttcctctgtaccaaatcttcttttactgatatcaaatcattgtaagcttctcaaatcattttattacatcagggagcatgtcgaaacacagcatgtagtctttattatttggtctgcaacatctatgcagaagctgtctttgggcacaaagtgaatagctctttatgctaaaccattataccatagtattacataaagttctgctcctagtcaatatccagatcccgtaaacaagtagaaaactgaggatttgtgtatacttgcatagaagaggagagtgaaagagaggcatgcataggaatctacttaaatcgatttaaaggttaaaggaaagaggaagaaaaatgagttggcagaataaatatcagaaagatctcgaaagcatatataaccaactaatattttgaaacaagataaataactcctagagaggtaagcatatataaccaactattgctagagaggtaaacaaaatctctagagtcataacattccatttcaaaattttggatatccaagaacctggcgtcgaaaacaagcggcatcttgatatcctcatttcaaaatctgaatttttcggagtaggatgcggatggcttggctttaacggaagagggaccaagttttccacgtaaggagacagaacacaaatgtctaaggagagacaacgaatctcatctttcactggataatatttgaatagcctcttcttattgtcatagaagacaagattcgcttgcttagaaactgccacgggcgtgaaccaccttttctgccttcgccaggaaacaactctatgatccaaacttatggagtaagtcttgctccatttttctttgtatgtatccatgccccatacctctagtatccattcagggctaactctggttatagcaagtacgagacggtcctcaaggttcaccatctgagtgtccacagtgatctgcgtaggcggcactgggactttatgaaactcttctttgtgaagatccaaggctagtattctgtaaaccgtctgaatgtgtaaccagtagatagatccattcacgcataccgatttgcttcccacattgaccacataaggaggtggactcagcttccgccattcaccagtatcaacatcaagaacaccacattccaccacaggctcctcttgcctaactctccagaaagcaaaagacatcctcaccactttatacctcccattcactttgtctctaccaaaccccattacccagtttcccggagagaaagtcttccataatcctgaaataaagtttcgatttttttctttcaatttctaatggcaaaaatttctacttataaagtaacagattattagttattaccaattctaaatctgcagttatggttcaagccggaagggaatcgccgaagttggctagtcgatgggttcaaaacgatgatccaatcttgctcggggaagcagatcacaccttggcaagtcatcgagggtcgtgaggcgtcgcagtgcagatagacaatctcttcgtccccttcaaaccgtgactcgggtaggagcttcctccgtccgccgcagtcgcagttgtaagcagctaagattctccggcggctgttttgaagactcatatgcctctccgcgaacctactcgattccaggagtgacctccattgttttgagacgattctgcatttgaggatcgatttcgtgggcaatctaaggagaacttcttcaagtagctcgggaagaatgtcgatcgaattagggttctcttcttcttcccccatttttgaagcttgttgataactacactgtttgtttatcatcttcgatatttgtgaattataattagacacatttatttaaggcctttttatggcccaattaataaggacgacgtaatcaattatttaaatttgcaatagtggcattcttcacattgtggtcataaacgcattttatttcttactaataaactagaacataaaggtccatggcaactaatgcccgcttggcaataaaatctgccaatacattatctagtcgataaaacattattaacttagagtcagttacaaagtaaaaacttttctttctattaaatattttaataatcacaccttagttatataaataaattataattactatcaaatttatctatgggaatatgaacactaaactgacgatagatgttgtgaataattaatgatggttccaatcaatttgccttgttcaatactttggagcaaacatgcacaccagccacaagaagtaattactttttgttttctccactcgtacttgccaaatctgttatatttgaaaatgattcaataaaacaatttaacaaataattaactgaaaaataagcaatatcgttgtagtacctttaccccttttcgatagtttgcgaaccaattttttcaaaaggctatcctcctcctaaaataaaaataattgttaaatggtaacacatgacaaaaatagttatgtagtattgaaaataatacttaattacagttacagtgggtggttgtttggtggcatggcgaaaattctcgagcagcgaagcctcgtatctctctcgtccttccttagacattttcctatatatccaagaatatgagaggaatttgcgacactttggacaccgcatgtccaattctttatgtattttggactcgatgtgttctacatgcagaaatgagtagagcattaatttagctcacaaaaaaatatcaacacacacaagctgaaatgtgttacctttaaagcatttgtcgtcacaaacatagtcaccgcatccaatgtttatgcaggaagtgatatcattgcaaagacagcattttctctagaaacgtataaaagaagagttaagtataaattcagaaactaaaatttgtcacaatcctttaaaaaagacatagagaataaggaacataccctaccagaatgaaagtgattcgtaggattgggttcaaaggaataggacattccgccattatcaggagattttttgtaagctgagacaagtttttctccatccctaaccaaatttcagatatcataatcagtgacgaaaacaaaacaagtatgaacaaattagaaataagaaaagtagatgatacagaccatttgtatctcaaaagtaaagcagtagctcgatctttaaaaattcctaggcgagaagcaaccctgttgattgtgtcataaacctcattcatgtcctgactctgacctcttactccctccatgattctttccaaagttttcaagtgttaaaccaaagaaagtagataaataatcagatgatgatcgtacgtaccccataatgcagcattattagtgaaataatcagatgattgacgaatcaaaccaaacacaagattaagaaaagaaagcaatacactaggaagaaaatcaaaagcataccaagtaatgtgagaaagaagagaattagacgtgaatacaataatcagaatgagaaatgactccatcttatagacacaattaggaataatccgcgtgaggtaaagtaagaagaaaaccaactgacttgatagtgatgtgtaaaaagatgagtgctgacttctgaggcgtatgagagtaacaaacaacttgcctttattgctagaagaagataatcttacatttatggttgggtaaattctgattttcaaaattaccttgatgagaaagaaaagaaaaacgctaacttaattacttagcctttccttttgggttttcctttgacgtcataatgcaacttagcttatacctaactataaaaaatggaaaatgccaacttacttacatatgacatttgacaaggcacttagctgtaactaactacaagtttaaccttccttacgcgtgaaaatattacgtattttccaactagataaagtttatttcatgctcttcttagttactaaaagattgtttttgcacattttcgtcgtaaccgcacttagctaaaatattcatactaatgagctgcgtccctactcaaagcgtaacgtcactttgtcgatacgaattaagaacgtagaatgtcatgatctcgtacatcaatacatcatgttcattggagtattcgctatgctcgagcaatagtcttttaatgctgagaagatcatgattttctactcgaatgctaacccagccaaaccggtttatctcgtctcattatccatatgctgaaatataaatttatatacaataagaataagtttcatatgtatattctcaaacattacagtataatgtgatctagatcctaatttcaatatgaagatatatctagtttagatagcatcaaaccattaacagttggattacagaatcaattttaacgatacaacaccttttgcacatgtatttatttccttgaaaacgtttaacttgtcttctcaatgacactctagttttctagaaaaaaattcattgctctttttcctctagaaaatttgtctctccagggcatgtatttaattttcttgctcttttttctcacaagtatgaatccctactatcataaacatatataatctctgttagttcctgaagaagtaagattaagaacattgagcttataaggtcatctcgtacatatggtgaaagcatccataaccataaatattatagcatgctctaaaaatacgaatatcctttgaaagaacaaattgaatgaatgagcaatcgacacaggagcaaagtgaatcaactttttagaaaatgtccaagctaactagaaaatgctaatccgtaattttgataatatcacaaccagttcttttggcccctagtcaaaatctgtaaacagagagaaaagtttgaagcttcgtacttgctttgcaagttacatgccaagagggtaaaacacatagagaagaatccacctacttgaattttaatgatctataatactgataaccaactagaactagagtggcaaacacaaaccgaaaagtgatgatctccttgaataaccctgcctccggatgcttcgaaaacaatccgcaactagatgtcctgattttgtaatcccgatgatcatgtcctgagtccaaacgaagtggtaccaaatcctcgagataaggagatataacagaaatatctgaggagagacagcaaatctcatttgtctcggtattatatttaaacaaccgcttgtgattgtcacaaaagacaagattccctagcttagaaaccgtcaacaccgtgaaccaactagactcccatgggtggttaataatgatactggctaaagttatggagtaagtcttgctccatatttctttgtctacatccatcaggctcagtatctctagctcccattctggcgcaccgtttgttttagttatggctagacggtcatcaaggttcaccatctgggcactcatggtgcaacacgtagatggaacggaaacattgtggaactctagtgtgtgaagatccaaggctaggattccgaaacgctaaacattttttaaccagtagattgacccattcacacacactgacttccttcccacgtcaatatcgttaggaggtggattcagttcactccattccccagtttcaacatcaagaacctcgcatttttccacaggactaaaacacatcctcaccactttatagctaccattaaatttgtctctaccaaatcccatctcccaattccccggaaaggaagtgaggtatagttcgtctgcaatttcacgaaaaaatcagacaaaaacaatccaaattttaactgactctttaataaaccattaaacagatattacctctgaactgaaaacgaatacgatcagagggcacgtgatgattagggctacaaggaaatctccggagttgtctggtcgatgggttcaaaacgttgatccaacctggtgctgggatacacaccaaaccctcacatgtcagagagggtcgtgtggcgtcaatatcgcagtgtaaatagaccatctggatctcttcctcaccttcgaatcccaactcagtccggtctccaacagccagaattttctccttcttctcaacgttcaaacgcctctccgcgaaactcttcgattccaggattgatctccattgttttgagacggttttgaatctgaggattgattttaaaggcaatccaaggaaaatttcttcaagtagatcgggaactacgtaaatcatcatcgggattagggtctttttcttcttttctctacagaactaaaaactcatcgggattagggtcttttttatacacaattttttttttttctagttttaacggaaacccccacaaatatttcattattactatttagcccagtcaatttccaaaagattaatttaggtcacctctctctctctctttccctatctcttggcctcgtgctcgtgcagctgaagatccctgctctgattcgtcaaatccagtaagctaaatttcctcttaattttctggtctttaattactttatactccatatgaataatttcttcaatcgaatttttcatctttgggtcttaatttttttctcaactgattcagctaacattagtgattagctatttgctggatttcttcgattgcttgtcgtctctatgtttcaattgtattatgattacgacacattcttgttctgatcattgtcgatgaaaagggtaaactttgaacaatcttctattacataaaattgaaactttttccaacatttctgagattttccaaatcaaattctcggagttgaattgaactctcaagtagcttacataatattcaaacttttgattatctaatcaaatctgtaattcttccttatctatgtggcagtggaagatgaggatgatccaaccacaaagaacagcaacaacacagatgattttgctatagagcctcgtgaagggattatatttgaatccgaggatgcagctaagatgttctatgatgattactctagacgattagggtttgtaatgcgtgtaatgtcttgccgaagatccgagaaagacggaagaattcttgcccggagattcggttgtaacaaagaaggtcattgtgttagtattcgtggtaagtttggatcagttaggaaacctagaccgagtacaagagaaggttgcaaagctatgattcatgttaagtatgaccggtctggcaaatgggtcattaccaaattcgtcaaagaacataaccatccactcgttgtttcacctcgcgaggctcgccataccctggtgagtacttaacttacttaacttatgtccctgtgcagtgtaacattacgtattttgagcaacaaatgtatgaaaccattttggtaaattatatgttgttataggacgagaaggataagagaattcaagaactgacgatagagctgcgaaacaagaagcggttatgtgcagcgtacaaggaacagttagatgcttttgcaaagattgttgaagagcatagtaatcagatagcaaagaaagttgagaatgtagtgaacaatttgaaggagttcgaacatctagagcatgcgctattgcgaagtaaacaagatgccatctaagccaactattgatgtgtgcggctgtatattctttgaattggtgaagctttcccgatcgtaaatggtttaagtgtaatctagatgtggtttgaatcttattttatggaatgtaatgtgaggaactttgtaaccatagagtagaagaggacatggatttaactcttgcctttagattgatacgaatgtggttggttctgcaatatactatattgataggaaacagttaacaatctacttaagaacacttaacaatcagaatagatgagaaggtgaatcttacataagctcagagataccctaaaaaacaaagattacacaccttcctcgattacacgatgttttgatttgtcatcagaaaatttatttacagaggaaaaacaagaaaaacaaaccaatcaatcgaataaacacacttctcttctgtcaaatcaaaccctagttaaagatcaattactgctgctaaagccaccacctttcatcatctgaagaaactctttgtaattgactctaccatcaccatctgcatcaacttgcataatcatcttcttacaaccatctagggtcttcccttgcttgagtcccaaggaagccatcacagatttcaactcctccacagtgataaacccatctccgtcttggtcaaacacgttaaacgcatctttcatatcctcttcctctgtttcgccatcgttgtgatgctcatccacaatcgagctgtacagcgactcaaactcgtctatgtcgacgcatccatcaccgttagcatcgatcttgtggatcatttgagtcagatctttgtctggtatgtagattccaagattctcaagcgagtcgttgagctcttcctttgtgattcgaccgtcaccgttcttgtcgaacatctggaaaacgcgtttgagctcggacggatctattcttttcgtcggcgctgaagaagatgatggagaaggtaacatcgttgacggagacggtggtgagttcttgtggagagttttgtcgaaccaagaaagagggaaaagagttcgtagcttctttggtactaaagagagaagaaacgaatttagtatattgtagagaaggaatattctcaccataactgttgaatcacaactcttattttatgagaagaaaaaaacagagagaagatctgagaaacagagagcttgaaacagagctttgttgatacagagaaacttggagattgtttgtctttatagaggagagagagagaatttattataattattaaatagtatatttttccggaaattattttttctttttcacgcctatacaaccgttgaatctaatttttaatcctttactttttggagaaagtaaattaaaatggaacgttacaaagaagaaaacaacgattttatagagaaacatgacttttctaaaaatatttgtagtcttcttctattcaacaataatcacatttaaaaattagattttacactgagcaaaaatatatacacatatttacatttgaacactatacttatttacatattatgttcttaaatcttataaatgtacatctctaaatgaataatctttatatgacgaattaagatccaaaggatctcacctaatacaagttaaacgtagaaaaagccgtgatttacagaatccatttaagtgtatgaaccatgataaatgaaggataaatatgtacaactagattttaacccgcggtatactgcggggacaacttattttttaaattagtatatataaaagtttacaaattaaatctatttatttttattttatagtttacaattgttattaagtgacgtcctatcaaacccgtctcgccaaatccgtcccgtaaaaaaaaccgcggtacaccgctaatttaaatatataatgaaaataaatattttacgggattgcaattgtattttggtttgtcaaacaaatatttgttttaaatagttgtcaaaatctagttcaaattttggagaaaaaagatttattggatagataaagaatgtatttaggtgtgttttgttcattttaagggattgcaattatatttttgtttgtcaaacattttttgttttaaatagttgctgaatatatttggaatatttttagtttgttaattaatttattgatagaaaaaaatcaataattaaaagctaatggcagccattgtaaataagtctcaactataagatttatttcacaaaataactgaaaaaatgtatatatctattgtaaataagtctcaactataggatttatttcacaaaataactgcaaaaatgtatatatagatttaatttaaaatgaaaaagagattgaattagtgtggaaaaaaagacaatcgtagtctttaaataacaaaaaagtaaagaaattgcagaaaacgcgtgaagaaggtagaggtgtgtgtagttaaacatatacatcgcttttctgataaattaaaaatgaagtaatgtcaaaaacgcgttgttataattgttgatgttttgttcctgtccccatttgtttggttatctttagttctttactttgccggtcttcttcgtatttcaaacttcttataatcaattcattttatcttatccgtaaaaggtaaaacacaagtcctaaaaaacctatcaattgccttttgttcaacagatcttcttttccgataactcatagtcaatggatcaaagtgttacaaacacaccacgttaaacatttgagccagagttcagggctccaaacaaagcaacatacttgtttttttatccgagattttttttaatctaattgcagtgttttatttcgactaatagaattgccgtaatctttctagaatcagtaaacaaaaagtgttgttaatgataacgtaacgggtctaagaaagaattaaaggaagttattggggaccaaaaaacgcgccaagaatgacgcccgttggattatgaccgttggatctataaggttgtcgctgttctattggtttacttcttccaagtggacccgtcactcaacagccaacaattttcatttttattattcatattgcatgcaatactaaattattaataggaggaagaagtaacaaatgaaatttagttagaagacaaaaatgttcgttggaaagtaaatttaaagaagaactagtaattggtgttggaataaatactcttatatatacaaatggttaatcaaatcatagtaaaagaaaaaaatatacatccatcaaaacagccgatgacctaatatctaactatagaactcgagccacactagcgtgaccaatagtacctagcaccaacaatcggaatgctacatgacatgaaagagtattttttttttttttttacatgaaagagtattatatataaagaaaaccacttctttaactatatcgaggcaaaaaaatcgttggatcttgcgtttgtgttggtatatgattattccaattgtaagttatgttgagactatatatgaatttgtctttcaaaaagtagacaaaaaataagaattagtagagcataaacttaacattcagttttgctatatactagatcaataaattacgaatactacaatatattttgagattctcacgcggagtgtggtgtaacgggatccaaggacagttgacttgtgacaagtgtttatggacttcatatggttgttgtcttccagctcacccaagccagctccactcatcattcatacttaaataattgtcattttctattattactaactgtattttcgtgttaatttgacattatttttcttctctttttgttgcaaaccttactacaatgtttcacataatctcatgtttttttaaaaagaagacatctttagtgctgttgtccgtttatatgacatactttttcttagggggttgttcatttgctttggtcattcttagattcaaattgcaatgattctccgtaaatgataaacaaatgttaatgtggcctctctactcctagtcccaaaaaagaattatcatcccaagtaattttagaaaccacattaacatttgtttcatcatttacaacatgtacactccgagtagctttatggacatcacggcgacagctgacacggcctatcggaatgctacagtctcactggttatacattctgatgtaccatgtaccactaataaaagacttaaaacatttagagcgtatagttattgctaaagtttgttggctaaataaataggcttccttaattatccactcaaacaaagacatctgaaatctccaaagagtcctaactgtcatacgcggttttacattataacgtatgacgcctactcgtctactaatgtcaacaagaaacatttagggtaagcaaacaatttctagtaattaatcagttgttgacctatttacacattggggttgcacaatcaggcacatattccggaagcgagaagacatacgcatgctcttacgaataattgacaatacccattatatagatatctaccatgcatgaccatgttctgtttattttatttgtttgcgaagattaatttatacaattatacatggttttcaagctcaaagatccatccgttgaaaaaaaaacaccaactttttggtaaaactattttcacgataaacattttcaagaaagggattcaaattcttgggctaaataattgggacaagtaagcattttcaagaaactacagttgtaatttacaaaattaataaaaaaaaggtgcccacacgcaggatcgaactacggaccttcagtttacaagactgacgctctaccactgagctatacgggcttttgctttgtttcttcttactaaaatatttggattagttcagatccttatttaatgagaaagtttgtttttatagtttgtcttttcttaactatacaacactgttaaatctaatttcagatattctcgacagaaatgaaaatcacaggacaagtacgaggaacatacagtagtgaatctagaactagaagtacagattctccttggaaatataacgaacctttccgaccaacaacgacatcaacttcatcaacgacatcaacttcatctttttatcgaaaaatgaaaatacaagtggcggaatagggaaataaaactgttaaaatacgacctcggtaaaaagtaaaaataaaataaaaattagaacaatttcattagctcagttaaagatccaaaaatctcattcacttcctcctccgtgagcaacaaatcgatcgagaaaccaataaacgacccgaacaatgaacggaacccaccgtcatcatcttcttcaactagtcttatcatgccgtaagatcacagctcaagtgactcaaccaggatcctcaacgatcatagcaatggcttcatcctccgagcaagaattcctagcaaaaagccgcgccaatctctaccgattccctcactccaaccatttctgggactcaaagaccgcttcacgcgtcggcgagaagcttgggttacgtttaagagagcttggtgttgacgtagtctccattgatgcagacgaagaaatctctcggcctattcaccatcgcaaaagagttcttccgttgttcgattccgttcgtcgtaccggtatcagagtcgacggaactgagcaattgaacgatattagtgtcccaattattcccaaaaattagggttacgaattagggttttttttgttttgttcgtacagtttcttgtattagtgagagatttacagaaactaaatttgattattttcgacaataaaaaagtactaacaaagaaaaaattagtacaatataagagtcaagtaaatttactggccaaatttttttttaatctaattttgtattcatacaaaaaaaaaatgaaccatcaagataataattaaaaagagaaatgaagatggaaacttcaatttcatcattgcattgcaatactacattacgcaaaaaagttttgtatttgacatctttttttagcttatgttgttggctgcagaatgtatttggttatgaatgagttcttcttctacacacctacttgaggaagaacttccaaatatctctgtctgtagtttccttcaccaaatgagctcctaagatagtttcttcatccaccaagttcctcaaatgtttcgctccactgttgaatcctacgtattgcttcttcgccgccaaatacattacaccgtatggcggtctcaggcactgtctccacaacaaagccatcacaaccatcattataaccgggaacaaccactgaggaactacggagagaaggattaaaaaaaactaaccttctttatgagagaatatagtttcttcagagaagtaatagagtaagggatttcggtcattagtataacatcatatccatattctccttcttgaccagtctcgttggctctttcccacgctctgcttcctgagagcttccttgatcgcctcgaggagaaatctggctgtcctgtaatgcttccgtcttggctgctacatccatccatgaaatcttcctctgaaaagctcaagttcattgcggggatagatggttcaaggacatctgttctaatgatggatagaacggtagagagctcttcccattctcctgcatagaaacggacagatgcagagatagcttgtcttgatggtgtgagtgggctttctggctgacggctttgcctgtctcgtgcttgctccaggtttgcaagaacgtttgggatggttgtgcatcttatcgtttctgcgctgaggtcttgaaagtggactgaggaagcaccctttagaaaaagcaatcaagattcaacaataagacttttttttctagaaatgtgaaagtaacagcaatcttgcagcgttagtttacttactttcaaacaggcaaatatcccaggaactccaaagttgcaacctagctgttcaagtcaccatacaaaggaaaaataaagagtcaagtcagaacacaaggaattggagtttgttctcaaaatggaacatccatgacatctttaccatactacaaattcatagttaaaacacaacaacaagaatgaaaaatgtatcaggccacctaaccattgcctggaaatggaaaatgaaagtaaaacgtttgaacgaatttgtaaacaattttgccaaagctacagagatatgatttgtagattactgctgatctacagacattggaatatatcagtgacactctacatttttggtgcaattatgttcagtgagataagaagttcagaagaggaggaagtacctcgaggacccttttgcccctgaagctaagctgtccatcacggatctcgtttttaaggacattaacaagaacaacagagctttcccaacttttcaaagaacctacacaatgtttagttaacttgatacaattaattatgatacataaataaaagaagatatcagatgctagtgcatgtgaagcacataccttcattttttaaaggagcagtttctgacccagagagcccaatgatatcagcaacacttacttttccctgaaacaagatgatggttacaatgcaaaggttaggattttctatacatccttactcttgtccgtggtattataatttataaagcatggaggcagccaaaaacgattcttgtttttcactttttaatgaaaatatataaagatcaagcaaactgggcacttctagacatactagttctaacatagcggacttacttacaaggttcataaagaaaaaagtatgatcgctttctgattcacattttagccaagaaaagctaatgtatccactcttaaaaccagcattagaatatcatcctaccacgtcattgatctttccagcaatcacttcttcatgttaaatcttgaataaaaggtttgacaagcaaagtttctttgcctaggctctcaaaaagccaagtgtacacatcagtttttaacttttatgtctacttccttacagcttggaggtgatgaactatattcaaaaattgcatttgtagtaccttgaaaacttgtaaaccgagcgcatctagattctcccctgaatacctgtgatgagctactgtctacaggagaaagaaacgaaaagagaattagcatagcagggtattatagagtctactccattctcaaaatgaaagaaactcttcattcctaaaatgatgatgatgataaaaatcgacaatgagaaaaaaaccttagaaggtatgatctcaacagctggtgttggaagctgcaaatccttctctgataatgcagacacaccgcctcggtcttgaggcagcaaacccggcaagcattgtgcaagcaaagatggtgcacgcattcttgagctttgagttctcaataacgctcaaaatggtcacaatctaaaattagcaaaaagatcaaaactttagtaatactattgtcactttgaacatctttaactcgaaaacttaaaccccaaaacttagacatcatgattttcacctaacgtcgatgcaatcacatgattcacatgaatagatacataaatgcgaaagcaactttgaacatagtgacaaccatagagaacttagcagtcaaataaaggtcaaaattaaaactttctgattcaaaactaagcccaattgcgagatctaggcgaatcctaaaatccacatccctactgtgaaaatgaccagcaaggatcaaaatcaaaaacaagaaaccatcaacagaacatgagttcttacaagacataatgaatcaaaagtttgactttaatttcaataataaacgaccatgtaccgtatcaatggagtatcaagagaaacagacaacaaagaaactgaaatttacttacagagtaaaataaattaaaaagagaaaacgagaagtggaggagtggaggagttctcgacacgaaatttcgattcagacggcaaaaaatgagattcttctataacacggcgaaaatctagggatcaaacaaagcaaccaggggttgaaatttcggagcaaagcgatctctcacacgttttaaagtaagaagaaataaaagaaatgtttttaaaaagaaagaaaaattctaaaaaggaaagagcaaagtttggccaacaaaaaatcgaagcttcggttcagacccgctggtctgcttttgtacacctgttccttaactatttataattctagtcctttttattctttgcagttcatggaactcaccactttctttcgttcctctggtcgtcgtctgatttctcgcatttatatttctcatttcctggaaaaaatggagtttattaattaatttctccttatagaccaattatatgggcctttaaaaggcctctattgtatggcaatgggtcaacaaactctacctataaacggatttgttaaatttaggcctttattacataccaatgatattttaccaatgaaatatttgtataattaaatttcatattatcataggataaaaaataaattatcacattaacgcatgttgaacaaaaattttacatggattatctttctttctatttttgcggagtaggttgtttaagtatgtttttgtcctttcaagaatttgtcagtttataacttataagtaaaattttaggtacagtatatatataagttgtaaaagttgataggtattcttgtaatcaaggtttactatcaaattttaaactaaaaatggttaatcattcatcaacacatgctaattatgtttagtatgggtagatgtgcctgtagatagagtgtcctaggagagtgtggtcacgcgcttacgctaaacaaataatatatcctctgtctttgctacacgtgtataaacagcagcaaagatgaaacgtgattaaataaaataagaggttgagaaagcgagtagaagatatttagataaacgcgggagtgcaattatggtttgtttgttggaattaagagacaaccttatccagagtaagctcgccacgtgtattaaaaacattattattgtctgttagtcacagtcgagtaactccagataatcttctctgtctcatttctcgtcgtctttttaaaaacgttttactttccacggcgaattttggtctgattccaaattcttccctagtttgaaaaatcttctgtattctgaaaagagattttatgcgtatcgctgaaataggaagaaaacagattcctttccatttcccaaattttgtcattgagtcttggcatttcaaccaatcgcaatttattgaaattccggcgagtcattagatttttttggattccgtttcaaggtacggtgctttttcgcagattgagaagagcttaataagaaagatgacattgacgatcccaaacgcacctgggagctccgggtacttggatatgttcccagagagaaggatgtcgtattttgggaattc

SEQ ID NO: 371 - DNA, 102057 bp, Arabidopsis thaliana
aagcttgttgataactacactgtttgtttatcatcttcgatatttgtgaattataattagacacatttatttaaggcctttttatggcccaattaataaggacgacgtaatcaattatttaaatttgcaatagtggcattcttcacattgtggtcataaacgcattttatttcttactaataaactagaacataaaggtccatggcaactaatgcccgcttggcaataaaatctgccaatacattatctagtcgataaaacattattaacttagagtcagttacaaagtaaaaacttttctttctattaaatattttaataatcacaccttagttatataaataaattataattactatcaaatttatctatgggaatatgaacactaaactgacgatagatgttgtgaataattaatgatggttccaatcaatttgccttgttcaatactttggagcaaacatgcacaccagccacaagaagtaattactttttgttttctccactcgtacttgccaaatctgttatatttgaaaatgattcaataaaacaatttaacaaataattaactgaaaaataagcaatatcgttgtagtacctttaccccttttcgatagtttgcgaaccaattttttcaaaaggctatcctcctcctaaaataaaaataattgttaaatggtaacacatgacaaaaatagttatgtagtattgaaaataatacttaattacagttacagtgggtggttgtttggtggcatggcgaaaattctcgagcagcgaagcctcgtatctctctcgtccttccttagacattttcctatatatccaagaatatgagaggaatttgcgacactttggacaccgcatgtccaattctttatgtattttggactcgatgtgttctacatgcagaaatgagtagagcattaatttagctcacaaaaaaatatcaacacacacaagctgaaatgtgttacctttaaagcatttgtcgtcacaaacatagtcaccgcatccaatgtttatgcaggaagtgatatcattgcaaagacagcattttctctagaaacgtataaaagaagagttaagtataaattcagaaactaaaatttgtcacaatcctttaaaaaagacatagagaataaggaacataccctaccagaatgaaagtgattcgtaggattgggttcaaaggaataggacattccgccattatcaggagattttttgtaagctgagacaagtttttctccatccctaaccaaatttcagatatcataatcagtgacgaaaacaaaacaagtatgaacaaattagaaataagaaaagtagatgatacagaccatttgtatctcaaaagtaaagcagtagctcgatctttaaaaattcctaggcgagaagcaaccctgttgattgtgtcataaacctcattcatgtcctgactctgacctcttactccctccatgattctttccaaagttttcaagtgttaaaccaaagaaagtagataaataatcagatgatgatcgtacgtaccccataatgcagcattattagtgaaataatcagatgattgacgaatcaaaccaaacacaagattaagaaaagaaagcaatacactaggaagaaaatcaaaagcataccaagtaatgtgagaaagaagagaattagacgtgaatacaataatcagaatgagaaatgactccatcttatagacacaattaggaataatccgcgtgaggtaaagtaagaagaaaaccaactgacttgatagtgatgtgtaaaaagatgagtgctgacttctgaggcgtatgagagtaacaaacaacttgcctttattgctagaagaagataatcttacatttatggttgggtaaattctgattttcaaaattaccttgatgagaaagaaaagaaaaacgctaacttaattacttagcctttccttttgggttttcctttgacgtcataatgcaacttagcttatacctaactataaaaaatggaaaatgccaacttacttacatatgacatttgacaaggcacttagctgtaactaactacaagtttaaccttccttacgcgtgaaaatattacgtattttccaactagataaagtttatttcatgctcttcttagttactaaaagattgtttttgcacattttcgtcgtaaccgcacttagctaaaatattcatactaatgagctgcgtccctactcaaagcgtaacgtcactttgtcgatacgaattaagaacgtagaatgtcatgatctcgtacatcaatacatcatgttcattggagtattcgctatgctcgagcaatagtcttttaatgctgagaagatcatgattttctactcgaatgctaacccagccaaaccggtttatctcgtctcattatccatatgctgaaatataaatttatatacaataagaataagtttcatatgtatattctcaaacattacagtataatgtgatctagatcctaatttcaatatgaagatatatctagtttagatagcatcaaaccattaacagttggattacagaatcaattttaacgatacaacaccttttgcacatgtatttatttccttgaaaacgtttaacttgtcttctcaatgacactctagttttctagaaaaaaattcattgctctttttcctctagaaaatttgtctctccagggcatgtatttaattttcttgctcttttttctcacaagtatgaatccctactatcataaacatatataatctctgttagttcctgaagaagtaagattaagaacattgagcttataaggtcatctcgtacatatggtgaaagcatccataaccataaatattatagcatgctctaaaaatacgaatatcctttgaaagaacaaattgaatgaatgagcaatcgacacaggagcaaagtgaatcaactttttagaaaatgtccaagctaactagaaaatgctaatccgtaattttgataatatcacaaccagttcttttggcccctagtcaaaatctgtaaacagagagaaaagtttgaagcttcgtacttgctttgcaagttacatgccaagagggtaaaacacatagagaagaatccacctacttgaattttaatgatctataatactgataaccaactagaactagagtggcaaacacaaaccgaaaagtgatgatctccttgaataaccctgcctccggatgcttcgaaaacaatccgcaactagatgtcctgattttgtaatcccgatgatcatgtcctgagtccaaacgaagtggtaccaaatcctcgagataaggagatataacagaaatatctgaggagagacagcaaatctcatttgtctcggtattatatttaaacaaccgcttgtgattgtcacaaaagacaagattccctagcttagaaaccgtcaacaccgtgaaccaactagactcccatgggtggttaataatgatactggctaaagttatggagtaagtcttgctccatatttctttgtctacatccatcaggctcagtatctctagctcccattctggcgcaccgtttgttttagttatggctagacggtcatcaaggttcaccatctgggcactcatggtgcaacacgtagatggaacggaaacattgtggaactctagtgtgtgaagatccaaggctaggattccgaaacgctaaacattttttaaccagtagattgacccattcacacacactgacttccttcccacgtcaatatcgttaggaggtggattcagttcactccattccccagtttcaacatcaagaacctcgcatttttccacaggactaaaacacatcctcaccactttatagctaccattaaatttgtctctaccaaatcccatctcccaattccccggaaaggaagtgaggtatagttcgtctgcaatttcacgaaaaaatcagacaaaaacaatccaaattttaactgactctttaataaaccattaaacagatattacctctgaactgaaaacgaatacgatcagagggcacgtgatgattagggctacaaggaaatctccggagttgtctggtcgatgggttcaaaacgttgatccaacctggtgctgggatacacaccaaaccctcacatgtcagagagggtcgtgtggcgtcaatatcgcagtgtaaatagaccatctggatctcttcctcaccttcgaatcccaactcagtccggtctccaacagccagaattttctccttcttctcaacgttcaaacgcctctccgcgaaactcttcgattccaggattgatctccattgttttgagacggttttgaatctgaggattgattttaaaggcaatccaaggaaaatttcttcaagtagatcgggaactacgtaaatcatcatcgggattagggtctttttcttcttttctctacagaactaaaaactcatcgggattagggtcttttttatacacaattttttttttttctagttttaacggaaacccccacaaatatttcattattactatttagcccagtcaatttccaaaagattaatttaggtcacctctctctctctctttccctatctcttggcctcgtgctcgtgcagctgaagatccctgctctgattcgtcaaatccagtaagctaaatttcctcttaattttctggtctttaattactttatactccatatgaataatttcttcaatcgaatttttcatctttgggtcttaatttttttctcaactgattcagctaacattagtgattagctatttgctggatttcttcgattgcttgtcgtctctatgtttcaattgtattatgattacgacacattcttgttctgatcattgtcgatgaaaagggtaaactttgaacaatcttctattacataaaattgaaactttttccaacatttctgagattttccaaatcaaattctcggagttgaattgaactctcaagtagcttacataatattcaaacttttgattatctaatcaaatctgtaattcttccttatctatgtggcagtggaagatgaggatgatccaaccacaaagaacagcaacaacacagatgattttgctatagagcctcgtgaagggattatatttgaatccgaggatgcagctaagatgttctatgatgattactctagacgattagggtttgtaatgcgtgtaatgtcttgccgaagatccgagaaagacggaagaattcttgcccggagattcggttgtaacaaagaaggtcattgtgttagtattcgtggtaagtttggatcagttaggaaacctagaccgagtacaagagaaggttgcaaagctatgattcatgttaagtatgaccggtctggcaaatgggtcattaccaaattcgtcaaagaacataaccatccactcgttgtttcacctcgcgaggctcgccataccctggtgagtacttaacttacttaacttatgtccctgtgcagtgtaacattacgtattttgagcaacaaatgtatgaaaccattttggtaaattatatgttgttataggacgagaaggataagagaattcaagaactgacgatagagctgcgaaacaagaagcggttatgtgcagcgtacaaggaacagttagatgcttttgcaaagattgttgaagagcatagtaatcagatagcaaagaaagttgagaatgtagtgaacaatttgaaggagttcgaacatctagagcatgcgctattgcgaagtaaacaagatgccatctaagccaactattgatgtgtgcggctgtatattctttgaattggtgaagctttcccgatcgtaaatggtttaagtgtaatctagatgtggtttgaatcttattttatggaatgtaatgtgaggaactttgtaaccatagagtagaagaggacatggatttaactcttgcctttagattgatacgaatgtggttggttctgcaatatactatattgataggaaacagttaacaatctacttaagaacacttaacaatcagaatagatgagaaggtgaatcttacataagctcagagataccctaaaaaacaaagattacacaccttcctcgattacacgatgttttgatttgtcatcagaaaatttatttacagaggaaaaacaagaaaaacaaaccaatcaatcgaataaacacacttctcttctgtcaaatcaaaccctagttaaagatcaattactgctgctaaagccaccacctttcatcatctgaagaaactctttgtaattgactctaccatcaccatctgcatcaacttgcataatcatcttcttacaaccatctagggtcttcccttgcttgagtcccaaggaagccatcacagatttcaactcctccacagtgataaacccatctccgtcttggtcaaacacgttaaacgcatctttcatatcctcttcctctgtttcgccatcgttgtgatgctcatccacaatcgagctgtacagcgactcaaactcgtctatgtcgacgcatccatcaccgttagcatcgatcttgtggatcatttgagtcagatctttgtctggtatgtagattccaagattctcaagcgagtcgttgagctcttcctttgtgattcgaccgtcaccgttcttgtcgaacatctggaaaacgcgtttgagctcggacggatctattcttttcgtcggcgctgaagaagatgatggagaaggtaacatcgttgacggagacggtggtgagttcttgtggagagttttgtcgaaccaagaaagagggaaaagagttcgtagcttctttggtactaaagagagaagaaacgaatttagtatattgtagagaaggaatattctcaccataactgttgaatcacaactcttattttatgagaagaaaaaaacagagagaagatctgagaaacagagagcttgaaacagagctttgttgatacagagaaacttggagattgtttgtctttatagaggagagagagagaatttattataattattaaatagtatatttttccggaaattattttttctttttcacgcctatacaaccgttgaatctaatttttaatcctttactttttggagaaagtaaattaaaatggaacgttacaaagaagaaaacaacgattttatagagaaacatgacttttctaaaaatatttgtagtcttcttctattcaacaataatcacatttaaaaattagattttacactgagcaaaaatatatacacatatttacatttgaacactatacttatttacatattatgttcttaaatcttataaatgtacatctctaaatgaataatctttatatgacgaattaagatccaaaggatctcacctaatacaagttaaacgtagaaaaagccgtgatttacagaatccatttaagtgtatgaaccatgataaatgaaggataaatatgtacaactagattttaacccgcggtatactgcggggacaacttattttttaaattagtatatataaaagtttacaaattaaatctatttatttttattttatagtttacaattgttattaagtgacgtcctatcaaacccgtctcgccaaatccgtcccgtaaaaaaaaccgcggtacaccgctaatttaaatatataatgaaaataaatattttacgggattgcaattgtattttggtttgtcaaacaaatatttgttttaaatagttgtcaaaatctagttcaaattttggagaaaaaagatttattggatagataaagaatgtatttaggtgtgttttgttcattttaagggattgcaattatatttttgtttgtcaaacattttttgttttaaatagttgctgaatatatttggaatatttttagtttgttaattaatttattgatagaaaaaaatcaataattaaaagctaatggcagccattgtaaataagtctcaactataagatttatttcacaaaataactgaaaaaatgtatatatctattgtaaataagtctcaactataggatttatttcacaaaataactgcaaaaatgtatatatagatttaatttaaaatgaaaaagagattgaattagtgtggaaaaaaagacaatcgtagtctttaaataacaaaaaagtaaagaaattgcagaaaacgcgtgaagaaggtagaggtgtgtgtagttaaacatatacatcgcttttctgataaattaaaaatgaagtaatgtcaaaaacgcgttgttataattgttgatgttttgttcctgtccccatttgtttggttatctttagttctttactttgccggtcttcttcgtatttcaaacttcttataatcaattcattttatcttatccgtaaaaggtaaaacacaagtcctaaaaaacctatcaattgccttttgttcaacagatcttcttttccgataactcatagtcaatggatcaaagtgttacaaacacaccacgttaaacatttgagccagagttcagggctccaaacaaagcaacatacttgtttttttatccgagattttttttaatctaattgcagtgttttatttcgactaatagaattgccgtaatctttctagaatcagtaaacaaaaagtgttgttaatgataacgtaacgggtctaagaaagaattaaaggaagttattggggaccaaaaaacgcgccaagaatgacgcccgttggattatgaccgttggatctataaggttgtcgctgttctattggtttacttcttccaagtggacccgtcactcaacagccaacaattttcatttttattattcatattgcatgcaatactaaattattaataggaggaagaagtaacaaatgaaatttagttagaagacaaaaatgttcgttggaaagtaaatttaaagaagaactagtaattggtgttggaataaatactcttatatatacaaatggttaatcaaatcatagtaaaagaaaaaaatatacatccatcaaaacagccgatgacctaatatctaactatagaactcgagccacactagcgtgaccaatagtacctagcaccaacaatcggaatgctacatgacatgaaagagtattttttttttttttttacatgaaagagtattatatataaagaaaaccacttctttaactatatcgaggcaaaaaaatcgttggatcttgcgtttgtgttggtatatgattattccaattgtaagttatgttgagactatatatgaatttgtctttcaaaaagtagacaaaaaataagaattagtagagcataaacttaacattcagttttgctatatactagatcaataaattacgaatactacaatatattttgagattctcacgcggagtgtggtgtaacgggatccaaggacagttgacttgtgacaagtgtttatggacttcatatggttgttgtcttccagctcacccaagccagctccactcatcattcatacttaaataattgtcattttctattattactaactgtattttcgtgttaatttgacattatttttcttctctttttgttgcaaaccttactacaatgtttcacataatctcatgtttttttaaaaagaagacatctttagtgctgttgtccgtttatatgacatactttttcttagggggttgttcatttgctttggtcattcttagattcaaattgcaatgattctccgtaaatgataaacaaatgttaatgtggcctctctactcctagtcccaaaaaagaattatcatcccaagtaattttagaaaccacattaacatttgtttcatcatttacaacatgtacactccgagtagctttatggacatcacggcgacagctgacacggcctatcggaatgctacagtctcactggttatacattctgatgtaccatgtaccactaataaaagacttaaaacatttagagcgtatagttattgctaaagtttgttggctaaataaataggcttccttaattatccactcaaacaaagacatctgaaatctccaaagagtcctaactgtcatacgcggttttacattataacgtatgacgcctactcgtctactaatgtcaacaagaaacatttagggtaagcaaacaatttctagtaattaatcagttgttgacctatttacacattggggttgcacaatcaggcacatattccggaagcgagaagacatacgcatgctcttacgaataattgacaatacccattatatagatatctaccatgcatgaccatgttctgtttattttatttgtttgcgaagattaatttatacaattatacatggttttcaagctcaaagatccatccgttgaaaaaaaaacaccaactttttggtaaaactattttcacgataaacattttcaagaaagggattcaaattcttgggctaaataattgggacaagtaagcattttcaagaaactacagttgtaatttacaaaattaataaaaaaaaggtgcccacacgcaggatcgaactacggaccttcagtttacaagactgacgctctaccactgagctatacgggcttttgctttgtttcttcttactaaaatatttggattagttcagatccttatttaatgagaaagtttgtttttatagtttgtcttttcttaactatacaacactgttaaatctaatttcagatattctcgacagaaatgaaaatcacaggacaagtacgaggaacatacagtagtgaatctagaactagaagtacagattctccttggaaatataacgaacctttccgaccaacaacgacatcaacttcatcaacgacatcaacttcatctttttatcgaaaaatgaaaatacaagtggcggaatagggaaataaaactgttaaaatacgacctcggtaaaaagtaaaaataaaataaaaattagaacaatttcattagctcagttaaagatccaaaaatctcattcacttcctcctccgtgagcaacaaatcgatcgagaaaccaataaacgacccgaacaatgaacggaacccaccgtcatcatcttcttcaactagtcttatcatgccgtaagatcacagctcaagtgactcaaccaggatcctcaacgatcatagcaatggcttcatcctccgagcaagaattcctagcaaaaagccgcgccaatctctaccgattccctcactccaaccatttctgggactcaaagaccgcttcacgcgtcggcgagaagcttgggttacgtttaagagagcttggtgttgacgtagtctccattgatgcagacgaagaaatctctcggcctattcaccatcgcaaaagagttcttccgttgttcgattccgttcgtcgtaccggtatcagagtcgacggaactgagcaattgaacgatattagtgtcccaattattcccaaaaattagggttacgaattagggttttttttgttttgttcgtacagtttcttgtattagtgagagatttacagaaactaaatttgattattttcgacaataaaaaagtactaacaaagaaaaaattagtacaatataagagtcaagtaaatttactggccaaatttttttttaatctaattttgtattcatacaaaaaaaaaatgaaccatcaagataataattaaaaagagaaatgaagatggaaacttcaatttcatcattgcattgcaatactacattacgcaaaaaagttttgtatttgacatctttttttagcttatgttgttggctgcagaatgtatttggttatgaatgagttcttcttctacacacctacttgaggaagaacttccaaatatctctgtctgtagtttccttcaccaaatgagctcctaagatagtttcttcatccaccaagttcctcaaatgtttcgctccactgttgaatcctacgtattgcttcttcgccgccaaatacattacaccgtatggcggtctcaggcactgtctccacaacaaagccatcacaaccatcattataaccgggaacaaccactgaggaactacggagagaaggattaaaaaaaactaaccttctttatgagagaatatagtttcttcagagaagtaatagagtaagggatttcggtcattagtataacatcatatccatattctccttcttgaccagtctcgttggctctttcccacgctctgcttcctgagagcttccttgatcgcctcgaggagaaatctggctgtcctgtaatgcttccgtcttggctgctacatccatccatgaaatcttcctctgaaaagctcaagttcattgcggggatagatggttcaaggacatctgttctaatgatggatagaacggtagagagctcttcccattctcctgcatagaaacggacagatgcagagatagcttgtcttgatggtgtgagtgggctttctggctgacggctttgcctgtctcgtgcttgctccaggtttgcaagaacgtttgggatggttgtgcatcttatcgtttctgcgctgaggtcttgaaagtggactgaggaagcaccctttagaaaaagcaatcaagattcaacaataagacttttttttctagaaatgtgaaagtaacagcaatcttgcagcgttagtttacttactttcaaacaggcaaatatcccaggaactccaaagttgcaacctagctgttcaagtcaccatacaaaggaaaaataaagagtcaagtcagaacacaaggaattggagtttgttctcaaaatggaacatccatgacatctttaccatactacaaattcatagttaaaacacaacaacaagaatgaaaaatgtatcaggccacctaaccattgcctggaaatggaaaatgaaagtaaaacgtttgaacgaatttgtaaacaattttgccaaagctacagagatatgatttgtagattactgctgatctacagacattggaatatatcagtgacactctacatttttggtgcaattatgttcagtgagataagaagttcagaagaggaggaagtacctcgaggacccttttgcccctgaagctaagctgtccatcacggatctcgtttttaaggacattaacaagaacaacagagctttcccaacttttcaaagaacctacacaatgtttagttaacttgatacaattaattatgatacataaataaaagaagatatcagatgctagtgcatgtgaagcacataccttcattttttaaaggagcagtttctgacccagagagcccaatgatatcagcaacacttacttttccctgaaacaagatgatggttacaatgcaaaggttaggattttctatacatccttactcttgtccgtggtattataatttataaagcatggaggcagccaaaaacgattcttgtttttcactttttaatgaaaatatataaagatcaagcaaactgggcacttctagacatactagttctaacatagcggacttacttacaaggttcataaagaaaaaagtatgatcgctttctgattcacattttagccaagaaaagctaatgtatccactcttaaaaccagcattagaatatcatcctaccacgtcattgatctttccagcaatcacttcttcatgttaaatcttgaataaaaggtttgacaagcaaagtttctttgcctaggctctcaaaaagccaagtgtacacatcagtttttaacttttatgtctacttccttacagcttggaggtgatgaactatattcaaaaattgcatttgtagtaccttgaaaacttgtaaaccgagcgcatctagattctcccctgaatacctgtgatgagctactgtctacaggagaaagaaacgaaaagagaattagcatagcagggtattatagagtctactccattctcaaaatgaaagaaactcttcattcctaaaatgatgatgatgataaaaatcgacaatgagaaaaaaaccttagaaggtatgatctcaacagctggtgttggaagctgcaaatccttctctgataatgcagacacaccgcctcggtcttgaggcagcaaacccggcaagcattgtgcaagcaaagatggtgcacgcattcttgagctttgagttctcaataacgctcaaaatggtcacaatctaaaattagcaaaaagatcaaaactttagtaatactattgtcactttgaacatctttaactcgaaaacttaaaccccaaaacttagacatcatgattttcacctaacgtcgatgcaatcacatgattcacatgaatagatacataaatgcgaaagcaactttgaacatagtgacaaccatagagaacttagcagtcaaataaaggtcaaaattaaaactttctgattcaaaactaagcccaattgcgagatctaggcgaatcctaaaatccacatccctactgtgaaaatgaccagcaaggatcaaaatcaaaaacaagaaaccatcaacagaacatgagttcttacaagacataatgaatcaaaagtttgactttaatttcaataataaacgaccatgtaccgtatcaatggagtatcaagagaaacagacaacaaagaaactgaaatttacttacagagtaaaataaattaaaaagagaaaacgagaagtggaggagtggaggagttctcgacacgaaatttcgattcagacggcaaaaaatgagattcttctataacacggcgaaaatctagggatcaaacaaagcaaccaggggttgaaatttcggagcaaagcgatctctcacacgttttaaagtaagaagaaataaaagaaatgtttttaaaaagaaagaaaaattctaaaaaggaaagagcaaagtttggccaacaaaaaatcgaagcttcggttcagacccgctggtctgcttttgtacacctgttccttaactatttataattctagtcctttttattctttgcagttcatggaactcaccactttctttcgttcctctggtcgtcgtctgatttctcgcatttatatttctcatttcctggaaaaaatggagtttattaattaatttctccttatagaccaattatatgggcctttaaaaggcctctattgtatggcaatgggtcaacaaactctacctataaacggatttgttaaatttaggcctttattacataccaatgatattttaccaatgaaatatttgtataattaaatttcatattatcataggataaaaaataaattatcacattaacgcatgttgaacaaaaattttacatggattatctttctttctatttttgcggagtaggttgtttaagtatgtttttgtcctttcaagaatttgtcagtttataacttataagtaaaattttaggtacagtatatatataagttgtaaaagttgataggtattcttgtaatcaaggtttactatcaaattttaaactaaaaatggttaatcattcatcaacacatgctaattatgtttagtatgggtagatgtgcctgtagatagagtgtcctaggagagtgtggtcacgcgcttacgctaaacaaataatatatcctctgtctttgctacacgtgtataaacagcagcaaagatgaaacgtgattaaataaaataagaggttgagaaagcgagtagaagatatttagataaacgcgggagtgcaattatggtttgtttgttggaattaagagacaaccttatccagagtaagctcgccacgtgtattaaaaacattattattgtctgttagtcacagtcgagtaactccagataatcttctctgtctcatttctcgtcgtctttttaaaaacgttttactttccacggcgaattttggtctgattccaaattcttccctagtttgaaaaatcttctgtattctgaaaagagattttatgcgtatcgctgaaataggaagaaaacagattcctttccatttcccaaattttgtcattgagtcttggcatttcaaccaatcgcaatttattgaaattccggcgagtcattagatttttttggattccgtttcaaggtacggtgctttttcgcagattgagaagagcttaataagaaagatgacattgacgatcccaaacgcacctgggagctccgggtacttggatatgttcccagagagaaggatgtcgtattttgggaattcttacattctgggtttgactgtcactgccggaatcggtggccttctgttcggttatgatacaggtctctctctatctctcttactcaccaattatgatgttttaggcgtttgatttgatttccttattgacccttttgtagaaattctgtaaattgaatcgaaagtggattcttttagtctgcattacttgtctcattggattttactatattcagaaattggtttgtgtttgggttatttagattttagtcaaagcctttaagaaatgtttccttttacaggtgtaatttccggtgcccttttgtacattaaggatgatttcgaagttgttaagcagagcagtttcttacaggtatataatgtttctagctttacctcttccaagctggtaactttcagtgttagtagtgatttatgaagaatttgatctttgtaggaaactattgtaagtatggctttagttggtgccatgattggtgctgcagctggaggttggatcaatgactactacggtcgtaaaaaggcgactctttttgcagatgttgtctttgcagctggagctatcgttatggctgctgctcctgatccgtatgttttgatatcgggtcgtctcttggtcggtttaggagttggtgttgcttctgtgactgctccggtttatatagcggaagcatctccatcggaagttagaggtggacttgtgagcaccaacgtattgatgatcactggtggacagtttctttcatatctcgttaattctgctttcacacaggttagttggttacttggttagttagacatatctttcctcaccgtaaaaagttttgagttttggtgaagttttgttacatctagagagagcaacagctaatatgtttgcgagtgaatgacaatgcatcagtcatgttatgttcaatgtaagcatttaggaattctcatagcgatctgtgaattcagaattttattatgggattacaagtatgctcttttcatctgactctggttagaagaacgaattcagaaatagagtgaatgcttatattgttttattaattggaactaaaacgaaacttgagaaggtggaggactgtttgatttgcattgctgttgatgccgaagcttaatgtctcatgttaatgtagttcacaagatcatggtatggttgcattgtgagtgttgtatcatttaattattagatgatctttgtgtccttggttttggtttatctcaaggctcaagttctactttgctgcagtaattcatgtcccagctaaggcagcttatctgtcctgtcaccatgacgagaaaataagtctatcctgagttccgacataggtcactctttggtggtcctttaccttactccagtttttaatttgaaacttattttccaaaattcaataaaaccaagtagatttgatgaaaatgtaaagttgctatagattttatgtaaatgtagcttggtacttgaaaattttgagaccattttttgtatatctaagaaactgtggagagaaagtaaaactttggcattttattggtagctttgaattcatgagattagttttggcaggttccaggaacatggagatggatgcttggtgtttcaggcgttcccgctgtgattcagttcatcctcatgcttttcatgccagaatcccctcgatggcttttcatgaaaaatcgtaaagcggaagccatccaagtgctcgccagaacctatgacatctcgcggttagaagacgagattgatcatctttcagcggctgaagaggaagaaaaacaaaggaagcgcactgttggctacttggatgttttcagatccaaagaattgagacttgcatttcttgccggagcaggacttcaggtaaagaaaatgtagaattttgcagtcttgaaactgagaattttaatgtcttaggattttgaaagatacttttgaaatttctacaggcgtttcagcagttcactggtatcaatacagttatgtactacagccctacgatagtccaaatggctggatttcactcaaaccagctcgctttgttcctgtctctcattgttgctgccatgaatgctgctggaacagtcgtggggatttacttcatcgatcattgtggaaggaaaaagctagctctctcaagtttatttggcgtcattatatcactcttaatcctctcagtctcgtttttcaaacaatctgagacatcatctgatggagggctctatggttggctcgctgtgcttggcttagctctatacattgttttctttgcaccgggaatgggaccagtcccatggacggtgaactcagagatataccctcaacaataccgaggcatatgcggaggcatgtcagctacagttaactggatcagcaatttgattgtggcacaaacattcttgacaatcgcggaagctgctggaacaggaatgactttcttgattttggcgggaattgcggttcttgctgtaatctttgtgattgtgtttgtccctgagactcaagggctaacgttttcggaagttgaacagatttggaaagaaagagcttatggaaatatcagtggctggggcagtagcagtgatagcaacaacatggaagggttactcgagcagggatctcaatcttaaagatcttggatggctcatgagtcatgcatgacttacacattgtgaaatcacatagtagtaaaccgggattggttccggtttagcaatgtgagatgtatgtgatgttggaattgtaatgttcttaggaactgtgattgtaaataaatacattacaaatttacattaagggtccactttggtacccaatctttgtcaatgtcttatgatctagagatttcttgtctgcaaatctctatgatgcatgtgtctatgatgcaaaacggtgtgcttttgtcattaaggaagagcagagaaaagtcgaaaagagcattgaatatatgaatgttgatacacaaaaacataagacttgtctttaagccacataactaaattaggaactgtgttccattgaatagatgaactgtctttttgtccaaaacattaattgaggggaaaattaagggaggtgatgaaaaaagaaacattaaattgtagtggacacggcaatcaaattagggacataaaagggtcaccaaaatgtatgattggatattgtgtaacgtatcctttgtgctgtctcatgtgtcactatacaatgacaatgtaggtttgtgtacttttggtggtaactcaatactatttggtgtcaatggtgattttatttcctcgaactttttttttttttgtttgtacttatccgcaatacatgaaatgagtcatattctttcagatatggttatctagctgaaatgagtgccattttatttctttcatagtcaaatttctatgacatatagatatttttctcgactatgaccgagtatatcttttgagtcactacaaactttacatacccgttatatattctaaactttagtttgagttttaatctaaaatttatcttcatatgatatatatttaaaaatagaacttttcacaaactaaaataaatttataactataatatcaaacatgtgagtaaaaaataaagaaaaactagaaaatcaccccgtgataaataaaataaaaaggatcagataaaagaagaaaaatatgtatgtggtaaatgaacaaatgataatgatgggaatgggaccaaagttgaacatgaatgtcgtgaagaccagagagtgggtgtgaattgtgaaatgtggtgctgattagttgagccgaataagcaaaaaggaaatggggacacgtgagttgttgggtctctcttcttgtctctatttttagtgagcccctctcttttcttctaatgagcccctttaatttcttatcataactatccacgtggcgtctcccctgccttttgtcttcttctctttgttcacatgtgattcgcttctgtttccacaacatttataatcccttactcttctcacatgctttggtaattgtttccatcaccacaattattgacttaaactactttttaaaagtgagataatatttcacttgcttctgatggttgttcacgaaacaaaacttatctgatggttatactgaggaggggaaaaagaactttatttcgtttgtatgtatctcgtgatccttctctttacgagttacatgcactagagattagtggacgtaatttgcgatcaacttcgactgtataattactttatgtgtttatgaagttactaacttttcttttttgttgaattctgaaaattacaattcgaatgaaagaacattttgtgcctatataatcaccatatggttgattgattactcaatgagcattagtagcatttattatacactgatcgcagcgccatataaaccaccacaatcatttggagcctttcgttctataggtacaaaacaataagatgggaaactaaactagtgtcctctcttatcctgcttttattacatttgactatgtaacccacatcatcaatagaagaataccataatggtttggcatcgatacccatgtcatgtgaccatcaccaaatctgaatgtcatctttacttaacatgacacgttcatgtgcataggtgttttaacatgacacttttgtctccatttgacgccggcgcaccatgtatatctatcaaagtcatgttaatttgtcaatgaagccaattagctcatcaaaagctggaccacgatcattttcgttcataatttcatttttctctccactagaatattcaagaagcaatcttcttttggcttctacaatatttcttctttttgatttcttatgttgtgtattttagctgtttacagcaaggatctttcgaacaaaagctttatatgaggattggttatcaattttaaataattagcaaaaaggaagccgtttatgtaatcagaactataaattattttatttagctttgtcatttgctacttttgctaagtaaacagatcaaccaacccattatattacgatactcgtaataagtcacaatatgtcaatttcttacaataatttaactgaatttatacatataggtctagagtgaaattagaaaataatttgcgatcaatacattacaataacaaaatttatgtaatgtattttacttacatacataaatcaaggatggatgctcatgatttcgtctctaagatttgcttcatctcactgacatttgtcgatcaagctataggaagttaaagaatcacacttttaatttgcttgccaatatctacaaagatcaaataaaataaataaaaacaaaatgttgttgcggaatctaaagtaacttgtcgtattaaaaatttgtttttaagtcgtagggaaatgtaaaactgacgtggcgcatctcgaggccaacgacttattggcaggccgaaggtgaattgtttataattagatttgtaaataaatcactgatactagttcgtctttaacctacataatatttctttattaaattaagtagtacatttttaattatgttttagttgctgttgagtacaataatcttgtcagtaaaataattgcagcaacctaacgagtttggagcaacgacttcttgttgcggccgcgagaagttagatgtgaaaactgaaaatgtgtgcatacacataactactatgtatgactaacatatttaaacaataaaaatgtatgactaccatatgtaataataaaagaaatatttttgattaaaaaacatatttttaatataatatacatacgagtattattgtacgaatttttttatacttttagactacattttcttttgttttatggataattttttattatggtatgtaagtcagaagaccgtttaaaattttaaatagacgaattggtagtcttagttttttaaaatcatattaagttcaagtgacgtatgatggtacgtaatttcgaaaatttcgtttcatgctgagaaaaataactagcgatgagttgtatcaatttgtttatttgtcaacagagttagatttttttgtcttttctcgacgcaatacaagaagttactcacttactctccaactcctccatacggtagcaaagtctagttctaaactacattttgatgaagaagtaagaattttcaaggttaatttataaaaatatgcagattacaaatcaaatgctaattttgtatgttacgcttacggctaaaaaagcggtgggaataataattcgcgaaaaggtgctctctgacgactgattcgttgatctagattctagccgcacatggtgggccatactctccggcccagtatacacacatccatgacatgtcatcatatattatatcataacatacatacacataaattgattagtgaccacatgattagaaagagacaaaaaataattgccgcccgataataataacttctttataaagcaactcttcttcttctttctctcttcactttctctctttttaacctttttctaattaccactttcttctccatatacaaaaaaaacagagaactcacaatgtgcgattcagattttctctctcgttgctcttcctacgaagcagacgttgattccgacagcgagatctcgacctccagtttcagttcttgttcgtacagtgaatctgaggaagaagagatcaacaatggttttggtgttgttcagtcgaagaagcaaacgaagaaactggagaagaagaagagtaatgtgttgttagaaggttacgttgtagattcagctgtgaatgatgatttgaagagaaccaagagtttaacggacgatgatctcgaggagcttaagggatgtgtagatctagggtttgggtttaattacgaggagattcctgaactttgtaatactttaccagctcttgagctctgttactcgatgagtcagaagtttattgatcaagatcatcatcaccattcttcttcttcgccagagaagaaatcatcggttcttgattctcctgttagtcctattgctagctggaagatctctagtcctggtgagtctcaattttttcaaaacttttttaattgcattttcaggttttagtttgtctgattatgttttctgaaaacaggtgataatcctgatgatgttaaagcaaggttgaaattttgggcacaagctgtggcatgtactgtgaggttatgtacttgaagatgagatttggatttgatcaaccaaaagctgaggaatcaatggaggaggaagaagatggtgaaaccagacaatttgcaggagtgaaatctcttatgagactgacctgcttgaaaacaaccattgttgtagagctctttgctcacactgtatgtataaaaagattaatgatctaagaagattttgctaggacattgttgtaatggatgattaataagagagaaataaataaaactttgttctttattgatgtttcataagcatttttggggttttgttacagaaaatgaggttcacagattcagacaagcatcttcttttccatggatggttttggataaacatgaaaggtaaagaataagtatagaaagtggttttcattctcagtctcagacatgtttgatgcgatgctttttgctctcctgtcctgcaccaaagcagtccacattatattattccttgtggtctccataagcatttccagagaaaatagttctgattcgtggccataaaagtgtaatagcaatttcacaagattctgttgctttctatgtttcacccatgagcttggaggagttattacaacctaactgcccctaagagtttggcaactgttgcagtccatgttctaactacagatgtatatgttcacatgccagatatcactttatttaatctctataactttcaacctattaattagtttcttgtccaaatccagagagggaaggtgagatcattaggagctcgtacgaaaactcacctttgacatatatgttcaagcagatgccaatagcttgacgatatccttctgcgaaaagaagaacgagaaaactacagagtaagctcctttaatgattagagaaatgtatgaggggaaacttctactaacctcaatttcaagaggtgatgtagttggagcatatcggtcaacgacatttccttgtctgtctaccagaaactttgcgaaattccacttaatagcatccccaaacaatcctcctttttgttcttttaagaaattgtaaaggggacaagtgttctttccatttacttcaatcttgcattggaaaaagagatatgtaaacaactaggaaaatttggcaccgtgttatggaaattgagaccagttactttgagaccttgtcaaagattgggaattctgctttgaagatattgcaaacggtttccttgatctccatgttgctgcctggctcttgactaccaaattggttgcaaggaaatgctaagatctcaaaccctgcgtgaaacgatacttcctttaatacttataaaaaatttcaacttgttaataacctgagaaaggcacagcgagataaagagacacaccctgagttttgtacttggcatacagaatgttcatttctttgtagtttccatgtgttagaccactgctcattcatcacaacaagattttatatataacgccaatgtaatgtgacattatatgcaataagtaagaacaattaagtacttagtaacataccacttagaggctacattgactataagaagcactttcccggtaaacttgctcaaactcacatctttcccttcaatatcctacattttcaatttgagaaattgatacggagttatgagttatgataaataaactagtagaactcgttactataaagatgaacttaaggggcatatagtcattgaaagattcacttaaaacacacacagacacacaaaacaaagtcatttccccatctaacactaaacagttgcattagtaactagtccttaaaataaaggcactcgtctagattcattatcttagctaaattcgcattaaaacataaaattttcataaataaacatcagcaattagaatgattcttcagaatcaggactaaatatagacgcggatcaacctagagtgtgaaaaattggcttctaaagttcctagtttaagctgattataccttaacggaaatgttgtagatggaagtggatgattgttccaccgtcgatggcgaagaagggtatctgtagaggtagaagacaaaggctacacccaaaaagagtataaattttttaatcttagaggtagctcgctgattgacccatctgcttgatctaggcatcgaggaaagaaaaaaaaaacacagttagtcttcttctctttggtgaacaagacgatctcagaagtcagaacagaacagaacaagcttgttgacttggatagtgtttgaagctttaatgggcttaacatgggccaaaatctagttgataagtttacgcctaatttaaagcccatctcagccttgagagatttaattgcaacttttctcttcaattttcatgacactctagaataataagtttactttcagatgagaaatctagacatcttcgaataacgattaacgaaaaatgatatcacaaaatcgtcaaaccatgctacatagtaaaagggactgctctatagtgtcccgactccaaacaaaaaaaaaaagtggataatgatattagtgagaagcggaagcaactttctcgcagttttctgattcagaatcatcttcagagaaacttggcggtttaggaatgaggcctaatgtcttgaacatgagctggtcagcgtcaaaatcattgtttggtgtggttaaaagcttctctccggtgaagatagagtttgcaccagcaaggaaacagagagcttgttcggacattgagaaccggactctaccagcagacagtctcaccatcgcttttggcattacaatacgtgcggttccaatcatcctgatcatctcccatatctcaactggctgcaaaaacacaaacggttctcaaagccatttcctactaagtagctgctatgacttgcaatttgtgattttagattgtggagatataccttctggtcttcaagaggagtgcctttcactgcaagtagagcattaatgggaacactctcagggtgagaaggaagtgttgccagcgtgtgtaataaacctattctgtcttcctctgcctcaccaagccctatgattcctcctgtttatcggtaaaagaaaacacttgagaacatgtcgtatctatggatttatcaaaatcaacgaatattacaaaactgtgagtctaatgaccaagctgaagacaggtttcaatcctttagttctatagaattgaggcatacaagaatactattttcatatcaaagttacctgaacaaacgttgattccagcatcacgaacatggctaagagtttcaaggcgatcgtcataacttctagtagtgatgacgtttgggtagtactctcttgaagtatcaagattgtggttataagcagtgaggccagccttctttagctctagtgcttgttgtttctcaatcatgcctaaggtgcagcaaacttccatccccatgcctctgttttaaagtgagagcccagaaagttagtaaacacattcagccagacaccatcatcaacatcatattcattctgctcacggatacatcaagtacactttgaaattttcactttagtttgacatgcaaaaatgttcattctagaaccattaatgatcggttcggtgggttatcttttaagttagcttagattcagaagcagctgaaaaagggatcatataatgtagtataaacaaggaaattcaaagttcaacttaaaaagcataatagtaaggtaccttatttctttgatgtattcaagaatctggctgaagttggttttccgtccaattgtatctcgccaagcagcacccatgcaaaaacgtgtgctcccagcttcttttgcctaacaacacatcaaatttgttaattcaaatcagaagagctcattacatcgtcaaaatgcttcattaaacaattagagtcttttggatagagatagagctcggattgataaaaacaacgttttggtacatagtaatgcatgtccccttcttcttgatacattctgctaaggattctacattcagcaaaaataaacattcacaagaaaagtgcaaaccttcttagcagcatcaatgacagcgtccttagacatgagtctttgtgccttaactccagtgctatatctcgaagactgaggacaatatgaacagtcttcactacagccaccagtctttatggagaggagggtacattgttgtacctccctgaagttatgaacatgtctatgaacctgagcctgaaacccaaagagtccacacaccatcgttattcaagtaaaagacaactgataacgagatcagatgagcaaccaaatgaataatacctagctcaatagacattacaaagacactaaaatccgggaaattaagacaaatgtttcaaagagaacaaacatgttctgggttaaactaaaaatcgatactttccaccaataatttaacagaaacccaaagctttctacttcaaatttgtgatttagagtagctagaacaacaaagagaagagtaagtgagagagagagagagagagagagagagagaagaagaagggtaaattactccatggaagaggaggtcaagaagaggagaatcataaacagacttgatttcatctctactccaatcgtttctgggaccttctctgatagtcctctcagcttcagctgaagcagcagataatgaagaatagcaagaagcagattgcagaccacccgagacagagggtcgcaactgagatcgaaatacagatcgaacaagcatcatttgatctgctaatcagaaaatgtggaaaaagaagaagaagaagaaatgagatttggtgtttggtttgtgctagagcttttcactcttcagtgagtgattcacctaacccaaagcagccaccgttggagtttccgccttcgtgtgggacctacgagaatatcatatatctttaactgggctgtaataagcccaatttatatgttgggctttttaatagtaatcaattcaaacgacgacgttattctttatttccttaaacagccggagccgccgtgagagagagagagtcgggggagaagaaatgagcggcggaggaaacaacgtcgtgaacaaagtgttctacgcgacgtcgtatcatccgattcaagccggaagtatcgacggaactgatgttgctccacatgataacggcgtccgtcgagctcttctctgttataacgctggcttatgtatgtatactctctcgttctctctgctcctcttttcacttttatcgtttggtttctgaattcaaatacattgatttgggttgttttgaaagatgatccttctggtgattcgaaggctgttggagatccttactgtactctcttcgtgggtcgtctctctcatcacactacggaggatacacttcgagaggttaatgattgaaatttcacttagtttttgattttcgtgtagactatgttttgaatatgattataaaagtttcttcttcgtaggtgatgagtaagtatggcaggattaagaacttgcgcttggtaagacacattggtaagattttgcaattgctctacttatgacatcaacactttgctttatctttaggaaatttatcatctttctatttctgatggtttgttactttctaccaagatatttgtctaagcagaactgtgattacatatttcctctaagttccacattgtgtagtattgagtctcctcttcttgttacctttttttagtgacgggagcttcacgaggatatggttttgtggagtatgagactgaaaaggagatgcttcgtgcttatgaggtgctgtgatactaaattgcattttctttttacctcttgtttttgttgttgaaagctgtctgaaccacttactaaggcaccgcaatgtgattgtttcattaacatctccgtgtaattactggaaactagtggagtttgtttatcagagtgagaatttttttggtgtttctttagcaggatgctcatcattcactaatagatgggcgagagattattgttgattataatagacagcaattgatgcctggatggataccaagaagactaggtttgccattctttacctttatttttgtctgtaatgaaatgtcataggcgttatattttcatcccttacagatgaaatctatttctctcttaacaggaggtggccttggtggtaggaaagaatccggacaacttcgctttggaggacgagatagaccattccgtgctcccttgtatggttttgctttactcttcctttagcatgtccagagataacaccagctaaacatagtggtcatgaaatgggcattctttctatttgttaatatcagacgaccaatccctcatgaagatttgaaaaagctcggtattcagcttccgcctgagggaagatatatgtcgcgcacacaggtctaccatgtcttgaacttcaccaccactctatagtcatttgaactttacccctgttctgtctctggtgctatcttattgggtcatttgttaatgttcttctgctagaaataatatattaaatgggttgttcaatgtgtctagtggaaagctgatagtttgtaaactaaaatcttggtaccacaacttacttgttggatgcagatcccatcacctccaaggagaaaaggaagtgtgtcggatagagaggaagaatattatcgggaaaagagttctgtagaacgggaagaagagtttaaagagcgaagcagccttaggtcatatcacagtcacaggtcgagcgcacacacacacagttctcatagaagacgcagcaaagacagagaggagtgttccagggaagagtcccgttctgatagaaaagagagagcacgaggtatggaagatcgatatggtgacaacaagggtgaagtttctggcagcaaaagatcaaaacgttctgaagaagaccgatctcgcaaacgtcataaacacttgccttcccatcatcataggaggtcctatagtcaagatcatcattcttccgactaagtaatcatattgtaaaaaaaataacaataatatttggtgttacagatttttttttaataatatttggtgttagagacttttaagagtgccttttgaaccaaagaaaaaaaaagtgtagtgtatgttaatcaaatatagcaaaacagaaattgtcttttttttttagttacaaacaagatatttgttttgcaattaacatgagtgaattgtctttatatcttaaattatggccgtatagatttgattgttaagatataaaaaaatttgggatgatgcaatttgtaatttatctaaatggataaaatagttcatcaaatattattatttttatgaactatgacattacagttggatttgtttctgtagtttatcttatatttctttttttagaactaatgaactattattatcttatattttgttttgtattgaatttgttcgaatataaaaactcacatttgatgttgaaatagagatttagtttgtctgtgtagatactagatagttgttgtatcaacagacagaattgaaacttggtttcagattcttgttttgtttattcaaactcactttgatttgattgtatttgtacctctcatgaattgtctattaggaggatagagagtcgcctcagattgactagagacaatgtcattctcgtactcgttgcatgcaagtggaataaaagtcaaattatccgaaacagggatatcccatcttcctagctgatcagaaaatatggtgtatctcttaatttccggcctcaattttttgttcttgctgcaggtatttgtgatcacaagaaagagattgcaggacatattcttttcgcatatatcctctgcaaattctttatgaggaggggcaacgcctgatgcaggacatttacatgtcaggatttgacagatagaatctttgagtcatatgagtgcattctcagctgcaaaaaacgccatgttgactattacagttacaaggtcttctggacggataattagtgaacagatcacaaaacggactccagccttgtaccactttctacagcgttgatggtcgatatcaccgatgttagggcttattcatgcaatgatgccccacattcattatcattattcatgtaattataattaaattttgtaatatatctattaaattaacacacaccaaaatcatattcataggattgggttcatgcctagtccaaatgggtggaggagaaaagcatgattcatgcactcgtacccattttttcttttaaaactattataaatggtatgtttatttttttgtactaaaaaaaggatgcttttaaaaatcctttaaaaattctaaacttagaggatgttattggtttatgattttaaaagagtttttgtgacttaaaagtgtcatgtaaaatatgttgttattcaatcataatttttaaaagtttgtaaaagttttgtgttattcaattaaaacaaaaaaatctctcaaaattcaattatcacagattaaacatcattcattattctcagaattcatattgtttttaaaaatttcataacaaaaaaactacacattttacgaactttatatttgtatatctacgtatatttttttgttagccaattttcatagaccaacattctttatcaaattgccacataattaggcacaggcttccgtctacgaagggctttgatgttcttacgaaattattcaaatcacattcattttatacagcctttttaaacatatttattttagtatttacatcaaaacatattgaacattcccgtctacttcatccttttaaaatcacattcatgttatacagccttctttatctaaacgacggaggaaaacaaaaaaacgaagatgcgcttttggttgcatctgtaggactggttggttcgaacacttgttaccaaagaacaaagcgtctctcttggtcaggcaagttttagctctcaaataaccaccaacgcaaaatgatcgcagtcaagactctttgactcttatcttttgtattaaagataaatgaacatgtgataagaataataacagattagatgttgcatgtaatactactagactagatctacagaaggatcaaagaaagtagtaccaaagtagacatcaataatgaaattgcaagcaaaacagaataaatgttgtctcctcgattgcaagcaaaacagaataattattgcaaattctcccctcgatcatcttgtgttagatatctgtgccgctgaagacacttctctcgaaaggattcgataaaaatcacagatacacatctcccaaactaacaacacagcacaaccaagcaatgcaaaagcttttcaatgatagaatccagctcccatatatcagcttctttaaagatatcaccggtaacaagtttgttacagttggacattcttttctagaatttccaggaaaaccaacatcctagtatcacacaaaagaaaactcaagttcatatataccatgaaaaaggtagatctgctgtttcttataaaaccaacatacacccgtgtctgaattaataccatctcaaaaacccaactactctaaaaccatcattatcgcatcaaattcactacaagaaaaaacaaaacaaaaccaaagaatccagctcccatatatatctaaatatgctataaaacatcaattgtaacagttttgttacagttgtatcaaatgagtgagtccattgttttccaatatttccaggcatatacaagaacaagaaaaccaacattatttcagggactaaaaatcattccagggctaaaagaagtgctctttcaaactcaagttcagataaatcatttgtatgtcttaaaagacaaaactgtagctgcttttaatttagaggaagacatgagaagacatcagatcaagactgcctccaatcgtgataagaagctaataaataatgtaggcaccatgcaaaaggttgctctgctgtttcttataaacccaacaagcacccgtgtctgacttaatgccatctcaagaacccaacaactactctaaaaccatcattatcgcatccttatcaccacaagaaaaacaaatcaaaaccaaagaatccaaataatattatgtcgccaagagtattgaatcatgaaactatagagaaataagtttcatgggtcttcctctggcatttgatctaggctccaagcggcagtcaggtcaccattaaaagtggcgcctgctgttgactcgataaaaatggagcctttatctcgtaaaacaaaaacattcgaaaacgcacagatctataacaagtttcaaacgaaacgatacatgattgatgcggagaaagagagagaatcgagattatatagtagtgactgtggggaggagaagcaaaaccctagcattttgaactgtgagaataacgggcttttaaactgtctttattaagcccaatcactcattacttgggcccatcatagtcatctatatatattcagaaacgatggcttgttgaaccaatctcacaagtcacaagtcaaaatgacgtagttttgacttcgagcgatgtatttgcatatttggtaaggttttgcaattgtttataagaaaatcagaaatttttgagagatccaactgaaaaaaattaacatctatattcattcatacccataatggttatcacaaatattattatttattatcaaaattcatatatatgttaataaaagttgggttcataacataaaaaacactttcactaagtttatatttgtatctacgtattttttttgtttttgttaaccaaatttcatacacccacactctgtgtagaccaaaaacaagtcctcaaatttcatatataggcctgcctaaaggccaaaaaagttttgttgcccatttacaaacaaaaattccaaaaatgttaaaattttgagccatcaatttttctatttctaaacgtatataattaacaataaaagcgatattcaaataccatccacaagaaacttttaacaagttgtcttaataagtaatttactatacttggaagcttggcttaacatataaatacactaatagttaaaccatattcaacagccagaatattcaaaggaaaaagaaaaagaaaaaaaaaatacattactagaagaaaaaaatgacgtttgaaaagaaaattgtgattgtgtcaatggccatatttttaatgatagtagcaacaaccgctaccgaagttgatggtcgaattcatgtccgacggagcttagctgattttggtggaggttgttgcaacgtttttattcacacttgttgttttcctaaacattgacttaatcacttttaaatatatattacctcgtaataagtttcttctcttctttttcttttctcttaggagaattgattaactgtataaatattcagataagtggtggaccattgaacataatatacgtatccaaacatgttattcaggattgttgcatgtaataaaactatatagttgagagaaagataaaccgtccccacatacatttttttgtcttaaatttttcctttatataaccgataatagttatctatcgaatttagattctcacctagagcaaacaaaaatacgtttgtttttgaacgatcgaatgttttggccaaaatattcgatctagttacgaaaaaatccaatggttgtgtaaattttatgaccatcaatcagtagtgattaaatatatcaatggaaatatttgtatttttatgtgaaaatgttattttatatttaaataagacaactttttcttagataatcaagttttctcagccaaaattcaaactaattaattacaaaatatatatacgatggttatgtgaattttgtgagtatcaattcatagtgatcatgaaatcaagggttaatacaaaaatattggttttgattcctgattacatatatacactgtaagcctatccaaaccttttcattcaacaaagtctccaacttgaatctcaatgtgggatactgaaatattcacacaaaactctccaaagaaaacacgcacgtgtcacgtgtgtgtgcgtgtatatatgaaataaaatatttacatgtatgtgtaagaaaagcaacatcagtgaatactttaggtttagattaattacttcatgaaattatctttgtgccccacacaagaagtaaaacatccaacactacgaatgaagcaagaatagaagccaagttttgtccttaagactctaatcgcaaatcgtctcttggtcgtaccttgacgcacttccgaaacccatcgttcggccgactcgttcattcctttcattgacttccgaagcttctctttgaaactgaatctctctgatcccatcaagtcgtagcttgccaacacaatccgtcttccgtcccgataacatttctgagtgtagcgttctctctggtcatggtgcggcagcgttacataggcgtacatgtacgtttgttccggcatcatgaatataaagcaacgtaagaagagtgatgtagtgtgtatagcctctcttacatatatatgtatatatatatgtacgagagggagagttgggtgagattttggttgaacaattatgaaattgcgtttgatagtggttggtgactgtgttgcaccaaatatggaatctcatgttatttggtcatacgcaacacatgtgaccataatgtgactgacctatgtgcaagccgccatgtactttgtcaattggttaaagaaatcttcaatcctatttaatacatagaagaaacatttggacaatctatttttagataatgggaagagtaatgaatgagcttgccacgtcatcgccgagtcatttctaagctttttgttttttctttcgttctttctctgtttatacgaatgaacgcttgtgttccttaatcctccttggatcatcctcctaattactcagtgatcatgcatagattccttgtaaagctatcttcttcttcttcaccattctctaatcaattgagaagcttgaagaaccagcgtctgattctccctctattaccttcttcaaaaccttttacctcctcctctgtgtcaccacctccaagtcccttgaacgcttctaatcgatttgggtatccttattccgccgatttgtttcgaaatttgtcacctttaaacccaaattcgaggattttaggagtcaatgggattactagtagtagatgtatcagcagtgaagcggtcagagaatcgattgagtacgatgttctgattgtcggagctggaccggccggtttatctgctgctatacgattgaaacaactgtctcaggagaagaacattgatctatctgtttgtgtcgttgagaaaggagcagaagttggtcagttttcaaagtattgatcttgcaattatcagctctcttttggatttttgaaattggttgtgaatttcttcaatttgtaggaggacacattatatctggaaatgtttttgaacccctggcacttgatgagcttcttccacattggagacaagaacatgtttgtctctctctcttcttgttgtttgagacaagaacatgagcactctgtgatattgtttcctgttatatctgtgtttgtaggcacccattgagatccctgcttcttctgataaattctggtttttgacgaaagatcgtgcattttcacttccttctccgtttgataacaagggaaactacgttattaggtacgtgtagagagatcaatttactactctttatgtgaatggtttagtttcttttgagatgtttagtatttggtggtgcttgtatatacagtttgagccaactggtgcgttggctaggaggaaaagctgaggagcttggaacagagatatatcctggcttttctgctagtgaggtaatctcgtacttttacttgtgtttatagttaaaaatcatttgatgttttgcatggtgaatgttctttttaggtgttatttgatgcaagtgataaagttgttgggattgcaaccaaagatatgggaatatccaaagatggttccaagaaagagaatttccagccaggtgttgacataaaaggtctctgtctctttctctctctttttcattttcttcacgcttcctttggactaagatatgtgctttttcaatacacagggcgagttacactgtttgcagagggatgtagaggatcattgtcagaggtcagaagaagcattttgattataacatgcacaagaccctgcatctactgctggtagtaacgaatttctcactttaatttatgcagagaataatcaaaaagtataaattaagagaagaggttaatgcacaacatcaaacatatgctttgggaatcaaggaggtaaataattttatcctcgttatagttattacttgaatccatgtttgaatttacaaaaactttggtatgatagtagtgatttctttcttttttttctgtgattttcaaatcgaataacatctctacagaaaaagtgatcacacattatcataagggttgagaattttctctcggtataactactactcataggtccttttaattgctgatacttcgagctctcaacaggtctgggagatagatgaaagcaaacataaccctggagaagttattcacacattgggttggcccttggatcccaagacatatggaggttctttcttgtaccacatgaacgatagacaggtaactaactttgtcccttggaagatacttttttacggttgagaaaatattatagtacctccttccagtggtgtcaatcacgctcacttggagttttctttttaaccaaacaggttgcacttggcttggttgttgccttgaactaccacaaccctttcttgaatccgtatgaggaatttcaggtatgtcaatttctcataacgatagacttttcagcggttactacaaatacatttctaaaacccatcatttttatcctccaaatagaaactcaaacaccatcctgctattaaaggcatcttggaaggtggtaccgtgcttcagtatggagctcgtactttaaatgaaggtggttttcaggtgagttgaaattcaccacgcccttagatctaactggtgggctgattctttgaaagcagaactatttccatgtttggtatagccattttttaaagatctgtatgtatagattttgtttggttgattgagaaataagatttgatctagttaaccctttatgacagaaataagatttgtttgacatgttatgacatatttgaacttgatgctagtaaaatttcagtccattccctatccagtttttcctggaggagcaataattggatgttcagctggttttctcaatgtacccaagattaagggaacacacactgcaatgaaatcaggtcacaatgtttttgataggaaacgttttctttttccattgtcccttcaatgaattctcatcttaattacatctatatcttacaggaatgttagcagcagaggctgcatttggtgcacttcatgaaggcttaaacatgaacacgtactgggacaacttgagggattcatgggtgtggaaggagctctacgcagctcgaaactatcgtcctgttcgtaatatcatgaacatacatcagcttatatggttttctatctgattaatctttcctggaagataggatcttaatctcatattcttgcaggcattcgagtatgggctacttcctggcttggccattagtgctatggaacagtaagacccggaattgattctattatttttgctgtgttctgtatgatcgtttctctttgctataagtgaactattgatgtttgattacgcagctatgtactgaaaggaaaagtccctttcacgctcaagcatgggaaagcagaccacgaagcaacagatgtaagtatacacgcagtgggaataaattttttcagatataatcagatcaaaaccatccactgcacaactaaagtctagctacatctttatgcagcttgctcggaaatggacaccgattgtgtatccaaagccggatggtgttttgtcgtttgatgtgccaacttctttatacaggtttgtaccacggcataaactacagtatctttaaatgtaaaagtactcctcctatgatatttacaagtagttgtatcctgaatgatgatgataacaggagtaataccaatcatgatcatgatcaaccatctcatttgcgcttgagggatcctaagattccagaaaaggtaaactttccagagtatgctgcgccagagtcacgttactgcccagcccgtgtttacgagtaataacttcctttctctaccctctctttctctcaccatatgaaatttgatcaatatatcaagttccttgaacaagatactcatcttcgtttctgtattgattcaaaacataaaaaagatatatcgaagacgaagagggtaagccaaaactgcagatcaacgctcaaaactgtttgcactgcaaggtacgcatcacttgtcgacttgatgcactttgtgttaaagtatgtctattcatgtcattcgattgattttggagaagcttaaattggttttctttttttttttaatctaaaaggcatgtgacatcaaagatccaaagcagaacatagagtggacagtgcctgaaggtggtggaggccctgcctattccctcatgtagtccttaagattcaacatacctctctcactttaccatatctgataaataaatgagactcaacaaaatcctaattgtctgggttttctttttactaaatgtttgtaatcattagtgttacctgtgtttgtacactttcacttgacgtctattccaaaaaaaaaaaaaaaagattatcttgacagtaagaatgggcagacgagaaagtagattcgaaacgaagtatgatttataaaaaaaaacttgggtttctcgattgaagtatcatcaacaattttgacatcatgctgaagatttagtttatgagaacaacaagaacaactaaattaggaaaagaaaagaagaaaaaatctaaatgacattcattttttatacagcctttttttttttatctaaacgccgcaggaaaaaacctaacgaagatgagcatttggttgcatctgtagggctagttcgtaaacttgttactatagcacaaagcctctctcttggtcaggcaatttttagctctcaaatcatcacctacacaatttcaaaacagctatgagttagtgatacggcttctcttccttcaattcacttttctctaagctcacaagaaggcaaatcacaattgaatctgttgtgttttctttagcaatttatggggtttggttaacaataagagtatctgtatcatcagattgttcgtctgagttttgctctgacggcattttcaagtctatcaaattggctctctgcgatcaggtcatctttgtatgctcttaatgatcacagtcaagattctttgcctcttatctttggtattaaaggagagttttgcaacggttgttatatttctatacaagtagttagaaatcctaatcagagagtatattcttatcacatttaccaaaatttacaaatccaaggtatgctaaataagcaaccgttcgtacacacacactccatcatagctccaagaaaacaaaggggatccaagagaaagcacaatttacatgtgataagaataataatctgtgtgtgatactactagactagattcacggtagaatcaaagaaagaagtaccaaagtagacatcaataacgaaaatgcaagcaacacagaaaaaatgtatatatattcaataaagcagtcctatgttattttcacaaagtttcatgtaccctatataaaaatgcagactaaatgctccagtttcaacgacagcgagcacatgctttatcatatgtcaacaagaaaggatcagaaaagtatgtaagtaaagcttatggtcattcaactcagtcatcaggcagagggtagaagagataattaccttgaagattatgattatgatggagagtggagctagtttcaaggcccctgtccagccggagtacctgaagactgttgctgctgtttctgctgtatctggagaagaaggtttgctgcaaattgtagtgttgactggtatctctgattcttatcgacctccccatctgttgtaccctgaccatccccagagatcataggctgcaatcgtagtgcttggttttgtggctctaaatttgccttatctgctggtggttgcatggcagcttgaaattgggaagggtttaagttctgtgcctgatttgttgttacgccatgaaaattagcttgctgataacttggaattggaccatagttttggtttggcatggacgcttctggttggtattgctggaccatgggctgagaaacaggatgatttgacgaaccctgagtgtacatggaataattattatgaggcatatttggtaacggagacagctgaggcatgttaacagattggctctggtattgcatgttgccatggaccattccactagtgtagttggggttgtttgaagctggagggtaacgcgaaggaggaggaggtagttgcccagctggagtgtactgatttccgtattgttggaatgactgatttgacgcatcatgaactgtttgtggacctcttttccaagcttgagacggtgcttctccattgtacagtccattggactgatgtgctgtggaaacaactgttgaaggtcctgacataggttggtgactctcaggggcagcaggttgagaagttgcagggagaatagatgccagagtggctaaaagctccggagttaaactaaccccagcttgaggcgctgcattattaggtattctgagaggctcgctaacagatggttttgaagcagctgtcaaatgttctggtgcacccctaatgtaattttccctaggaggatataaactgtgactagcattggcaggtgaatcccgggcttgatccatataatgcagaggattggactgagattcttgtctgtatgatgctgtaacaggaacggctggcgggggtaacttgagaacaacaccatatagccgttcttgacgggtcacttggagtacatcagttaagaaatctgatggaggcaccaagaataaagttgtaccatcatctaatttggcaacacccgcccgatcttttgagctaaggtaccggagaaattcagtgtaagacgcaaaatcttcttccctgtctggtacgaaaaaaacgatctcacatccaatggcaacggcgtaatgtttagcgagcatattcaaatcagttcttgctgaacaattgacgacctcaggcctataaatcaattattaaaaaaaaaacaaagtcagtaattgagggcaatgccaaaaatgaatcaacaccatgaaaatcaagacatctcagaaactaaacaagtaatagtaaaataaaaatgtactatctataataatgttacttccatcgagaatgaaatggaaaatatataaatcgctctgaaaaagaaaacactagaagggttaaagtgctagaaattagtactcacagtttagtttcaatcccctttcccataggtacacaacgagcacaacagacgggagttccacccttggcaatcattcctctccatatgtgatcagaatcaggggggccacggataggtctagcagcaactgaacctcgaccaaatgacctctcatcgacacccattggagtaaaaccgtccactgatccatctcttctggttcgtttactttctctgaccaactgagcaggatcatatccttcccaagaatcggggtttgacctcatagggcgcctcgtaccttgtgcaggagatgggaggattccaggtcctgttggagatgggagtattccagttccatttgcagatggcctcctccagtttggctccttaccaacaacgtcattgtattctgcaccattatatgaacgctcatttgtacctctgaggggcctcatagacccaggaattccagtagaatgaggagaagatacaaatgaaggatcattattgaacatatctgtccttgaccgtttcataccagagtaaaaactagtatcgtcttgctcaggaggcaactcatcgtttgagtacataattttgattctaggattattgaataacctcccctgtaggccttccttgcattggcgagcttcctccgcgctcctaaactccacaagtgcaaaattccttgatgggtaactttttaccctctcgatctcaccaaagagtatcatcgcattgtgcagaatttgctcatcattgcattgtgtagcagtaggagggaacccaatccacagaaccttacttggctggacatctcctttaaagtcttcatatgagtgaggatactgtaagaatataacaaaacgtcaaaaccagtaacctatacatatcactagtaacaagagacatactttcaacattcaagactaacctgcggtttatgattcatattgccatttctgttatcgtaagagccagcccattgttcctgaagataacacaaaggtaacttgatttcagacttaagaagttgagcctactctacaatgaaatagagacgagtaaatactgctcctaggggcacaagacagagctcagccctatcagtttgacgcaaattatgaaactaaacaaaatgtttactggagcgttttcaaaagtaaaaatcaaatgccacaagagtgcttactttttttggcgcttgtgaccggagaaaatcaacacgcaaaaagctaccacccataggctttccattcatgctcttagcctgtaaagcatcatccatctcataataatcaatgaaagctgtcttgcgttctctgagaaacctaaaatcctcgattttcccaaacttgctgaactcttcctccaggtcatccttggagacattagggccgattccacccacccatagactcttacaaggttttgcctgcaacaagaaaaggtcgataagaaggcgatactacccagataggttgccaagaataaagcatcaaacatcaaggaaactaaacacacaaactaactagtaatttcaactacactacgacaccaattcatatcaattgctttcctaaacaaataaaattgccgcaaggagaaaccatctcctctttctctattaaatcagtgttaatagtttctcttgcctaaacatcagattttgtctgtaggagaagtatgtagtccccaaagccggaaagacattaatactttctgcaaaacattcctgtctttatccattgcctgagtcccaaataaaccaatccctgaacactccatttaagtactcaaagccggcaagacattgaaatttgagtctgcctgcaaatgaatatttgtcttgtccactgcaactgtaccaatcccagaatggttgtgaagaagtcaacttcctaaggaactacaatgggaaagcccagattgtacgtagggatgggaattgaggaacaaacatggttcttcgaataaagcgtttctgattggtagagttagccgccttaacaaccacgtaatttgtcttcctgaagcatcgagccaaaacaagcccaaaactccctcacactgatatggatatgtgccagcgatactaggagttaggacgatacggttgccagaattttctgtttcgcagatgcagttattgatatctacgtaccgccatagacaaatttctccacgcggtttgatttttgcaggaaactgaacttttaaactccaaaatttcttatctgtttggccgatgatagagtttgctcgcttccaaattttcaccattgcgaatttcgagtggagtacgcaatacattcatactcaagcttgtgagatttaacatctgaagcgaacctgaaatcagactgctaaacgcggatacaagtttgcagataaacgacaatcggattaaaccttcttcgcataaacgagagtaaacatgtgtttgatgtattcttttgcagagctcattcgctaagagttatatatgctttaacatcaaattttgcagagcttctctgtggtttggctttgcgcgagttcgatataaccaaagtaatttgagaaaagacgtttcgatcggatcaggtttcgccttaagctaacgacgtataatagaaaaaaactaggtttcgactttgatttgtacgatgaggaaaaaaaaaacagattcaacaagaaatttttggactaaacaagcatcatcaaagttttgtgaacctggactatgaattcgcaaaaagagtataatcgttgacaaaagacaatcaaagttagagaacaaacgaagatatagataagaacaaaccggtcgtgcgtattcgatcttaatttgacttccattcaaatttgctccttgaagagcctctttggctgcgactgcttcctccacatgtctgtagtatataaacgcaaagcctcgtgaagaatacaccgtgattctatcaatatcgccgtatcttccaaacaactcggtcagatctgactctgtcgtctccggcgttaggctaccgacccaaagattgtttgactggaaaccggaatcatcggctctgaatggcttcatagataacgccatcgggattgtttcaattgacgatcctatggatccaaaattccaatcccagaattgattgttttacctttgggattatgagatttcgattatccacgtgacggaaaacgagagacgaattgtgcgatgatacgttgagcaagaaaaattcgatgagagatttgggtgttcaaaatcctacctacagagaggagaagagaaccctagattgagtttgaagacgaagaagattagattgtgagagaaagagaggccagggaatatcgaagcggcggcttttaaaggatatataaggatactttccttttttttcttttttttttggaaaccggatcaaaacggtgcattttgatagtagttatggcaaattcgtaaataatcatatatccatcccctctcagtgaagattacatcctgatagcataatgtttgtacataagacatctaataactgcaattagtctctgggattgttggtgttcgtttagtggaggactttggaagcttcacatgaacattggtttagatgaagcatcagaaacaggtatcaccatccttttaataaatgttaagcattcgacgaatatccgggctaggtggtagagctcaagctcgtattgctcgtagatgaagaaaccggtgaatgagaacgacataactgtccaagcaaagcgtagagaaaatgttatggataaagaagttgttaatcatgtttatgaagttgttaatcatgtttatgaagtgtgaaaacaaaagctttgttcgagtacctgtgaaaagaaatgctgccaatgaacgggatacaatcagtttgaggagatacagtgatcctgcaatctgtttttatgttttgttttaggaaacgagagcaatgagatatttttcatgtttggtgagcataaagagtagaattgtaccttgaagaacttgatccagtctcctccactgcttaaggatttaaaactgcgaactccttgattccagacaactacgatatcactactaagatctctcacagcggattcggagatctcaaatctccatgggggtattttgttgacttgaaacccgaaactgtcaaaataaatcaatctgtcacttagttgcatatagatttcaaaggtgaaatatatatacatgggtgcatcatcctttgataggacaattttggtatcacaacttattttcactgccttctataatggtaaagttctggaaccaatacttacatctttgacggcacaaaagagactccatagagagcaacagcaaatataaacagaagttgggctgcagatgaagtaaatgtgtttccagaaaagaagaaccagtaataaaacaagtttaggacaagaaaagaaacgaaggttttcttctcatttctccacagcaagatgtctgcaactgcatgagaacatagagatgaaaagctaagtcagtttaaagagattaatattaaaagcttgcattgaccagattcgctttgagtttgtttatatgtgcatgaaataaagttggaactcgcatgaaattacatggactggaagaagatgtaaattaaccaagcagatacttcagcatgttctagacatctagaagcaaacaaatctaagttgaaaatagagatagattctttccaggttaagccttgtgaacatgcatcatcatatccatagctagatgagatgcggacttcaagcaatacaactgaatacttagccaagaacacttcaaaaaggcattataattgttaatagcgagatggttctaacctttcccacaaccaagaagctgatctgcagtagattgaatgattgtgtcatcagacttctcaagatcccgagagaaccattgaagcgttgatgcaataccatcctacaaatccaacaagagctaataaatccaaggaaggtactaagcagctgaatatgcaaaaagccaaaatactatccaacaaactcacttcaagtgtcacaacaggtgtgtaaccaagatgcttcttagctgcattgcagttaaaagttctcgttgatgaagctaacagagcatactgatgtgctgtgtcataattactcccaaggccctccttttcatgtgtccacttaagaagtgagaaaacatacaaaaccagccgaacaggaagtttaatggatggtctgcaattaaagaggaaaaaaaaatatcaaaacaggtaaaccagaaagttagctctaaggatctaaaacttttcaaaatgatcaatatttaagacataggagaaggaaacatatacgaccatgtataaaatactaaatatcagcgaatcaccatgtatagatagtttatatctaaaaaaactaattgaatatggctgttctcgaaacggttcttctagacatgtctccaggacatctatcaacagaaaattaagatcttttgctttaagaagggaacattcaaggtaggttcagaagttctgaggagcctttttcccatgctacattgataatcaggaaacagaaagataaaaggagttcacagcaagtttcattgtatcaaaaactgttcggatgcttatttaccttgggtatcccagaccttcaactatatggcttacaaagtcccaaaatctgaccggcttgaggtttgtgataaaaaattcctacataaagtcggcacagtaaaaattcatcacatataaagttcatgcgctttcaggagtgatttggcaaatacactttgactcaaagaggttacctttccagccacaaactccatctgtgaatctaatgctttaacggcgcaaatatgtgcatgagaaacgttctccgagtaagtgaaatcagagatattttcaccactcccgagtataaactgaaattttaaaaactaagacagtcattcctccaaaaaaggaaaactaagaatgcatcaagctcaaggaatactaccaggtataataagataataaacgtagacgcaaaaacgcaacaatgggatgaactaatagtaagacctttgcatatccggacttggctagattcaccaaaaaaggtacaaactctgtgtcaccaggtccaaatacaatgctagagcgaagtgcacaagttaagagaccatctcggttgttagccaatttgatcaacgcttctgcttgagctttgaagtctgtcaacatagattggaactgcaagagaatcagagcaaaacagatatcatctctgaaaaagaccaacgacaaaaaccaactaaacaaacatgctcaaggattaccttcaaaggacgtctcaaggattcatcaccatcacgtataggttgggaaccatcaaaaacaacatcagctgtactgttgtagataagttttctgactccagattcacgacaggcagaaatcacatttcttgtacctatacgagaaatcgattaaccacccaagtttaactaatataatggtaaaccatcttgaagtgactaagaactttaccttgaactataaccttgtagcagtcaaagtaatcatgggaacgtaaatcagtagctcccatgtaaaatacaacataggaaccctcggtaactgcaaggaacaaaacagtcacaccaaaactcaaatcagaacccgaaaatctcaaatagccaaacactcccccatagcattttctagataccaaaaaccgatccatcaatgtcatatctaacaaagtgcaacaggaaataagaggaaaacctttaacgatctgaggtttatcacgaacatcgacgcagtgataagaagcgcggccggaggagagagcatcctcgaggagcgaatcggattcatcaagatggagagtgtgaccggaatctgcgactcggactgtccagtttccgagacgaagcaatctggagacaagcgatcgaccaatgaaccctcgtccgccgaggacgacacatgtcttgaggtgagaatcgccatggacggaatcttcgtccattgttatcgccgaattaaaccccagctctatcgccttttctcggtcgagtcaactcagagaaaaaggccgagtcgagttggatcagtgcacaaaaagctgaatactaggggttgcttggcgggcagactctccactcgcgcaaccttttagcgttttcctttattcttcggctgtgtaattataatttaatattcacacttttttgccataaatctatggatttgacttaatttatgtaaattatctgtataattattccttggttacaaacaaatctagtaaagctaatattaaatcgtagacgcacggttgcgttttcacgtttggtgagccaattccatcaatccaccaaacatatgatttccattgttagaaatttggtaagcacttgtagagagaaactaaaccgtatctatctatacacttgtgtatgtatgttgaagcattcattacacttgaaaatctcataatttaataattgagtttaaactaaatatttagatttttttgtgttgaatacacaacttcaaatgataactgaagaaagcccaaaacatataaaatattgatctttgcagctgatgattgacttgcaaatttttctatacaaataagaaaatatacccaagttttcagaaacgatctctggctctctgtatacgacgcaatgcttcagcttcggttgctgagtctggaatgcttaaagattttcggatatctttgctcgatattctgaggaatgggttacacgctttctcaaccttgacagtcgttggaatctacagacaacaaatccgtaagtaaatgaaatctagagagaggtttagagagaaagaggagatagggaagagataagaggttttaccgatgggagcccctggctgcgaagatgggcgactcgagttgcataggactgaagagtttcattctttggttctacggatagagcaaacttgagattgccctgtatcatggaggagatataaaagagagttgaacaatgtgaattaagagtatttatgtgcgtggaacttactgctgtgttttcacggccgcagtatatatttgtatcgtctggtagagacacgatcttttggagtgatgaaagcatctgagtcataaggcaaaaaaggttttctcgttaaaaaggacagagcacaataagtttgcttctgtgaaagaaactacaatgtacggttattagagtactcccaagtcccaagtgatctctccataaagtctataccatttgactcagcacagtttgccacaagaaagtaaccataacagtaaaaagatatgaaggttgaaaaagaaacatgatttagaaaaccacaaatcacttggcacaatttttgccacaagaaaataatcataacagtgcaagggtcgagaaggttgaaatattgctttttgaaattgatgttacctgctcaggggtaccttctgaaagggtaccacaggataagctatatatcaggtctcctgtgaatattgtcgctgacccgggaaagtagaagctaatatggcctgcttgagaataagtacagttaagtgataaaacatggcaccaagtatacattaattactagttgtactacactagaacgataaaaaaggagagcagttacacagtaatgtattgaggataacaaattagaatgacaaataagatactaatatgtgatccaccaaaggtttctaacgttggcaatatttgactgtatagatgtgttcttagtattttacagtagaggttatggcagctacaaaccttgtgtatggccaggagtgtcaagtatccgaacctcatggccagcaaacatccacttatcactatccttcagaagtatgtcaattccaggaatccgatctttatctacagctgatccaatcacctgtcggcaacataagtcacataaaaacacttgagtatatataaaagaagcaaaaacgaaaagaacaactcgacaaaggtgcaaaacaaaaaggtccaaaaaaccattttttctggtaagactaatactttacgacatctcaaaaccaaaccattgtattgtagagctcaatgtttcacagctatcagaggcaagagacactccaaggaaacaaaataaaaagagggctaacttgcgcaaagagcagaaacaacacaagaaacaaggtcatacagttttaaacagaaaatagtatcctcttacctttgcgccatacctttctttcaattcagcattccccccaatgtgatcatcatgatgatgagtattcaaaatgtaagttaaattccaattcttcctgctcaatgcttctataacaggtgcagcctcagaaggatcaacgactccaactgttccggtgtcttcatcgtgcaacagataagcatagttgtccttactgcagggcacctgaaacatctcagtaaaatagatcgttaataatatcttcagcagattgttacagagttgtttcaaccagtagattcaagatgaaaagcatactaaccagttcgatttttaatgaggatggcatgttggaaatgctacaaaagtgagtaatcttaagagtttttctagctccacgcaatgttttcagtggcatggataataaccacattactccgtataataagcttttcctgaggcaaagttgtctcaaaccaggccacacacaaagctgacctccaatctgtttcatgaaattcaatcaacaaatcataatctgacacaaaatagtactataagatagccaaacaaagactactaaacacagttgacaaaaaaaaaaaacccatagaagcttataatagataattcaaccgccagtttcaccaaaccagtcaatagcagatagtaattgagccttatgatcgaatcagtaacactagcacacattcaaaggaatccacagaaacaattttccagcacacaaacgaagatcggtatagtgaaaatctgaataaactcaaaaaaggctaaatctggtaccaaccacaaaaccagatcggaattatcaaaagcaaagactgaatcaaagagaagagtaaaaaagaggaagagagattaaaccctagaacacgaaggaatcgatgaattggtggtggtagatgaagctttggagatcacaggcatcctctatatatctcttctctctgattcttcagatagaaacgagaggatatgattgtggtacctttgaagaggcctcctttgagagatattgcgcgtagatagaagaaactcagaattactcgcctgagctgtgatgacgagtctgcgacttcgacaggaaacaacgtcagagctaaagagacagcttttactctttttttttctttagtattttgttttattttatttgtttttgctttttatttatttagctcaactactaaatcccatcaataaattgttccgtgctatctcatataattcatacaaatatttgaccacggtttattattttctttatttgaattgggtaataaagttgttaccatatgctctgttattatttattaaagttgtttttgctgtaacggtaatttgttacttttttacttgttttgctcaaattatattcccttttgaagccatgaaacaaacatttcctttaggataaacgcaaaaaaatagaaaagatttcctttggtcaatatttgctcatttggttaaggtcaatttagattaaacgcttgccttgatcatttgggtttttatagaatatataaaatttatcttatcaagtaagaaaaaaaaaagcattaattatatcagttatcataaattgaaacttttaacattagttgataatatctagattctgggatgtgtatatttagtttgttgagattcttttataatcattatcttttttctttatctcaattgaaagttgaagaaaatatatagagttcaataccaaaatagttcggtaagaattgtgcatatctctatcttattgacaacgaaccatttgtatttattgtatagaacctcactttcaaatatatgattggcttatgtagttggttaacatttaatacatctttttgacaattcatatgtttttaaaaaaacttcaaagcattccttcgacctttcttgcatttttctttacatgagagacatgttttatctaacaaaaaggacataatagtgtgtattttcctaaaggtaattaagtttttcttaattcagaactttagattaaaaaaatcgaacgcattaacaagtatcattggtgaccgacatgtgcttattctcaattaaattagtaattgaataaaattaccaaaccaaaaccggttttcagacacgcaactgaaagccgtcgatatttaaagggtttatcagaagtcagaaatctagcacgacagacaaaacataaaagatggaggaaaaaagagaaaacactaactcgatctacatagttcccgagctattggaagatattttccttcgattgcctttgaaatcaatcctgaaattcaaaaccgtatcaagacaatggagatcaatcctggaatccaagttgttcgtggagaggcgcgggaatcttcaaaagcaccaccggaaaatcctagctgcttacaactgcaactactttatgcggccgagtatcttccctgagtctcgtttcgaaggggacgaagagatcgtttatctacactgcgacgccgcgcaaccctcgatgacttgcgacggtttactctgcatcaccgaacctggttggtttaacgttttgaacccatccgctggacaactccggcgattccctcccggcccaggtccagtaaaaggtaaaatctaacattatagttgtttgtttcttgcagtgaaagaaattaaaaatatttacaacttgcaggaccgcaggaaaattggctattgggattcggtagagacaacgttacgggcaggtataaaatagtgaggatgtgttttcatgattgttatgaatttggtattcttgatattgaaactggtgtatggagcaaactgaggtcacctcctcataatatgcttccgggaagtaaatcggtgtgtgtgaatggatcaatctactggttacaaattagtgcgggttacataatattagctatggatcttcacgaagaaagctatcatggtgtccaccaccttccggctacgtgggtcacgcaggaaacccagttagtgaaccttgaggaccgtctagccatggccatgaccaccaacgttgggcctgaatggatactagagatctggagcatggatatagaaggaaaaggatggagcaagggttactcgtggagcaagagttactccataagtttagcccatggagttggtttttcctggccatggcagaaaaggtggttcactcctgtgtgggtttctaagcaagggaatcttctcttctacgataatcacaagaggctattcaaatattattcaggaacagatgagattcgttgtctctcctctaacatctgtgttatatcttcttatgttgaaaatttggccccacttccgttaaaaccaagccatacgcatcatgatcttgggaattcgaattccaagttcagcacgtccagatgccacttgtttccgacgcgaggttcttggatatccaaagttttgtttacctctatactatttgggtatatctgcttacctctctagaagtttacttatttagtatcaaactattgttgtggttctaaaatcttgctatatttttaaagttaattcaattaattgttgcttttatagtttactctactattttattaaagttataatgttaagatccgtaagtaaacattgtttaagcattaattagattattatcaacattgtttatttatgagaaatcctaatatcaactatcataaattgaaacttttatacattagttgataatatctcgatgatattaaatatgatgtgtatattttagtttgttgagaatcttttatataatcattacctctactgaaagataaataaaccaaaacaaaaatcagtttgttcaatactaaagtttatttcagttcagtaagagttgtgcctatcttattgacaacgaacccccccttgtattatttgtataggacctaacttcatacccatttttcaaatatatgattgattgccttatgtagttggttaacatttaatacattttcttgacaattcatatttttgaaaaaacttcaaagcattccttcaggcttcaaccaagctcttttatttctgaaatcactttccttgcatttttacatgagaagacatgttttatttaaccaaaaaaaagggacataacatttgctagtttgtattttcgctcacacttgttgccgttaacctttttcctaaaggtaattagtttttcttcgtttagataaaaaaaaatttggaacgcattgagatgtgaattacaagtcataattggtgaccgacatgtactttttctcaaataaattaattgaacgaaattaccaaaccaaaaccggttttcagatatacacttaaagtcgatatttaagggtttatcaaaagtcagaaccacgacgacagacaaaacataaaagatggaggaagaaagagaaaacactaactctatctacatagtttccgagctacttgaagaaattttccttggattgcctttgaaatcaatcctcaaattcaaaaccgtctcaaaacaatggagatcaatcctggaatcgaacttgttcgtggagaggcgtagaactcttcaaaagaaccacccgaaaatcctggctgcttataactgcgactactgcacgcggccgggtatcctccctaagtctcagttcgaaggggacgaagagatcgtttatcttcataccgacgccacgcaaccctcgatgacttgcgacggtttagtctgcatcaccgaacctggttggttcaacgttttgaacgtctccaccggacaactccgaagatttctacccggtccagatccaggtaaattctaatattatactttctccgtcccataaaaattgattttttagaaaaaaatagaagttttacattggaaatgtaaaacttagaacagttgatttattttaaccttcattaaataattaaataataatataatatactttttaaagtgtgttaaaaaataaaattatcactagacaatatttcttaaaaaaatgtaaaatttctaaaaaagatccatcatggtaaagcgcagtaaaaaaaaaatatttttacaactttcaggaccgcaagcaaattggctcttgggattcggtagagacaaagttacgggcaagtataaaatagtgaggatgtgttttcatgattgttatgaatttgggattcttgatattgaatctggcgaatggagcaaactgatgtcacctcctcatataatgcgagtgggaagtaaatcggtgtgtgtgaatggatcaatctactggttacaaattagtgtgagttacataatactggccttggatcttcaccaagaaacgttcaatggtgtctaccacctcccggctacgtgggtcacgcaagatacccaattagtgaaccttgaggaccgtctagccatggccatgacgaccaaagttgggcctgaatggatactagagatctggagcatggatatagaagaaaaaggatggagcaagcgttacacatggagcaaggcttactccataagtttagcccatagagttgttgtatcctggccatggcaaaaaaggtggttcacgccggtatcggtttctaagcaagggaatcttgtcttctatgataatcacaagaggctgttcaaatattattcaggtacagatgagattcgttgtctctcctctaacattaatgttatatcttcttacgttgaaaatttggccccacttccgttaaaaccaagccatacgcatcacgatcttgggaattcgaattccaagttcagcacatccagatgccacttgtttccgacgcgaggttcttggatatccaaagtttttagaaggaatgttttgtttacctctctagtagtagttggttatatatacttacctctctaagagtttacttatttagtatcaaactattattgtggttctaaagatcttgttatgtttttaatgctaatgaatttaattgtttgcttttatagtttactctctactattttattaagggaaaattagaaataaagggggtctaaaaaagactttgaccatatacacaattttattcaagttataaactaaatatacttttttggtaaattaatgaagaactgttagattagaagttggcttactttggacgttcatcgttgagggtaaaggagtataagaaataaccagttgcatcctcaacatcatacaaacacgggttgataatgtgtgatatgacttattattatgcgattactaggggattactggtatatactatatcctttaagataaggatgttttgcaaaacctttttaaaactataataatcaaaacgtacattcgagacagtaacaacattgagtggccaaagaaaaattatttgctaccttaaactaaattggaatcaaatctatgtaaatcggatttttgcaagaatatgctacaaatccgattttctcttgaaagttaaactggaaacagaaaaataaattgaactaaaatcatatagttttatttaagaaaacaaaaaatggaataaagaaaatacaaaggaaaatgcaactgctaaaatcactaaacaaaaataaaattgacccaagaaaaataagcaaaataagtggtactaagtaggtattgaactccgaacgtaaggtgtggaatagagagtctagctgagctaaatgattttatactgctactgttattagctaacttttaacaaggagtattatgctgtgggtctgcccctatcacctcttcctggcgaatttgccattaaggcaaatagcaaaataggcgaatagagcgagtacgggagtgatatctgacttcacagcagcgtccaccaaacctgtcgtcccaaatggccaaattagtaaatgaatgtaaaaaaacaaggaagatgagagttcacaaacttacttttagcattatcgagaaagttcccaaagcggcccttctccattttggtaaacctttttttactagcaacaagattggaagcaaagataactcgttcctcttcggagagatgaagctttaacatagtgtgtgatatgtattttctacaaccccagttaggacaaaagacattgtctacacctcgtcttatttctgagactatgcgatctgcaaataaaagcaatgactaaccattagtagtatctcaaagcaatagaatatagcacacaatgttaaacagagattagcattttgtatataccttggaagcagccatcacaaatgaagtgtccacaaccgacgttttgacaaggttggtcagtgtaacaagcattacatttagccttatagcaaaaaccaaccaacaaaaagaagattcataatttttccaagagttgattaaaaagacagagttcaatagagataaataaatacctgggcaggatgaagctgaggatatcgaacgaaataacttttcatgaactcgtaagagtcagactgtaagtaatcagcagtaaggatagaatcgtccgtacaaaaaaaaaaactcaaaagtgaattcaaaaaaagacaacagtaaactctaaacgtcgacggagaagtcaaggtaaaaacataccagtgcaagtaaactaggtaagcagcggcaagatcaggactgatactaatccgcttagcgagctttttgatggctacttgtgcagcaacgagaacctgaaccaaaagctattagctactaaacaccaatatttttaatcaaaaccaataagcatgcgtagatacagaatcttaagcatcacatcttcgagatcaactaacaaaacgagtaaacaatctaacctcttcttcaggatccatcttcgatatgcgcaggacagactaacctgaaatattttcagattcccaattaattccaagtgcccaaagtatgaatttctcgcgataatgagaaagattcagtgtctttcaaggtgagactccacaactactaagaacatgaaagattcagattccatagtaagagcaaatttcatagcgcattaagaaaaataattctcgggaaaatgagattgattcatcagagtctttcagtatcaaactgagactccacataacaaactaacatgaaaagattcacattccaaaatcccaattaagatcgcgcctaaaaacaattctcgggaaaattaaacaagaacaaacgagcgataatgaggaaagattcagagtctttcaaactggagattccctaatcaagtaaaagaagaccatgaaagaatccgattccaaactatgagaaaaatcaaagcgtcgaacaaaatttcccgagaaagattttcccggaaaataatcaaaaaacgaacaatcaagcgataatgaggaaaaagaatcaagagtattttacactgaaactctataactaagtaaccgaagatcatagaagaataagtttccaaattgagagcaaattcaaagaaaacaaaagtttctcgcgttttcccggaaaatggagatttagaattgcgactccataactaagactcataactaacctctgcttctcggcgcgatgatttgtgtgcaaactaatctgatttttgaattttttcaactctgaagcaataaatttgacttttaaaggcgtttgggcccattacggaaacaacaagtaattaacaagagaacagagaaccgcatagagagaaaatgttaagatcaaggaagattcaccaaaggccaacaaatatatataccaaaaagcccaagctccaattgggcctggtccccatggatttgattgtttcgaataacaacaacacctcaagcatgatactgcaaatttggtgctatcatgaggtttttacatgttttgagactattatgctataattcaaatgatatgtcgaaaagtatataacctaaaatcgtagttagtgctaagatcaaggagtaatttggttatgattcatttaatgaatgtgattgttattataaatgatggagaaggtaccaactctcaagtctgaaaataaaaatccaaattgaatccagagttgagaacgtatttggtttttcaaactgaattaaatccaaaacacactcaaactcgaaaagtctcaacataaatttaacgacacaaaataaactctcctaaggaaattataaaatgatgcaaaggattcgtcaccaaaggaactccaatctgcagaagaactttgcttcatcttcaaaggtcttgtacactcaaacctgaaaaagtgcaacatagtccacacctcagaacacgcgtacaacagatatgagaatgaagatacttttcaaaaacatagtaacatactaaagccaaagcaaagctgggtttagcaatcaaatgccaaactcagaaaaatttacaacggaaattgtgtgatgaagaagcttactttaacgtacataaatacttagcaaaattcaaacaatgaaactcaaggcacagctatatttaaagtccatataacataatgaatccaataatgttgaatgttgcaatacacacgcaatgtaattaagcaaagacaggttgtttcgaacccatatgccaaactcaaatttcatcaaggttttaaaatgatctaaagtgtgagaatttatgcagtgtagtagagaacaatgtaaattgagcagagttaagaagaataaaaaacctggaggaagagactgcttaagcttgtcggctttctcttggtcaaagacgcagagcgtgtagaggtacctcgagcatctgaccttaaacttgacaatatccttgcttctcttgatcttcacagatcgtgcatctttccttctagctgtcagaaggaagtccttgatctcgtggatttgcttaggctgcaaacattaatcaaattaatcaatcaaaattcaatacaagattcaataatcccaaccaatcaaaagttaatcacatgataagcagacacgagctcagcacatcaaacacattaagcaaactctgacctaggtttttggttaattcactaaaacctacacgtttcactatatcctaaacaaagtaagaagcaataatcaaagctgaaaatgatacaaaaatctacattttttgagaaaactcttaagatacaggaacagctctactacactatgaatgattgcaaacgagctatgaaaaccaaatcataagcatccatgacggcgatatgaaacgaaatcgaaagaccgagaaatattgtaccattctcgaatctgttggttgaaactagccgccgtccacagagagagtcgagcgaattcgccgtcgcgaggatataaagagatctcttaaaaactttgtatcaagaagccctaattcgtaaacctgaaattccatatttaccctctggacgatttatcaaacaatgggctttaaggcccaatcatatatcgctttaatgtcccttcacagttttgcccaatttacagtttgtcttaacactttggtcctcatattttcttttcataccctaatcataacaagatcaaccacaaaatccttcttagaaaaaaaaaaaatttgattttttttgtcacaagaaaagaagcgttacaaatttacacttgttgaaagaaaaaacgattcaactacaagagaaagttcacaaagtcctaaagacacagagatgtttacaggtgcggtcttaatgcttccaggccatggagtgaccatcctccatgtaaggctcaagaaatccaatgaactgccaataaaaataaacagcaacaaaacaattgatgatcagacacgtctgaaagatacatacttcaagtctcaaaatatacatactttggttccatctcgagaccaacgtgctccatagccttgagctactcttatctcgaacacttcaccatgtggtggaacgatatgtatgttcatccaacaacaattgccaatgaaccgattgattatgtccattgcacgctcatttttatctgaatctgagaaaaggaagaggaagactcaattatggaaatgcatcagtgtcctgcaaaaatttgttacttaccagttccctgaagaacaccccaaaatccatcgctacttcgatcaacatgcttggctaatgctctagctccatggctcaatctacaaccttttatctcaacaataggaaaaaagaaagattctaaatttgatctcacacaacacagcttaaccattccccaaaagattcactacgatgtctctcgaactatatcttagtttttgtggtacctttggcttatatggaagcatgaatgaagagagtagcatcgatctaggaggaggcagagcatgaaaaatggatccagttgtgtgagatagaccgagaaggttttgcacgccagtgtaactcaagccctgccatttaaatgatgtttttgtaagaaacattgaataataagaatcataaatcacaaggagaaggctgagaaaaacttgaactcacagacagtatgtgagccaaagcaacacaaggctgagcaactgatttactaagatggattgccacaacaccattgaaattctcttgatccgtatcatataacttcctaaacatttgcatacctaaaaaaatttgaaatctttgaaacagaagttaatggctaaggatcagacaaagaaaaaagcttaccttcttccactgttttagtgccaggaaacactttctctgaactctcggctttcaacagctcgtaaaaggatgcatattggtgaagttcctatatatcaacatttaagagaatcaatcacaagaaatcgtttgcaggaacacaaaagcatgatgtcggcaaatatatctcaccagaacttcaaacattagacatttatttatcataaccattgaacctcctctccgaattctgaggaaaccaaacaacatttgtgaacacaagagacacagaagtaatccagctcaataacttttcacttctcctacctatcatactcttcttcaaaacaccttgcttcaactgttttgatgccatctaatatatccatttaaattaagcaacccaaaaatctgatcaagaactcttaccacttgatattgacattgccaagctaaaaagaggaagttttaacctttcatgagggagaataagggctcttgaacttgaagctcggaaaatacatccttcaaggcctgttagaatattgcaaagtgaacaaaacttttaacaatcaaaagcaaaccaaaagctaagcatcgatgactctgattaccccagtaccaatgttgccttttgaagtataatcgactatgactcactcacattgactaactcagaacccttttgatttatcagcttgctccactcatcttctttctccttcaaccggattacttccttccccaacgaaattttctcaaaggttccacagaaagaaccagaatcaattgatttcagcagacctaaagctagaaccttgtacaagggataatcaggaacacctgaaaaccggtgtagcaaagcgtaggaagacgattcgattcgttcaccgtcgtgaagaactgattcgccgcacagaaggccggagcagaactccccggtaagccctatatcgaattctacacagtaatcgagtgtgaacttcaccatttcatctagacaatctctaattttaatcatcttcactcaattggagcaaagttcagttctttagactccattgtgaaatagttctcattgtaaaaaaaatgattcttttttgtctgaacaagagaaagtttgatatatttttttgttcaatatgttaaacccagaaaaaaagaaaaaaaaaagtctttgattaataaatcaacagattacataagtctaaaacatgtgttctaagctaatgcttttcagctaagatagaatcattcatggtagatttgatgtagatgggattgctttatctaggccaagaaatagttcatcgttcaacttctccggcaatgatgatggcatattcttccatgtctccgacacattctcattcaaactgtaatatcaaaaataaaattatgatataacttgattttatacatgatgacattttacagaaatgatgattatgttacttactctttgagaaggcttttgatgttctcccggatttttctgaaaaggtctaagttgtctgtgagctgtataagaaagaaacacaaaggaaattaagtaaactaagttttctttagcgattttggtgtctcaagagatcgaaattttggtcaatatatacttacgtttaagaatgtgagatttgcataaatctggttgaaccattgcttattatgattaagaagctcattgtgaacccctacatatcattaaatcagagcacttttatgaatattttcatatctgttttttttttttcgaaaaatttcctaaaatattgaagattcgttgaatcaatacttaccatgttgagatggttgaaacacctgtgatggttgatacacttgtgatgccagcaccatattaacaatctcctgaagaaatcaaacgtaaaaccgaaattacattagttcaaactaaatttggaaaattatagataaaaagaagatgttgttgataagaccagaacatagagagagagatttcatgactaaacctcgttgtcaactctggttgttcccaatccattgtgatcttctttttttttcttggcgatttttttgttctgcaacaaaaacaaaataaattaaccaaaagggaaaaaatattaaagattgattatcaaccaagaaacagagaaagaacaaaacttgaagaagaataaacaagaagaagactttacatatatccatctgctacgtgcagcaacgtccctgatagtcttgtcctgaaggaattcgaggatttgcaagtaacgtgtaacagcactacgcgagtccgacgaataacttcatgaaagacaaacaatatcagagaacaataagagatcatgaacaaaattgtaaacctaggtttgattctcatgaaactaaaagcaaaatttgatcataaagaattcacaaacctatcaaggagttgaatcagaatgtcgtcttctgcagtggtccaattcaaggcgattcccgagcgacttatcaacaatgagctctccgacggtgtggtcaagttgccggagtaggcattattatgattcatctcttcgtttgtctaaagccctagtttatcgtataactacgtacaatgtgtacggatgtggataaatatacgtaaatattcaggtaatcttgaaatccttctagaagaggtgtacggaaatatattttttttgggtgaataggtgtaaggaaatattaaaaagaacaacaacaaaaataaatcaagcgaacaatatcaacgcagatctacgacgatcggcgatatctgattcgtaattcaagcgaacgatgggggcaaataaatcaaaattcccagaaaagccagaaaagcgaagtcgagattgaattgctagagagagaagaagatgaaaacaggaacttctagagagagggaaaacaaaagaatgtcagctttgttttaggctttgggtcggtaaagtaggttaggttgtaatttataataacgcatatgctcccttaattatcaatataatttgatttgttggggataattaattttcttattgagtcgtccttttttttgtaggatcatgcatactgtatatgatctgaaatatatatttagaatcatggacgacgtatttcccgggatattgtgcgatgggattcggtagagacaatgttaagggtagctataaagtagtgaggatcttccgtgatcctacctattgcgatatccttgatgtcaacactggtgaatgtctaattcttttgtgtatttcagtactgatgcttcattacttctatcgaaaattgaggttgatctaactgtggaaaatttaatgtgaaatgaaaaacggatttgtctaatttatcattattcgatcatttgcccattatttcctatcgtcgtcgttcaaattattattggaccagtgaaataaaaatccgtagttattgtgctacaatcacgatcagtattttgtgggaattttcaatcaaaatcatcctttatatttagatattagaaacagtcttatacactataataatttataataagaacaaaaactatataaaaaaagaaagcaaaaagagaaatggggtctcataattttgcatgggaaatcaaacgacgcgcagaatccgagttacgatcacatgttcacacgttgcttcactaatctaaacgatcaaaacgtaaacgatatactgtacatttgcttaattagttgatatttcaataaattacacgaagaatattagttttaaaaaaatttagtatttctatatctcaaacttcaatcgtgataacaattattttctcttttgacctttgcttcttacatgtcagtatgtcacatatgtaagatctcctttgcccaaaaaaaaataaaaatgtaagacctttatctataaaccccaatctgaatttagttccatttcaaattttcactaaaatgctattaaaaaggattctatgtatttcaattatcaaatcatcgtctttatctaaaacctatttttactttcatgcaaattagtagttcaaaaaaaatcaaaaagtagacacagcaattaaatgcctagacgacattgggctggccacttagcttgcacggcacataaacgaaactcaacaagatccgataattatgcttgcacaactttgtatttcaatttaattttaaggaccttactatatacttaagaattaatcctagtcagatatgccacgtggacaaaaacccataagtgccctcacaatctatcaatctctacgtatataaaccctcactagtagtactcaaaaacacacctctttggcttctctattcaacactcaacagtcaacagcttcaccttgagatggttatgattcatatcttcctcaccgtgatggtggttggaggcgtcagtctcttcccggagacggcagaagcgatcgtgatgggaccgtcgatgcagaagctgacgtggcattactataaagtttacaacacttgcgagaatgcagagaattttgtgaggcaccaagttgagatattttacaagaacgataaaagtattgctcctaagctccttcgtctcctctactcagactgctttgtttccgtacgtttttcttattcttgtcttatcatttaatcaattatgaacccaatggcatatagaagtgtaagtttgtaaccacaaaactaatcgagtgctaagaaagtttaattagaagatttactaattactgctctcacattgtgcgacactatctataatgatagggatgcgatgcatcagttcttctagaaggtccaaactcagagaaaatggcgccacaaaacagaggacttggaggattcgttctcatagacaaaatcaaaatagtcttggaacagagatgtcctggtgttgtctcttgcgccgacattcttaatcttgcaactcgtgatgctgttcatttggtaatctctctttcttctgcacctatagctgtacatggatcattaatagatactgaccagcttagagaactgattcattcaggcgggtgcaccatcttatcctgtgttcacaggcaggagagatggtttgacgtctgataagcaaaccgtggacctaccatcgccatccatctcatgggaccaagccatgtcttatttcaaatccagaggcttgaatgttcttgacatggctacacttctaggtcagtcaccttttttcttcctgccaatatcttaaaaaccggttttgttctggtttgaatcgcttaaactgagttactccctaatcaggatcacattcaatggggagaacacattgcagctatgttgttgatcgactctacaattacaacaagaccggtaaaccaagccctactatgaacaagtatttcctatctgaaatggcaaagcaatgtcctccaagaacgaggaaaggccagaccgatccgctcgtgtacctaaacccggactcaggctcaaaccacagcttcacaagctcattttactcaagaattctatcaaacaaatctgtacttgaagtagatcaacaactgctttacaatgatgacaccaagcaaatatctaaggaattctcagagggtttcgaggattttcggaaatcatttgctctttcgatgagcaagatgggagcgataaatgtgttaactaaaacggaaggtgagatacgaaaagattgcaggcatataaactaaacacaaaagcacaatctctctctcaccactgtgataccaagaagaataaacacaaggtataaacaggaaacaagattgaaatatttatgtttcagatataaatttgttatcatttattacattgtaatcaccgtgagaaaggcttctctatagctaaaggagattgattcttttggtgtttctaaaaaagtagaattttttttcttctgatattcacataagtataaagggtatgcagtcaaaattgttcccgcacaaaagagaaaggagattttatttgtctaacctctttggttatgagtcttagactctctgtttaagaagtaccaagcgattgaatttcacaagcttctcaatctcttgctagttccttcctgttagcttcaagaagaggccaaacaattataagaatataaattttattacataaacaacaaaatcgcaaaggctttagtagcgattaagatttatcatagcttatgtaagattatttgccaacacttcctggtatatatgtttacaagttatgatttttttcttgaaccaatatttcattacgtgtgaacatattcttcaggtgaaaacggttacctcaaaaaagttgtcaaacatgttgtagacacagatcaaagcatgaatcttcaaacataaaccccttcctcgtaatccgtaactaaagatgacctacttgtgtgagcttctatttcttcttctttttgttttatactttttaactgttataggtggaatcccgcctagtcaccattctgagtggcaggactatgatgaaaacttggtgtttggctctggttctcaccatggctctgaatctcctccggcctctggctctccatatgggtttgatgctggatatgaacctggttgagattctgagactgagtgtgactcttagtcttgattacctgactctaacaagcgttttaacagttaaatggagaaaatagaataatccagcagcagaagctttctttgtagagcatatctaaccttgtacatgtatttcctacgaagtttcatggctgtacgtatgcatcttctcacgcggaatacaagaaccttatcattgaagatctgcaatatatcttctgaatcagtatagatcagctgagcatgtgagcagaacaaaataaaaatgaaacaaactttctacctgtatcatgtcatcgatcgagcgagtttctttcatgatcttatgtcgattcatgattaaaatcgccgccacacaaaagacaggaagagcatcatcccctttttttatggatgaaacgacacaagggacatgtgttgttctatcattccttgaccaaagacttcttgtcaacccacaaaagtgatacgaggatgatgctgactttatctcactctcatcagagaaaggacccgcagtctttggcaacggaccactcttcggcagcaaaccgctccttgacaacaaaccgctgctctttgaaattggcccgctctttgaaatcattggttccctctttgtactattaccaattccatcctctatcatttcttcactcacctcaggttcagattttcttggaagctgaatcaccaaaggctccaagcaatcattctccaaagtttcagtaacagattcatcataatcagctgcccacatcatctacatcaaagacaaaacccatagataaatatgactaacagagacagaacaaaagactcaatatttgaatcaaacagcagaactacaaacctcccacatcctgagagcttcgttaaaagacaattcccgtcggaacagaactaaaagcatccggaaggcaaaatgaagactttcagccccaatacgcgataagtgggaaaatatatctttatctgtaatctgcaatatgtgccacaatgattgcaattgatccatcaccccagttggtccctccatttggaaattcgcacgctgcacaaatatacacatagcaaaagtataatgcatgatcaaatgaagccagaacaaaaaattatgacgtattaagcactggatttaccgttcttcttatgagcatttcaaagcaccagaaggcatcagcattatcttcaaatagaaccacgaaaggagagactaaatcactcattcctatcaacagatttgcaaccagagagttagtatcctaaaccaataaaacgtcataaagttttcatatcacatatctaagttatcaaacttaagagatatatggcaccttggcaataaccagttgcaggatcaacccaagcataaaccgcaaggatatccgacattcttcctagatttcctggatcctcataaaactcaaggtggctatccgtccttaccacatcaacaactgaggaaatgaaaaagttttaactatgaaaagatacaagatgggacagaaaaggaagatttttgcaagttatcgaaaaaaagagacaaggaataattcctacctattcgatgcaaagtccaaagccattcagacactcgatcttccgtgacattcccaacacgagagggagtgtcctttactgatgccatttcagggacatctgatattctcagaccatcaactatttctgcattgcgaccagtataagacgatggtccaacagaatccgaatgcatcactttgatctctggagtggacctacgttgttctctaattaaatcagcattcttatcaattcgaaaattgtgcattccctcatcctcagatcttaattcacttttcagtgaagcatcctcatctggcgtagaaacctcaatcttatctaaactatttctcccaaacaaatctgtaaccggtagcgagggaaagtcgaaataaccgtcaggggaagcatagccataaggactagaggcagatacaaaggaggaagtgttgtatactacgctctccggactttctcttccacttactaaatcaactgactcactagaacttccccttctgtgtaaatgagatgtatcagtaccattattactccaatcactgtgatgattttcagtattagcattatcattattatctataaaagcatcttctctgttttcatctgtagtagcaacctttactgcctcatctctataagatttccgcatatccataactttagatcccacaacataggcaagtgaaccagttcccacacttgaatgcatcgtctggcattgcttgagcaaatcattgtatcgcttcctgcgtgaaaattccaataacgcttgtaagctttttgattaaacttaacttgctattagcactctttctcactctaagctgtgatcaaacagtctaaccttcgagctaccctgagttgattacggtactcagaggtgctgctcaacgcataacaaccaaggagaaattcccaaacttcagctctaatagatgggtcgattccctaatgaaaaacatcatacattataccactgtactgaaagaataatcaaaagcgttacaagttcttctaccaaagtgaaaacatacccctaaaataattaatttaagcgccttctggaaaccagaaactcttccgtcgctatcaaaagacgcttgccacttctctggcttaagcattttgccgatctgtgcattatacataaactttagtcatatgattacataacaaaccttggattgacaaaaatgattactaatgctgaatttaaaaagggttaaagagaagatcttacagttataacaacctgtatccgtgactgtgaaagacaaggctcgctcaaatctcgaaccaaagatccaactttctgcaaactcactacacccgcttttccacagctccattgttttccttctccaccagaacacatcagtcctcacttcccaactcttctacgacattaaccaaaattgacaacaccaaaatcaaaagaatctaaatcaataaagatcctttagtataaccaaataacaaaaatcagccagaaactaaagggtacagatcaaaatttaacatttttttcagaaatccaatagaatcacagatcttactgtaaccaaattcacatttttcagaaaatccattcaaaaacctgcgtccctcatatctatccacaaacatgatacagatttcacgaataaaaacatggatcagatcattcgaatcagtgagattgaattgcatttcattcgaaatacgtagacaagtttcaataataatcaatatacccacaaaacaaaaataaaaacagaaactttccttaagcattacatatacattttcacgctcagatacatatcttaatgtcgtttgatcgatgcataaagctaacctgaaggtcaatggtcatcgagaattttcttctccgatctccattttttcatccacgcaaagttttcttcctttttttttttgttcttctcgtctccctctctctctctctcttcttttctgatgaactgtttattttcctcgatctgattttgttttattttaatttttacatgtttttttttccttctatttaggctgacgttcttagtcaaaaaaaaaaacttattgagaaaaattaataagctacataatctcaaaaataaattgaagtgtgatataataattgacatagccttataagaccaatcgaaaagtcggtgcttataattcatacaattaatggagacaaagaataatacaattacgtatagttttggtgtaattataagaagattgtttgtaatttgggttggtttgattcaacttcggttttgtgcagtttaattttcttttcttttttggattcagtttggtttagtttaaaaataacttgaaagtattaaaacactcatttgatttatattatatagtaaaaattatattgttttgtatctgtatagttaaaatgtaaatttaaagaaattatggtttattgtacattaaaatcagtttccgtttggtttttattttttttgccatctttctcattaaggaaacataaacaacaaaattaaaacaaaagcccaacaaggcaacaatataaaacccaaaccgagcccaataccaatacagtaaactgtcgaggaaggaataagaaagccagacggcagcaacagagctcatcaatgccatgttccatcggaccaaaaaccaaggagctgagatcaatcccaaggtcaaggaaaaaactgtgttctctttccccttgtttactgtcctttgtaatgttgtgtttttgatgagctcgatcgtgtcatcttcaggttgatgagctaaacgttgaagcggagactctagcccatttggagtgtttgcagttgtctccgtaaataagagagattctagttcgagtcttttctgcttttcaaaccttagttaagtgaaaagtgtgttttaaggtaacgagcttaaatacaatttttgtagaccacccataataactgaactgtacaattggattaaccaatactaaactagagagataatctttagtagttttcatgaattggtgatgagtttgtagagggagattgagattttgaaagtgaagctaattaaaagtctagattgagatcttggaatctataattacgttcttgtattcgtgtatacagattcaagaaagaagtgtacagattgtttcatgaaagtttatagttgttatgcaaattctactggtcctcaacaattatcatatcctgctataatatcagaagacgcgatatatgcagtctttgccactatacagactagtcgtgcaaactttcataaagtttaaatgcagtttgaggcaaaatcgatatggactaaccagtacttgttccttcgtagttcgtagtgacctttattagttaccaaaacttcttataattcaaccactaatccatcatatagcttggtttaaaaaaaagaaattactttgtgaatcttaatggattaaaaattagaatgcaatcactgcatatttagatttgtgtgtcctccagatgtttctgatcgtctagtgcagttctacagttgtttattttgtcatcttagtatcctacattatattacatagtagcatttttataacaattaagtagatatttcacaatcatacgtcatatactaatattaaaatgtcgaaacatataaagattgattacaacaaatagagagacaggcaaagtcctacaagcctagctgtatattgttgaagattccacgcttagagaatcttgaaagagaattcgaatctcgaaagtagaatctaatcggacggccaagattcaccgtatatcaagctttcgtcattaatatatgtggagaatatgtaaggttagaggaagtgggtcattcgtgacatcattagaacaatataatatactttagacatggatattaacgtgcaataatggttttcaggccaagcaaatgatacaaaagtgggtcctatgcatctcttgtcgatctcctaaaactaaaataagattaaggaaatgattgtttatttcttagtgttctcgttctgagggctttatacaatcggttttactttggagtttggatggatagtttctacgttaacatcgatgtgagtatgtgagtagcaattgatgactgtattattggtttttctgacaaaaaaaattagtttaaggtctgcaacaaatattcattctagaatgataaaatctagatagctaattctttttcgagaacatatattcgaactaatatcttaatgttttacttatactatttgtattttggataagttttaatcatgcatacaaaataatagtattatttatatagttttatacgtatcttattgccactcgaagacaattaagcttcatgtcttgccatgcttttagtttgtggatatttgtttgatgcgtttgtcataaatattttgtttgatggttatagaataagatgtgtgagtagaatccaaagcaagttggatccaagctcttaatagcttaattaataagatagaaatataaaatggaaaacaaaatagctcattataactttatttacatacaaaaaagcaaaataattattgttatttcggtttctatatatgatttttttattgaattatggctgtataactattttatgatcgtcttgagcattaaaaaaaaactattttatgattgtttatttacattttgtcaaccaaaaccccaaatgttccctctatatatatatatatataagaaattctgaatttcttaacaaaaatcacaccaagtggaggttggtgtgctaagaatcaataactacgattagtaatacaatataatactggaacccaaattaaaattctctttttcatttgtactttgatactttctcgtcaatacgatgaattacatgtatgcatacgtattagtagtataattagcagtaatgtcggttttgtaaaacatacactgacaaatggaagataccgtgtccaaggattctcaaattgcaatattatatttttatattcggataaaaaatatcaatatcccagttaccatcacgtcgtcacacgtggatgactcaaaacataaaacgcatcgttttctgcttacgcaagaagaacacaaagctctctgaaagaggagaagaaaaagacgattccatctgttttcttaaggaaacttcttccgttgcaaaagcttacgaagtcctccattaatggaagcggccttatttcactcttgctgatgtagtagcttccataagcttcttaaagtgtaagctgcgtaatttctgttattggaaacaaatcgaaccttctactttcagcttaaagcccaaagtctccttttttactctctatctctctctctctaccgcaatttctctctgggaaaaccactcgtgtagttttttgtctctgttttgaacttttttaagtctaaaaatgacaactttagtcgtctcttttgtttattaggctgagatgttcgggaattgcattttgtaagttttgggttttgttggaactttttgcaattcagtgagagatgtgcgtgttgtttgctgcagaaatgtgctgctggtttcgcatttgttgaattttgggctttctgtcttattttgtgcggtgatatttgtcctctttgaataaagttttcccctttttaaaaaaaagtttgcgtttagagctaagtttatgttttttgtaatcttattgagaaagttcatgaactgatatcgtgacgtcttctatgttgtaggttactggtggaggtttgattcattaaattttgctacgttgtgggatcttcaagaagaatcctttgtatgtaagattccgtttgaagattctgtcttttaatttgttagtaatgtttagtttgttattcaacttgatgtgtcttatttttcatgctctagcagtttaaatctgtcatcgaagatatggaaaacccttttgcttctagagaaaaggggtttggtaattattcagattttccaacagaacaaatggatggtttaagctcaaactttggttctggcgttaggaatttgatctctgatgatatgttcaacccttcctccgagcttatgaatttcgactctttggccgcatggtgtaacagcccttccgctactgatatattgttcgcccaatatggtctgtcgaactcccaacctatgccttttggagctttcacttcatttcatgtagctgacccgaaggctaccagtctcactcgttcgttctatgatttggaaagctcttactatggtgaagaaagatcgtcagcacaggaaatgaattctcagtttcatcgctcttcagatagcgatgagttaagtggtaaacgacgcaaggttgttaatcagaagattggttttcctaacgtactcaactgtactattcccaggtctttgagccactcattagatgagaagatgcttaaggcattaagcttatttatggagtcctcaggttcaggtgagggcattttagcgcaagtttggacccctatcaagacaggagatcagtacttgctcagtacttgtgatcaggcctatttgcttgatccgaggttttctcagtaccgtgaagtgtcaaggagatttacgtttgctgctgaagcaaatcaatgttcttttccgggtcttcctggccgagtctttatctcgggagtacctgaatggacatcaaacgttatgtattacaagaccgatgagtatttgcgcatgaagcatgcaattgacaatgaagtccgtggttccattgcaatacctatccttgaagcttctgggacatcttgttgtgctgtcatggaactcgttacatccaaggaaaaacctaattttgatatggagatggactctgtttgccgtgctctccaggttgatacacttttctctccctctctctctttctgctttgttctatttttttgcttatatgtatgtttgcgtgtattactatcgccagcaagattgctatagtatttcattagttggttattcaaactttttcaaagtagaaaattgaaggtcttctttactctgaagtctaaagtttttctgcggttatttcattctcccacagaacattttttttatcacgttcaacacatgttgattctaggtccttccaaacattctaggcaaaaccattgaacatagagaacttgtgtcaattttatcttgaacaatctggattttgatgttttttgcagcagcaattgtatatatataaacaacttttaaatcttatgcaagattgatttagggtatgagaatctttgttggcttaagacctgcctgagtcctctgcctttgtcaatgaaagcttccagggcagctctggagacagtttgttgtggttgcaacctgaggttacaaaacgcagttattgtataccaaaagtgttaaaaaaaaagatagtataaaatagtatagggtctgagagattcatgttttcctcttctttttcaggctgtaaacttacggacagcagccattcctcgtcctcaggtaccatctgaattagaaaaaaactatctacaaaccattgtttctcgttacgttttatacctcaataattttgtattcgtgttttctagtatctttcaagtagtcaaagagatgccttagctgaaatacaagatgttcttcgaacagtatgtcatgcacacaagttgcccttagctcttgcctggattccttgtagaaaggatcaatctataagggtttctggacaaaaatctggtgaaaattgtatactttgcatagaggagacagcttgttatgtgaacgatatggagatggaaggctttgtgcacgcatgtttggagcattgtctaagagaaaaagaaggaattgttggtaaagctttcatatccaaccagccgttcttttcttctgatgtgaaggcatatgacatcagtgaataccctattgttcagcatgctcgaaagtacggtctgaatgctgctgtcgctataaaactgaggagcacttacactggtgaagatgattacatacttgaactgttcttgcctgtaagtatgaaaggaagcttggaacaacaacttctattagacagcctttcgggtacaatgcagagaatttgtcgaactttgagaactgtttcagaagtggggtcaactaaaaaagaagggactaaacctggatttcggagtagtgatatgtctaatttcccgcagacaacgtcttcagaaaattttcagacaatatcattggattccgagtttaactctactagaagcatgttttcgggtatgtcctctgataaagaaaacagtatcacagtatctcaaggcactttggagcaggtatgtgatttatgcaatttggttattctgtaaattttgtgaaacagttcgttaaactgaacactgatatttttccttacaacttttcataggatgtgagcaaagcaagaacaccagagaagaagaaaagcactacagagaaaaatgtgagcttaagcgctctccaacaacacttctctgggagtctaaaggatgctgcaaaaagccttggtggtgagacttccgcatatttccaagcatgggtttatttttgttagcacacaaactatctgaccctcgacttggattttcttctgcagtttgtccaactacattgaaacggatatgcaggcaacatgggatcatgaggtggccatctcgtaagattaacaaagtgaacaggtcactaaggaaaatacagacggtactggactcggtccaaggtgtagaaggaggactaaagttcgactcagcaactggcgaattcattgcagttagaccttttattcaagaaattgatacccaaaagggtctgtcgtctcttgataatgatgcacatgcaagaagaagtcaggaggatatgcctgacgatacttcattcaagctccaggaagctaaatctgtcgacaatgccattaagttagaggaggatacaaccatgaatcaagcaagaccaggtaagaacttctctatccataaaccatagatggagcgattagaatcttaatccattttcagtttttgcaggatcattcatggaggttaatgctagtggtcagccatgggcttggatggccaaagagtctggcttgaatggcagtgaaggaataaagagcgtttgcaacttaagctctgtggaaatttcagatggaatggatccaacaatccgatgcagtggcagtattgttgaacctaaccaatccatgtcatgcagcatatcagattcatcaaatggctcaggcgcagttctgcgtggaagctcatctacttccatggaagattggaaccaaatgagaacccacaacagtaatagcagcgagagtggatcaacaacgctgatcgtaaaggccagttatagagaagacactgtacgtttcaagttcgagccatcagttgggtgtcctcagctctacaaagaagttggaaaacgttttaaactgcaggacgggtcgtttcagctgaagtacttggatgatgaagaagaatgggtgatgctggttacagattctgatctccaagaatgtttggagatattacatggtatgggaaaacactcggtgaagtttctcgttcgtgatttgtctgcccctctaggtagttctggtggcagtaatggttatcttggaacaggcttatgacgtcgtaagacatagacacacacagttatgtattcccagtgaaagaatgttgtttatttctctagatattagtatgcttataaataggcatgaaggagaaagacaattttggtatagtggagttcagcagaaaatgtatatgttttttcgttttatatgaatcagagaataaaagttggatgttatatctacgttgctaatgttgtacctgctcacccatctttcatataagaaaagagaacacttttagttatccctgtgatgcagaatcgtattctttgttatctctccattcctgtggaaaccaacaaagtcaactaaatttcggtttaattggttggtttttaagtcaacgaggacttgattttagttgggcttgggcctataattgtgttcatcattgggttttttcccccttatcagtttaacgtccatatccatatctttttctttttttaacggcaaagttcatatccatatcttatgatgtgcctaaaagagggagaagatgcgaagacagaattttcatatttgaaagggttcgatatcgatattgggaaacgaatcaaggtcaaaaaactcagtctaatagttgaaatttaaaaattttattaattcaatccgattggtttcgttttgttatggttcggttctatatcatcaaaccaatcggtttggtcctaaagataattataaatattcaccaacaccagtgttaaacacatatcaacaaacctaaagttagataaacaaagagaaaatggcaaaggctatcgtttccatcttcgttgtctttttcatcttcttcttagtcatttccggtaagcaaacttactctccgtttcttgacatatttgtttataacttaaaatttacccttatgttctggctacaaatctctttgaccatagcaaaatcatgatatgatcattctatcttttcttaattttgtttataacagatgtgccggagatagaagcgcaaggtaacgagtgcttgaaagaatacggaggtgatgttggtttcggcttttgtgcgcctcggatatttccgacgatttgttacacaagatgccgtgagaacaagggagctaaaggtggaagatgccgttggggacagggcagtaacgtcaaatgcttatgcgacttctgcgacgatactccacagtaaaatctaaagcaatcgctaatcaatgcactaaggctgccatagacgcaattattatacacgttgtctttacgtacattcacaagttttagtcatggtttgtgtaataaatgaatgtgaatggtctatccaagtgatgtaatgtgaaatcagaaataatgaaagtgtgacttttgctactacaatcatgttttggtaatacaatttgactaagaaagaagaaacgtgcgagtttggttgcctcattgttgttgtgaatttggtatccacatattcttatctgtttactatgtggagagcgttccgactgttttgcggctaatctagccggtcaaagacgaagtctgaatgtgatgaaatgtcaacataagattttaaatgagctctggatgtgacgtgtttaatattttcacatgtacggttattagagtaaattatgatagttttaaaatttggaagcataaaattatgatgcttaagaaaatcattatctgttattctatttctttattatataatttattttaaataatattaaaatgaaaaaataataatagttttacaatatgattttaacaaaaatatacaattaataagtcctttttggtaaggactcacataagttttttggtactgctcatatacattggaaagtaggatttagtataaaaactttctcatgcaattatatagaaatgtatattaaaaaaaaaacaattatttcaggtttttcatgaatcatgatttattttaccaccgtgctattatatcagggatataaagaggcaagtggttacttttcttatcaatactgatctcaactcgtgacccgtggttgtcatgataatttctagacccaacgataaagataaaatagtagcatcgcaccacaacaagtgttgagcatgagtctatatatatacacatacgttaactccaaagtgaaacaaagagattagaaactacggagagaaagagagaagatatatagccatggcaatgaagtcagtttctaccttggccgtttttgccatcctctttttggttatcgttggtaaattaactaacttcatagatatttctcacgtagtttttaaagtttgcgtttgtgtttgaagcatccggggactatttttctcggtgatcgcagtcaagtttcattatgtttgatttctgtttgcttaattcgttttatatgataaacacagaaatgccagagataaaagcgcaaggtagcaagtgtctgaaagaatatggcggtaatgtgggtttcagctattgtgcgcctaggatatttccgtcattctgttatcggaactgccgtaagaataagggcgcgaagggaggtagatgccgttcgggaggggcaggagctggtagtatgatatgtttatgcgactactgcagcgacaaaccttaaatcagatcgttaaacgttttaacctcaaacgcatgagtagttgctatcttgtactatgtgtcatggtttgtaactttgtgtagtaataaaggtgaatggtccaccaagtaataatgaataagtgaaatattaaataaagaaacgtacgactttgtgtgtgtaatttaaatttggcatacttcaattagatgagggtaagggtgtgcgacttataggcttcgatcggtagttctgatttagtcacgagtggaaaatttggtccatttcagtttcctttatctccaactctagcatgtattgggatttaaaaacaaagacgctggattgttggactatgcttttatgcaattttaaaaagaaaaaactatatacgtatttccgaaaacaatttgtcacactttttatgatctctaacaagaatataacagataagtcttaatattcggttgggtcatctacatatcatatatagcatgtccggttttaagccaatgttggaggagcttaatcggagcagatttgatgtgtaactgattacttttatttcttattaaatctgcttcaataggtttattttgtcatcaacaagtatatacctgtacactaaattctattaaatcatttttatactttggcatcttatttctgatttgctatgagtaaacaagagattagggtaattcatgtagttgccttggaccgagaatcggaatatgtttagtctcttctccaccatcatgacttgaacatgaaactttttattttttgtcaaagcatgaagtttaagatacagtctctttggaagtctcctaagtgcatgactacatatgtaactaaatagatttttttccttaaaaaaacaaaattgtcacgtttttcgtgattttactattccatcgtaagtggttacttttcttaatcagtgatgacagctagagttgtggttctcgtgataagtttttgtccaaacgataaagataaaagcatatatatatagcaccacaacaactataaagttaaatagcaattcataacaagaagattagagactacagagacagagaagatgggcatggcaatgaagtcagtttctaacttcgcaatctttttaatcctctttttggtcacctctggtaaattttaactccgtacttctcacatacttattaaaatttgtgattcatacgatccatagaggatttaattatttctgttggtgattgctgcaagtttctttatatgtgaattttatttgccaaaactaatttatttgtatatacatgatatgtgagcagaaatatctgagatagaagcgaaagataaggaatgtctaaaaggatacattgatgcgcctttaagctattgtatggctaggatttatccgtcgttgtgttatcgaaattgtcgtttttacaagggcgcgaaaggtggaaaatgcgacggtcttaagtgcttctgcgacttctgcagcgacaagcctttttagtcagtttctgatgagaaatgtttgaatcttggcatgtataatggtttgtgtaatgattaaaggtaaacgaacaagtaatagtcaataagtaaaataaaaattaaaaacgctagactttgattgtgttatcactaaaataaatgaagataagtgggacttcggttgtggatcactcacgagtgaacaagagatcttgtatttggaaaaactagataattgatgggaagcttcataaaaataattatctaaataaataaaatttataatatatctcgtgaagaacgagagagagatggagatatcttcgaaacgagtgaagacaaattttattattttgatttttttgtttgtttaaagagaagatatgatatgagagcatattccttaggcaaactatgctagttcccaaattcacccactacacaaacacaatgaggtctactagaaatataatagttatgacagctaatgactcgtggttctcgtggttgttgtcctaacgatgaagatatatagcttagcaccacaacaagtgttgagcataagtccatatttgttaactccaactccaaagtgatcaaagagagaaagagatagagaatcgccatggcaaagatgtcagcactttctatcttcgccatctttatcatcctcgttctggttatctttggtaaatttatttctcacatatttattcaactttatgattcacaggatccaaagagtatttctttcggtgatagcaataagtttcattatatgtgattttttatatgcttaaatctgtatgtacatatatttgtgcagaaatacctgagatagaagcacatgatagcgagtgtctgaaagaatatgggggtgatgttgggtttggcttctgtgcgcctaagatatttccgacgatttgttatagaaattgccaaaaggacaagggggctaatggtggaaaatgcctctggggagagggcggtaaagtgaaatgcttatgcgacttctgcagcaatgaatcttttaatcagtttataagtcttacttgaaacttgcatgtgtcgtcgtttgtgtaataagcaaggctaatgatccaagaaataatgtaacaatgaataagtaaaataaagaaccgctaggctttgctagtcttactactattattaaataaggatacttcaatctcgttaagatcgatctcgtagaagatcaatccctttctctcttttagccatctgaaaacaaatcaagtactgcagatttgatttgacggatagaagtatataacgttgtattgataaatgataaacccaaaacaactaggtataatgcgataatttaaataaacgtataaacgacatatgagtttgtgataagtgttggatgagcaaccaaaaataaatcaagatccattaagagatttcatcgtaaagataagtgtttttttttttttttgatgcaattttatctcttactatacattacctaattatggcgtcggcttcaactttgtgttgaaactgtaaacccaaacaaaaaaaaacaaaaaaatatgaggttagatgcgacttcgctttccgtaattatgatctttattgttacagatgaacaagacatttttattataaaatacagaaatgacgaagaaattaatggtatttatcatatagtagatagtaaattagtgtgttctgtcgtaaaaaaatattaaataatgtgttccaaatgatcataaatcatgtacgacaaaaagaaagtcataaagcgtccgattaatttatggctaaatccaacggttagaaattaacttcaatttggtgacgtgtgaacaacaagatcaatagattctcggtgagaagaaaataaaagaaaaatggggatatcgggttcaaagcgagttacgacgattctatctaactcgcccgagtttgactcggcttgtgactcagcatacgacgaatctctctctcttgcacagcatgctttcgccggagttcgtccttaccagctcgtctccgccgccgcccacatccaccggaatctttccgctcttcgtttccctctaatcaccagatggctctcttctcctccgagtcaatcccaagtcgactcagctctccgagtcaccgtctctcgagtcacggcggcggatgaggaggagatcctcgggcaagaggagttcaagaaatgggccgtcgaggttttcgcggaagccgttgtgggaaacgcgaggaagacaatagcgagtcggattccgttaggaatcgtcggaatcggtgggatcggcgccgtgactcggtcgggtcaaaacttgatcggagctgcgattggtgtgtacgcgataggagttgctacttccgtttttctaagcctcactgattagaagaaaagattacgttgttgttcttgatttgctgaaattaataaattttaacaatcttgtttaaacatcaaccctatatttgaacaatcataaacttcaaactcttacatgtggtttgattgctaaacataaacatatctgtttaatccaagataaaagacagaactagtggagcttaaaaaagatcacgtgaaaaacgtctttacctacaaagcaatataatccagatttgcccaatctagtagggactgttcgtgcctccgatatttgtagtttcctttttttttggctccgaatatttatttgatattaataagattttacaaaagaagctcaatcaatcatttcatatcactttaaaagcagcaatgtccgaatacatctccaaagtaagcaataagcaaaggaaaatgaagtttgtttccgtcttcctcgttctgtttatcttcttcctcgtcgttcttggtaagtactgaatctatatacagttactgcattatttacgatattacccactcttacaacctcataacaatatgcagaggccccggagaagatagaagccaaagacgacaagttcatatgtgtggttgagtatggaggagacgtgggtccaacgttctgtaaccctaaattcttccccacgttgtgccgtcaaaactgccggagcttcaaaggtgccaaaggcggtaaatgcgtgaagcaacccaaacacaaacatatcaagtgcttctgcgactactgtaaagacgactagacttcacagtaaagtaccaaaccgctggtttcagcttcaatcgccaaacgcaaccgtcccctacggccctaagtgtttgtacttccatatgatgtgagtttatgtatgttcttgatgtaataatgtcgacttaatttgttatgttttcatgtgttagattatatcatcttggcaatcaaaagattgcaaaaaagttgggcctaatggtgaagaattgaaaaatactgacgtttttaatcaatgtgatgttcttcaatgaatgagtacaatgagataaatatcatacatagaatcttgtaattgtgtatggaagattacaatttgcacttgaaaaaacagagtttcactcttcctctgaatcgagacctggtatgaactctaagctcacgtcaaatatcaccgggctgtttggcgcaactctcggcctccctggagctgaaactagaccctttggaaacgccaacttatggtgtaacatttacagaatcaaaaatgcagagaaagttagaatctctgttacaaaaaacgattacttatgtataatcttgataagcacttacaggccctgggatgtagagtctacgtttgccaccagctttcatactcaagattccttcatcaagtcctttgatcacctgtttaaagtatcagaaactacttttgtggctaaagctaaatccttttttgatatccacaattacctggccagagccaacgcgaaatagatacggtagacctttctccagagaactgcaattgagtgaacatgaccatttgatagtagtagattcattcagctaatatgattccaggatcaaaaatcaatcagtaaagactatcaagttgttctgtttttgtatggattgagaaagatcacctgtcgaatatttgccctgatggaaccatagccacataattagcagcaacctacaacatttttacatctatcttgatacagtttccttaaatcatacaaaggtttgattcagtccttacctgaaaaccaaccggtggactcgggcctctaccaactttaatatccttatactgaagccctgactctgtagttaccattggaacctttaaccaaaaacaagagaaaatcctcatcaatgtcatgaatcaaaaaggttctatagaaagccaaaaggtgtgtgtgtgatctcaccatacattttcaagctctttctcgcattctgcttcacagagtcttggtttatcttctggaggtaaaccagctgcatacgccgcaagtgagctcattgataatcctcctgagacgccgagtaccaaaagcattgcttctctacggctagagagattactgattttacagctttgctctcttgtttctgaagctatgactcttgcagctatatatcttgatgaatttggattcttggtggttagaccatttctagatgctgaacctaaattcataaccacaatgtcagattcacaaaaccaaacaatagctaattgaacatgagagtaatgaattctacaattctaattgcaactatgcaagacatgaatgaagccggtttaatctgaaccgtaaggattaagagaatcaacaaagatgagatttttatctctgagaaagtagattcagcagagaaaccctgaattccaagacgagaaatctaatctttgagaagaaatcagaaaacagaatcagtagcttaggttcttacctagtggtagaaggagagatggagaagaagctgccatctttttttggttacgatttggcaaatttgacagaagcaaacgaacttcagtggataacgaaatctctggttttgttttgtttgtgcgttcgcttcttgctgacttggctctcgtagtttcttaaatttttcatttgttttttaatttcgttaaggaaatatgaacgttaaggagtggaccatccggaagttgaaacggcaagtaaatatctgtaattgtttacttctgtttgattgaaacgacaagtagtttctcgtgtggggtctacttcacctctcgttaaaacgtcgtcatttcacattcttcctccggcggtccaaatgtgcattggactattggtgattggcgttggcttttaaagcttacattatgaccagcgcgtatcgacggtaaacttgattttgcgctaagttttataagatttctctagaaacattattaaaaaaaaatcatcatctcctctaagtgttgtagaaaattctactagatagataattatgtagaataatctaggagtttgtagggtaaagtctagaagcctttgtaagctaactttggagggtacaaaaacctcatcacccccatcctttgtaaaaaggttgaacaaatgaatcaaaaagaaagttcaaataaaatagtgtttttcataaattctttaattctctatactctttcaagtattttctaagtgttcttccatagttttcatcagactgtacttagaggatttcttatcttggtttatataggatatctcgggtattacggtcttgggaagcactattgggtgttttctttttacacatcggccctttgttgtaaaatccgccgtgcctatgcataagaaatcgtttattgacactagctattacaacattattattattatttttggtaaaatgtgaagtattacaacattattatactaatatgatactttctcttatgtgatctctaagtttttcaaacactagttgtgtttcggatggatagcaaggaaactttaacaagtgaggttatctccaggtgcaactccaagcttgccacaatagtcttggaaatacttaatcctgttggcggctttggctgtagaatctcctccgctacactccctactattcactgccctgattgttgcgccaaagcccgatttaaaactcgtgcgaacattagtggtccagaaccagaaagcggtcttgaaggcaagaacctggtcttgagcaactttctctggtgaagccaataagttctcgtccaaggctttgccacagagaccgtagttgtagttccaagagagctggattgcaccacggccatagtagccctttccttgtgcacatgggaactctggtttctctgtgtcgcagtactctccggatgcggccttggctggtccatcaatttcctcaatgtaacacatgactgcaacaaggtataaccatatggtcacaaaaacgaaacctatagtggtggacatatacgattaaccaaaatttgtatacaacaattactgattttattatcttatgctgaaatttaatttagtcaaattgaaccaatatagtcgtaactagaataaaatttatgttataagtatctttattcattcaaaattatatgagaaaatttacttacaccctgtttcttgggctacgtgagcgaaaaacgccgcgatttcgcgtttggagatggaagcaccgaagctagggtaagaattagctgcggccatgaaggtgtcgtgagtgtagaatcctttgccaggacaatcacctctttggtttagtatagagttaaagaagtcaggtgtcaccgttccttctagtgaaacagcaggatctccaccgcctccactgctccggcaaggtcctgcctggcagccctcgccgcagaactcatcggtcgtaccacagtagccatatttgctgcaacagaagtcagaggcgcagccacagttttgagaggcgaccggtttggaaacggttaggatcaggaaaattagggttatgaagaaaagggcaaatcggtcatttcgtgatgtgggtttagccattgtttttgtgtctgtgatgcagactgcagagagagatgatgaacattagcttcgtgttttatagatgatgatggatccgtgaagcatacgttttgttgtaaataaaatatacttgtagttttctgagtcaacgtcaacgccaatgccacgcatgcttattagttcttagaccattcgaaacgttacacgtaacacgttgggaaattttcaaacaaacaccaacattttcgtttcaatctacgaaattggttaaaccaaatatttttttgttcctgtgatgcaaacatttagtgtaaagaaaaattatcagagataaaatgagataggtgaaaaaagtatatttggtttttgtggttctaaaaagcaagaaactaagtgacttttactgaaagtagtcgccaattggaaaacaaaaattaaaatatggtttgagtttgttatacaagataagtttaatcggtagaagcctgtagtcaatgtcaattggttttactagtctcatgttgtgtgtgataacacaaatttaaaatcgacaatagacttgtgaaaaattgtaaacaacaggaaaagtcataattgttggcaagaaattttattgaacaagtcttgtaagaaatactaatcccgagtcgtatatgaatgcattaatatccataatttgaatattagataagaataatctttgatgttggtcttctcttaaatagtaaaactaggtaattttattccaaccattttgaaattaattaaaattattagaatgacttgtaaactagaattacttgtggaagatcgttgtcttacgtgccagacttagtccagttagtaatctaacaagatatattgcaggaacatgtatatcatagagaaaacaagctctatcatctatatatcatactttcaagagactgatcaatcatgtatagaaacagacaaaacataggcctacaacgacttgaacaaattcggtttacttttaaactgaaatcaaattctttcaaaccctctgattcacaacaaaactcttcattttaaaagtttcacataataaactagttgtcagaccaattctaatccgatcgctcaattgagataagaaaccaacaatactagataagaaaggaatgaagttttacatataggagtcaaaaacttatgcaacaaagttatgttctgttgttctttgggtgcggtataaatatcaagaatcaagcattttatttgtataagtcgatttattaatcttttaataatgtgatttcacttcacaagattactctagctttttatcaaaaaaaaaaaaaaaaaaagtactacaattacaacaacacttcttatttcacctttaatactttcgtgccatgtatgtcccaagagcgttttagcaagttatgttggcgccagggtccaaaccaagctgcccacaatagtctctatagtagccaatccttgcgttcaccccacctaagttcctaccgtcacagtcgaaaccgctgatggctcttatggtggctccaaatccctggttcaatacaggcctcacgctcttcatccaaaaccacagagccgtcctgaaagccacgactgggttactactcaccagctcgggctggcgtaggaggtctaagccgagactctggccgcatgctccatagttgaagttccatgatagtaggagcggaccacggccatggtagctcttggccggtgcacatggatattgcctgttgttctggtcgcacatgacacgtgacgccccgtttatctcttctatgtagcagaagtctacacgtacaaagatgcatattgaaacacactagttaatttacgaacaaacgaacaaatgctagaaaatcaatgttcagtttataattattgtaggacaaaaacagagtaaatgagataacatccaaggttttaaaatttaatctcttacgtcttaaatatgattcttttttcgttctagataatgattgtttcaaacgtatgtatgttatagtattttagtaattatttaaaacactcaaacgctactgtagattaaaacgtaaataaacaattgttactctaaattttttaaattcgcatactcaatttttatgtcacaatctagtaatgtaccctagaaggctaggatatggttagtgtataaaaaggtcaaaaaccgagaaaaaagattcttacgtcctgtctcgtaagtgaaatgagcaaacatggtagcaatttcacgtctagtaacggtattagcaaagctggggaaagtattggtggcgttaatgaaagagtcccgggtgtaaaaactttttcccgcgcatccattaccggcttggttgataatgttgttaaagaaaatttgtgtcacgatattaccaaccaaaccggcaccggtagggggtccaccgactctacaaggacctgattggcacgtagaaccacagtaatctgcagtggtaccgcaataaccgaactgactgcaacataggttaggggcgcaatcgcagttttgagatttgacggtttcagaatataaacctaagagggataggagaaggattaagaagatttttgtgagagccatctttgggttcttgttgtttgaggagagggaagagtttgaggtttatatgatgaaagatattgggtatattggtcatttccgtgggactggcaatcaattgtgatttaatttctttcatttatttaacaatggttttgattgttatgccgaagatgtatgggcaattgaattggccgacaaaaaaaaaaaaaaaaaaaatgaattttcttttaaaaacaaaaaaaaaacctggtagattggaattgtactgtagttggaaaaataattggttgaattaggatcttttaatttacatggttacacattttttttgaatttggaactaatgaataaaaaagttgtaggatatattttatttttttatagataactgtcggtttgtttttttgtttttttaaagtcggtatgttaatgaaactaagaaaagccgcccttcacaaataataatattatgttaaccaaaaaatataaatgtggtaatttttgaagtgcgatgttagaaaattgtcgacggcttggaacatcgaacctgaaaaaattattgaatttgactacttattactaaacgatccaaaaaaatattggagtgttccttgattaattacaataatacaaaccgagtccccaatcaattgcccctcttctctcgagcattttctaaaagccgactcttaaaagaagccaacacatattttcatgataaatctctgtacgatggtttgccatggttttgacttttcaacattgaacttcaaaatatttgcaatgaatagatcgagtatagatacgtatagcggactgaaatcatctgaaatacgaaatgaaatgctttgaacttataacatagatgttgttttatatatacaagtcatacatcctatatgacttgtatatataagtaagtcatacatcctaaaaaagaaaaaaagaaaaagttatacatcctataatagatcctctatatttaaccggatagaatccaaacggtaacatttattattatatgaggggattgtgaacgtaataagtgtacaacatattttctacaaaaatcaccgttgcgaaatttcctaacatttgtacttattttctttaataaaatcagttttttttttctttctgaaaagttcacaaacataaaccagactcattgattacgctaggctgcatcctgcatacgtctctaatgaatccatatgttgaccaaaaacaatctaaaaaccattaaactaccaatgtggtgatgacacgtttatcattatgtttttttttataaaactttttgtttttggcgtgataaatacaagattataaaatattataatatcaatttatgcgagtatcccaaaatcagatactgcaagtgtcaaactcaaacatctatcaatcttaaaattctctttcataagaagtcacataagaaaagaaaatcactttcacaagtttattacaacaattttttgcttgtgacgcagggaacaccgagacccgacataaagtacatacgtgtgaaattttagtatatctcacttattacatgccacgtcacatatgtccgtgtttgggttcaaaggttttttagcaactaaggttaggaccagggtccacaccaagctgtccacaatagtctctatagtatccaatccttgcgttgactgcaccggaattaccaccgttacattccattccattaatagctctaatggtggctccaaacccttggttcagaaccggccttacgctattcatccaaaaccacaaacccgtcctgaaagctacagttgggttgctacccacaagttcgggctggcgtagaaggtcaagaccgagactttgaccacacgctccgtagttgtagttccatgatagttggatcggaccacgaccgaagtagccttttcccggtgcacatgggtattgtgtgttgctgctctggcagtagttacgtgttgctccgttaatctcttctatgtagcagaaatctaatacgtatggagatgcacatgaaacagaagagttatttaggattaggatcatcttagttacttgagatcaagtcaaatgtcatttcttactacaatatcaaaggtttaatcttatatggtcttataaccaattgttttccttaaaatacttaacgtgttataataatataatataatcctcatttgttttgaaataatgcaaaacgttttaaaatatcaaatcctccaatcattcgtttagtttactaaagttataaacttcgaatgagtcatgactaaagtagatgtatacacagacacaaaatattaatttatttttgagtatataaagatagaagagaagaaagacataaatcttacgtccggtctcgtgagtgaaatgagcaaacatggtagcaatttcacgtctggtaacagaattggcaaagttggggaaagtattagcggcgttaacgaaagagtcacgggtgtagaatcttttccccgcgcaaccattaccagcttggttgataatattgttaaagaaaccttgtgtcacaatgctaccgaccgaccctccggtcggggttccactacctctacaaggacctgatcggcatccaacaccgcagtatgcatcgtcggtaccacagtaaccgaactgactgcaacagaggtttggagcgcaaccgcagttttgagacttgacagtttcagaaaagaaacctaagaggcagagaagaaggactaaggagatttttgtgaaagccatgttttgtgttattgtttgtggttgagagggcaaaggtggtgaggtatatataggggtagatgttgggtagtttggtcatttgtctattgggataagtggatgtaaatgtctttttcttttttgtatagcggggtacatatttatgtatttcgaaacgagtttgacttttggtcgtgttcttactcaagatgaatattgtggacttggtctaaattcaattttcttgttaaacagaactattatattaattgatatttctcacttttgtttcatattttgaacaattctatgatttcccaatgattgaacaaacaaaaatgttcgtttttctattaaactgtttaatacatgtaatgtcaatggagcaaacattaaaatattttgttattctatatttaatacatgtacaaactatatggagcaaacagtatgtctttttcctaaaactaacttaagcttgaatcgtttatttttcatttcttaaattcgactcttaatagacgatatgaagacaagtccttggattaagttttgtttgtttgatatttatcttactagagataaacatttcaaatgtaattgataaaattaactactctaatatagtcgatcagtggctagttcttctagagtttctgaaagccggccctaagtagagaagtcgcatattgtcactataaatcttggtgccatgtgactatgtggtagagagatgtcgcataatatcactataaatcttggtaccatgtgactatgtgagcctttggttgggtccattacccggcggctactcaaattccatcaaatgtatgaatttcagttttagttgacaaaaaatgattctcagttttaggggctgtattgaaggatgaattgagagtgattttagttttgatgagttttgagatggttttagtgaactttaggaaattgctattaacattctctaaaatctcacctaaaactataagatttgcatctttgattttttaactaagaaattccttcaaatttcacctaatgtatgtcactcaaatcactttaaatccactatttattttttttataaaataacagttgattttcatctaataaaagacttggataaaaatcggaataagaatgtcatcaatcaaagtgtagagtaatagattatactatatgacattctgaaccatccatatgtatcttaaaaccaggaagattgttgacaagagaaggacaatgtcaacaaaaaaggccatgatactttattatgtcttttgtgtaaggctaaaatttgccgataaaaaatgataaatgcacaatcatacaagttacgttgcatacgttgaagaatgaagagtagaagcaattatttttgactattcaattcaaagctcttggtttcgccttttctggtggaagtgacaactgcaccggacgttgtgcgttccggctcggtcactgcctcactggtccggactttcaggaatcgtatgattcaacaaccaactcattcttttcaatgattttttaaaactcgagtcgccgcgtggaaatttttaaagtttaagagataatcataatgatcaattataatgatttcaatcgcaatgaaattactcaaaccttagttcttaacttcatgctaagtctatcaagtactgaatcaccacgaattcgttgcgagttagcattaggaataaaaagaaacgagaagtagataaataagatgactgtgttttgtttttcgatttattgtcaaagaaactgtatttactcattaaaatgaagttattgtcaaagaaaaacaattgatcataagaactaattggaagtgcaattctaaatccacacattctaacgctagaattgcacttccaattagttcttatgaattatacttcttaagaaaagttcttactataaaatctcaaattaatcaacgtactcgctggataataatgactcgtgctcactatcaaagaaattcaggctttgttttatgcttatttcacatataaccagctgttactgttgaattatgtagatacgctaaccattgttttctgttttgttagcatcgtcatcatataagtatcaaaattcaaattcgtatgtatattgtttaatagtaataaaaactttacgagatgaagacaattcatattcccttaacagtaatattagctcaattaaataaaaggacagattcgctgggtactaactcattctttcaaatttatttgggactcattgtttcatcttaaagtagagtttttcgtaggtgtatcttattataaaatgatcttaagtttcatatagacattcatgcacactgcctgattattcgagtctatatattgtataattttgtttttcgtcaacaaatccacatacattactgaagatagtctataatctcttcatttattttccttctaggatggtcacctcagctgtactggtaactaaaaaagtccaatatcttcgggtattcgtagaccacttggaaggaacctttttatatggtagaaatgaattaattaatttatacaattttttttttccacttagaggctgcggtgtactactatttaacatgtattgtcaattattcaaaagccatggcctaacattattgcatattcctaatgctaactaatgactttccatctaccaaggctaaaaaataaatatcttcttgagtttttgtcttttgtttttttcttaatctgttagcaaacaaaatataagcaacattgactagtacatagaaatggaaggatgaataataaattaaatggcttatgttaaatcgaaacgtccaaacgatttgaaattcaattttaaactttgtgactatggaataaaagttttcatcttgtttacgtctttaaagagttccaaattttatggtttttgtgtttcgatcgccaaacttagtgagtttgtaaatcgatcatcctcaaacctattaccctatttcactttttaatttggtccgaaaattcattgaaaataaaaggaaagcatcagctatacaaccagagaaaacataccaataaatgatgtcataaagatcaagccaaaccagccctcgtaatgctacatgcatatgatcgatatttctatttagtactggaaactaattccgttttccaaatggatttttgccgttggtttggagttccgatatttgaaaagtaactatcaaaataaaatcttgaaaagtttaaaccaaatatatatatgttccataggtcaatcaaattagttattattaatttaaaagtatttccatcacactaatgactttaacaatcgagaccttgatcaggagttactccaagcatctcgcagaactctatgtattgcttaactttgttcttcgtatcatcgcgacgccagttaccacattcacggccatcaactctctttgtgatttctccaaatcctaagtacaaagcgggacgcacgtttctattccagaaccacattgcgaatttgaaagcaacttctggactacgagacaccagatctggatccttcagtagaggtagcccgaggtgcttgccggcaccgtaatactcgttccatgtgattgattgtagcaaaccacgaccatagtagtttttccccggttcacaagggtacttcttgctctttgaacaatatctctcgttcgatatttcttctttgtaacaaaaacctttacgtaaaaataaaatgtattatctttaagcttccaaaaaaccaaaattgcatgcatccatgattttcaaatatcttacgcattaaaggtaaaaacgccaatgcaaattttttatttttggtttttaataatataatgaacttacttttagatccgtatgagaaatgagccaatatagcagcgatctcacgtttagccacctttcctttgtaagctccaaaagatttgaaagcagtaatgaaagcctcataagtgtagaatccttttgccgagcagttgctttcgactttgctcatgatgctatcgaacaacgctgatgtgataacggtttctattttaccacgtggaccggcatcaacgttgtagtcgtatccgtatgattttcccttgatattgcaagggccactgaaacaaaaaaatccgcagtattcatctttggtgccacagaaaccccatctgctgcaacattccttaaggccagggcaactagtatccatgcagttctgcgagaacacggtctcggccaaaattgctagaatgaagagggaaaaaatgacgtttttgatggtcattttgttatagcaaatgagtgttaggaaatggggattttgtgaacatgaggggcttgtggacatatttgtagttcaaaatcagtcgatttgtaattgatttaatatattcttgatattttaaatacttaagctt

SEQ ID NO: 372 - DNA, 98734 bp, Arabidopsis thaliana
gaattcctagttacctgattccatgtcccggtccacaattgacacgttcgatccaaatgttcctagatccttgactaagtgcaatgcagtcatcaccggtcgcaatggttccgccactaatggtgactccagaagaagactgtacgtggataccatcggtgttagggcttccacttggagccctaattcttacgttttcaatccgaacattagaagaatgatgaaccgtgacgtgcatattctggctattaaacgacgatagaccacttagtagaacgttattgcaccagctgaacgatatagactgcaaaagaagccatgtccaattataattaaatcaaattaatataactagctaataaatgaacaaatcaaatccgctagttttgatgtaaacatacccttgcaccttgaggacaatgactacctttctttctacaagaccaataaccagctcctctagcatcaatggtgccaccgtaaaccgagatccggtttactttagcgaaaagaatccaataaccggaattacctatatcccagtagttcgctggagccacgagtgttccatcgtttttgaaagttataatgttcttgcaaggaccccaaaagactaggtttttgaccaaatatgttccacggggaacgtagaccatggctcgagcccgtgagccgcaggctaatgaccaagctgtcaaaaaggacttggtcgcatctgctctcccatcacctctagctccgtacctttggacgttaaacgatggcattgcgtgtgatgacttgattaagaagaaaatattgatagagaaaaatatgatggcgcaaggaaaggagatgttgttggccatcttaaatctcttctaatttgcgatggctttgtgatgattgtaatgatttaagaagaaataatgagaaaggttatatactgtatatataaaataaaaacaaattttattttagatcggacgatccgtgtattaatgactaatcgcgttagatgcggtgcattaaaatataagtgacctaaatgttacttgattccatagtctatgttatttaatgataatgtacttatgacttgtgtgagtacaacttgttatgtacgaatattagtcgataaagcgacgcatgcatgaattattgcaaaacaaagttgtactctcagtttccacgttatctatatgcaaatgcttattgatcagtttccttatcaacttaattcactgaatcagaaaatattttttttgtctctttacataaacagtttgatattcttttgaacttaatcaattgattcagataataatattattttttctgtttatgctttttaagatttcaagtttagtatgttggtgtcatgattttattacccatgacgatttcacgatactttgtaaatttgtaatcaaacttcggtaaagaaggtgaatctgatgtataatgcggtaaataaaacagcagaatatatcaatcaagtggagaagaaacttagaaacaaaaattatctatcatgcactgttggaatttactgtaatgtcacgtggagaaaattctgcaggataattgggcgggaatatatgcaaggcatggctcctgcaaacctctctatacattattttaatttatcgtacagttgaaaagaaaagaaaaagttataagctctcaaattctcaatataggccttggttgaaaatctaaaaacattgagccatgccttaacataatatcatataacaagcataaaaaatttaaagttgtaagttgattaagaattatttgttcttgctgaaaaaaatgaaaaaaaggaattatatgttcatgattgaagacataacaaacgtctgtctcacacaagtatggatgttatgggcccattatttatgaaggactgtatttgtaggtctcgtttacctttcagaaacccaatatgtttccttcttctggttcaaagcccaacgttttccaagtctagaaacgatacattttttccattacatactttgtattactttttcaaaattcacaactacaagtctacaaatatgatgtatgtttaatttccccgcgcctttatgttatgtatgtagatggctggatcaattcgatgaaaactaataacaattgccatctgaagacacaaaaatagactgtttattttttatgttgaataattaaattagattggcttctcaattaacaaatcgatttgagtttatatccatcatgatcacatggctatatcgagttttaatatagtgtgtaaatgtcaacgactacattaaataaaatggtcactctatcttctaaaatactaaaagcccataaaaatgaaagaattattcacgaattttttttcttgctcttatgacatgatcaaattttcaaatttagtttaactataattagaagattgaaggaccagtgccagtaaatatcagtatgttactgcggttaatgatatttactaattaaggtgtaaattgcttctgaaaatcagtctccaacctcaactaacataattacgtaacgaaacaactaatatttggtcagtatttagacaaaatacgtaacaatcaaagagaaacatgaactcaacatgatgtccttctacataaatgcggcaaagcatatatgcatgcgtaataaatgtgttacgtgaatttatacatgatatttttgagatcttgcaatgcatgtgatcagccatagacaacataattatgagtctgtaaaataaataatatttgaaaatctatatatagtttgatgattggtatatgactatatggtcgcatactcgaatccttatacttgatcagatatatcatacatcattatgtacatacctattgggattttcagtatttcatacggttttatagtttttttctggtttggttttgatcagttttcaaaactaagccgagaaatgaataatcactagtattattactatccgaacaattaaataatactcttttcattgtatttttatctaaacaattaatttaaaataaattctgattgttttttgtttcgtttgaagttacattatattagaaaaaaatatgttgattcataagttgatttggtttagtttcaataagctttactttacttgggattggttggtatactagatatattataatatacatatattttctagttaaagaaagcaacgaaatgttttttaaaaacatacataacttgggctaaaagcttatcctatagcacatactcaaattttcatatagcaccactcttctaggtttaagcaaagggttgagtcacaaatcaacttcgatcccttgaacatgaatgcaattagtactcattcggcatcatgatcctccaattgaccttgaatattaattaagtaattaccggaaaagtatattcgagtagttaaaaatcttatctttcttagtctcgccattagcacgttaatttaaatgcatgaacttgaaaaatgtgagtaatcaaatgtttgacttaagaaaacattcaagtatacgaaagaaatttaattttggagaaatttaaagaacctttcggtgtgatcattgttccaatttcgatccgtattcttctccaattgtcacgttccgtaaccatgttgctccaatcatccaaatattattttccatttatacttgttccataatcttctttgtcatcttttgaatatttaaataacatacttcagaatgatttgataaaaattctgatttgacaatgaaactttggtcgtaaaatcttacatatgtggatggctcatccaaacatgcatgcatgatcgtaattttttttaggcctgaacaaaattggattaaataataaatatatactacaaactttgaaaatacattcagcgtaacctaactagagttgcataaaacaaaaattatcagatcttgtaacgtttaccaaatgtatttattggcaagtaaagctaatcgttcaataaaataattgtccgcatgcattgatcgtgtgtccccacaaaccatcttgcataggcagcaaatccaacgtgagtcgtgaccattattaagttaccaatattgaatccacactattgccaaggacctatagccaagtagctcaagacgtttggctgctatcttaggtattaccgaattcaaatctatatttcctccatgggtcacatacgaaactacttttacgatgaagatatatgcaataataatataatttacattgttcatcagacaaaaacttttttttttacattggtcagacaaaaattaagctagctgagataggcaaacactaatcataaactacttcacggaaaaaatatcattttaggtctaaaatggattaaaagtctaaaacatctttttcttcttcttctttttttgaaagtacgatttttaaaaaaataaatttttgaagtaaattgtttttgcggcttgatcacgttgaaggtgctgtcaaaagtgtaaagactttgcgtgttcttctcatagattaacgaactcttcgcttttcaacgtacgtttgtttcgtctattcctccaataaaaatgtattgaccatggtaatgtcacttttctaccttttattctacttctcctactttctctttcacaccgtaccgatttcattttttcgtacttgtttaatttccaaagattttttattattataaagatttcaattttccttgcggtgtatatgaaattggaaggcgtgtttatcttatttgaaagagtgattaaaaaaaaaaaactaaattgatgatctttgaaaacgatagactatctttgtatggttaaataggaaaggaacagaacaaataacgggctatcagtcccaacaacaatggaatttcaaatagtggcgaatggtttatgtttttctaggaattgccaaattttccatctatccacaggtgacaagtgatatattaacaaacttttttggaccaagtctaatcttctcaggccacgaacttcttatttggtttcacttattaataaaacagagattaacaaactctttgttccaagttttctcttctcattccacggaaatttcattagttttcttgctctgcttgttcttaattctcagtgccacaccagcttctttgactacatcatgataataacaacaagtttggcgaaactcaactggacctaacatttatttttcacaattagctgagttttgttctaattccactcatacgacaattaatagtacaaaagatctattggaaaatataatatgaacgaaatcttccattttaacataacaacatatcttatatacatatatgatgcgttttgaatgaatgaaaataatcatgcaaaacaattttacacctaatttcttattcattcaaaatgttgctttaggttcatgccaaacccaataatcatttgtttattcagagaattaataaactaattaaacaaaaaaatcaaacaaaacaaaacaaacaacaaatgcccttcgcatacaacacaaacactataaatacaatccataaccgttaaaactcccacaccaccaccactactccactcctcttctctctctatctttatcactaaacaatcgtacgttagcgaaaaacacaatggcttcacttcttgtcctcttcgttttcttcttcatctcttcttgttctgctcaatcctacaatgtattgtcttttggagctaagccggacggaaagacagacgcaaccaaagcttttatggcggtttggcaaaccgcttgtgcatcgtctcgtcctgttaccattgtggttcccaaaggccggttcttgttaagaagcgttactttcgatggttccaaatgcaagcccaagcccgttacgttccgtatcgacggtacattggtggctccagctgattatcgagttataggaaatgaagactattggattttcttccagcatctcgacggcatcaccgtatacggcggagttcttgacgctcgaggagcttctttatgggattgtaaaaagtccggcaagaattgccccagtggcgcaacggtacgtgcaagtttactattttacccttaatttcatcagccattataagttttttttttctagacatcaccatttattaataggaaaaaataaattaaattccaaatatgaatgtgaatgctaatttactttattaatgtccaagacaaagaattttataatggcacccttttttggattatgaagttttgatccgtttcataaaaataataccacattccaaattcacatggaccaaccatggattttacgtttaattaataaatgagatgggttactaacttatcatgtgaccaacagacaataggatttcagagctcaagcaacgtcgtggtctctgggctaacgtcactaaacagccaaatgttccacgtcgtcatcaacggttgtaacaacgtaaagcttcagggagtcaaagtattagctgccggaaacagccccaacaccgacggtatccacgttcagtcttcctcctccgtctctatattcaatactaaaatctccaccggagacgattgtgtctccattggtcccggcactaacggactatggatcgaaaatgtcgcatgcggccctggtcatggcatcaggtaatatttttacaaattaatcttgttttggataataatcactttatatacaatatgcattcatatgtcagtctaaattttatctaatattttggatggggtcttttgcactttgcagcattggtagtttgggaaaagatagcgtggagtcaggtgtacaaaacgtgacagtgaaaacggtgacgtttacgggaactgataacggagtaaggatcaaatcatgggccaggcccagtagtgggttcgctaaaaacatccgtttccaacattgtgtaatgaacaatgtcgagaaccctatcatcattgaccaaaactactgtcctgatcacgattgtcctcgccaggtaaattatcttaagtatatatgcacatgaaatattctacattggagattaattaatttctttcacgattattttaggtttcggggatcaaaattagcgatgtgttgtttgttgatatacatggaacatcggcaactgaagttggagtgaaacttgattgtagttctaagaaaccatgtaccggaattagacttgaggatgtgaaattaacgtaccagaataaaccggctgcatcggcttgtactcacgccggagggatagaagctggattttttcagccaaattgtctatgacagaaaagaaacatgacttttcttacaagtattacttaaattttaaagtagtgaaatgtaaatttataatttcgtaaatcatggagggagatgcatgagcctgtggcggttgatggaccattgggcctcaagcctggccttgctttgtagactttgtagtattgaacccgagcgaccattgatgtgtatttgatgtgttgcgtaaacttgtgatattgttatgcaactgtatgggatttttaattatagattaaagttttattttctgttatatgtttttcactactttgatttttttgtggagaacaaaaaaaggacattaaaaagacaggcctcctcaatttcgcgccatttttcttctgtctgtataacaaaagtgggtagtttcggttgacatttgcactattttggtggctccgtattttcctcttatatgcaaagacactggttaactgttttaacttttaagtcacggtaattcgacctttttatcaaaataaaacatttacaattgttgagggaagaattggacaagtctcaattctggcccaaaaggagttaacagcccgatttcgatttataagtcaaagcccgttacaaacaaagcccaatctgttgaaaatgaatgttctagagaaaggacagatcatcacattaaacagagggaattggccggattaccctcgtggtacgccctaaacaagcggctataaataaagaacgtaaagaaacgttgatgggacggaagaggggctctaatagaacgacagtacgactacaagcgaagaaaagattgttgacgccctcgttcgacgagctgaaccccggaggaaagatcgccccgacctcaaaatcgttgacgccctcgttcgacgagctgaatactcgaggaaggatcaccccgacctcaagatcgccactcccactcctccccgttccgagatcgtcctcctcaactcgtccacctcgtttagcttccggctcgaacaacttgaagattcttcttacttctccagagatcccattcgttgtacttgtttgataactgcatcaacaacaattaaaaacttttatcaatacatatgaaagtttacgtcgaacaaatttgatgtatatatctcttttttttttttcatttaaagtagtccacaaaattgattttgctgactaaacaaaaaccaggatattacttgtataaagaaatcaagaaactgaatcttacgtaatgaagtgtgagtttaacgcaagtgatatacgaatctcgtagcaccacaagaaaattgatagggacatcctttgtttgatgcgcatgttttctgtatttcacaattttgttttttaaaatataatatacttagtccttatatgtgttgttttgaatgtgtattcacatttctagattgtttttgctataagtaaatcaattctcgttatcaaccattattttggaatctatccgaaaaagttgacgaatcattcgaataatttcttattacacttacttaaaaaaaccaataagttattattatcttgatatgcaatttgaatgactaatgattctttgttaacttaccaaacgagtataggtgaatgttagaaaatcgaaagtacggatactgttctagcgatcggcaaagttaaagaacttgaacatgcatgcgctatgattttttatataaatcactaaagtagttaagttagtgaatattaaatcatagtgataccaaaaaaaatacataaaaggacaccacaatcctaagaggtaataaatcttcttcttcttgttttcttcattccataattaattaatccaaaaacgagagccaccaaatcgatccataatcaaaattttccaattaaatcaatccatataactatctctgtcgaaaacgactaatctaatttcgtacattaccgtacactaatgcagtcatctaaggaaacttatcttgcgaataattactattatttcattaaaccaaccaaattttattacataacaaattacccggttatctaggtacacaagttgacacaatggtagatattaataaaatcaagaaagttccatataaactaatcattacgttactatcgtaaatcctataaattcccatctcatgtaccttcttctacaatatccttcatccttaaaacactaaccttctctgaaaaaaatccaaaaaatggtttataacacttcatgccttattcttcctttggctctcatcattcttgattttaccttaatctcatcattagcccatccgattccaagcacactcaacgtcttatcctacggagctaaaccagacggctcaaaagactcaaccaaagccttcttagccgcatgggacgttgcttgtgcatccgctaatcctacaactataatcgtaccaaaaggacggttcttggtcgggaaccttgtttttcatggcaacgagtgtaagcaagcgccaatatctattcgtatagcaggctcaatcgttgctccggaagattttagaattatcgcaagctcaaaacattggatctggttcgaggatgttactgatgtttcaatctacggtggaatacttgacgctcaaggcactagtttgtggaaatgcaagaacaacggtggccataattgtcctaccggtgccaaggtatgcttgacccacaagaaacaacaaatttaactctcatgaggtttttaatttttttttttgttaatcttatttgtagagtttggtgtttagtgggtcaaataacatcaaaatcagtggtttaacgtcgatcaacagccagaaattccatatagtcatcgataatagcaataacgtgaacattgacggcgttaaggtttctgctgatgagaatagccctaataccgatgggattcacgtcgaatcatctcactccgtccatatcactaactcaagaatcggaaccggtgatgattgcatctccatcggtccaggatccactaatgtattcatacaaaccattcgatgcggtccaggccacggcatcaggtaacacacacatacatttcttgctccccatctttcttgatatttcactttctaaaatgttctcttgttttttttgtttgtgtgaactctccaacagtattggaagtcttggacgagcagaggaagaacaaggagtagataatgtgaccgtgagtaacgtggatttcatgggaacgaataacggagttaggatcaaaacatgggggaaagatagcaacagtttcgctagaaacattgttttccaacatattaacatgaagatggtcaagaacccaatcattatagaccaacactactgtcttcataaaccttgccctaaacaggtaagaatatttattaattaaccatatctttacacccataactcgatatattgactcatttaatctgtatattaatttctattattataggaatcaggagttaaagtatcaaatgtgagatatgaagatatacacgggacttcgaatacggaagtggcggttttgttagattgtagtaaggagaaaccatgtaccggtattgtaatggacgatgtgaatcttgtctctgttcatcgaccggctcaggcgtcttgcgataatgcaaatggatcagcgaacgacgttgtcccattcactccttgtctaaagagggagatcattataacttaactataaatggatcgctgaacgacgtcgtcccgattgctccatgactaaaagatgagttcatgtagatatatctgcgaacgacgttgtcctatttgctacttgttgtttgatcgttgagaatcttttttttttcttttttcttgttttgtttttgataatttctttgagaatctttgtaatccaaactatgaagtaatgattaaattttggttcgcatactacatatagatgatttctgtagtaattgtgtctatagatattttgagagatatggaccaaacaacttgtgaaaaagtaacataattggatgaaatagaaggtgatggaaatatatgggtgtgaattaaagtaaaacataaactaactggaaaatgattagtatacattaatggttgattaatagccgacccattaaggcattaactattcttatactatactataattaacctatggagcatatgagatttgatactattattacataaaaaattagtggagtagcaccatattttttagtttttaatatttaaaatttaccatcatcctctccacttcactaaaaaaaaagtcaaaaacccactttctccaggttgtattccattatattaaagttttatcttttaattagtttcatctatatataatctacatgggattataatccaatcaaggctttacctccaaaatagatattttgtgtaacgaactttttggttaatttcgtttatggataatagtctcaattaattacaaaaagatagaaaatttaaacggactatatacgatcgtttgtttgctgtgtgacttgtcgtcttcttcttctgactcaacctccattgaccaaccctccaaagacggcaatgtgggttttattcttaatccattgatctcttgttgtgaggttttttgagaatttgcgtaaaggaagaaactttttcaaaacttttttttgcatcaatggagaacataaccgcgcagctcaaacgaggtatctcaagacaattctcaactggttcgattcgtcgaacattgagccgacagttcacgcgtcagtcatctcttgaccctcgtaggaccaacatgaggtttagtttcggtcgtcagtcttctctcgatccgatcaggaggagtcctgattcttccaagagtgatgacgagccacatatgtcggtaccggagaatctcgattcgacgatgcagcttctctttatggctagcaaaggtgatgtcagaggaatcgaggagcttcttgacgaaggaattgatgttaatagcatcgatcttgatggccggacggcgcttcacatcgccgcttgtgagggacatcttggtgtcgttaaggctcttcttagccggagagctaacattgatgctcgtgatcgatggggaagtacggtctgtcttcttctcttaaccctctagattcgagaagttgacatttagggataaagttgacatttttatgttgtctggtgaattaggcggctgctgatgcaaagtactatgggaatttagatgtttacaatctcttgaaggctcgaggagctaaagttccggtaagaaattttcattgattttggattcgattggtgttttgttcatgtgtttgttttgtgaaaggcttttatcttcacacttatagaaaactaggaagactccgatgactgtgtcgaatccacgagaagttcctgagtatgagcttaatccacttgaggttcaagtcaggaaatctgatggcatctcaaaggcatgttctttgctctcttagatagacacatttgtgaacatcattgttcttggagcaggtttgatttattcaaatcaatggatgttgtttgattgttttcagggagcatatcaagtagctaaatggaatggcacgcgggtttcagtcaaaatacttgataaagatagttactcagacccggaacgcatgtatgcatctactacttgtgtcctttattatgtgttacatttgagtgatccacccctaaattttgtttgctaagctgtgtgatttggtttggcatgaagaaactgattctgctttgtctttctggcttttaatctgaacagaaacgcatttagacatgaattgacgttgctagaaaaagtccggcatccaaatgttatccagtttgttggagctgtcactcagaatataccgatgatgattgtagtcgagtataatccgaaagtgagcatctttacttgtcttctcccttctgagtttacctttattcactaatcatctcaatgtcgtctctgttgcagggagatttaagtgtatatctccaaaagaaaggacgtctttctccatccaaggcacttagatttgctcttgatattgccaggtatgttagattctcatgtattgctgctaaggttactgtaactgtgagtacctcaccggatggttttcgtggtttttctcgtgtcagaggcatgaactacctccatgaatgtaaaccagatccaatcattcactgtgatctaaagccaaagtaagagaattaaaggcatatgtcgattagatacgttaaaagcttttggtacatactcattgagatgtttcttttcgtttaatttttcgaaatttttcgtaaggtgtcagaaatattttgctggatagaggagggcaattaaagatctcaggatttggtatgataagattgtcgaaaatttcacaagacaaggcgaaagtagcaaaccacaaagcacatatagatctctctagtaaggagaatgcttcattcacatgcatgaaaactgaatctcttggtaagatctatgatcattgaaaaaaatgcattcttgattgcagattactacattgcaccagaggtttataaagacgaaatattcgacctaagggttgatgcacactcctttggtgtcattttatacgaggtacatttcctcgtcttgctctgtttttttattcttgtgtttctctaatcttgttagtgtgcgtttctggtcagataacagagggagtaccagttttccatccgagacctcctgaagaagttgcgagaatgatgtgcttagaaggaaagagacctgtattcaaaactaagtcaagaagttaccctccagatataaaagagtaagctctaaaactatttggaaccaagaattatctattgcctatgcaagaacttggagtgtcggattcttaacctgttatatcgcttactctgcaggttgatcgagaaatgttggcatccagaagcgggtattagaccgacattctctgaaattattattcgacttgacaaaatagtagcaaattgctctaaacaaggatggtggaaagacacattcaagttcccttggtaagatttcatcttctcatataatctatagttaaagcagagaggaaagattgtgtgtgttttaatgttttctttcacaggaaataaaaggggaagaagaaggagggagaaacaagaagagcgtgagatttgtggacaaaatccgattcagtgtttctcagtcatatgaacatggacaaactcacttgctatgtatattttttgtgtagaacaaaaaacagaagataatttcttctttttgtcattccacatctttatggggctgtatgcataagtttgtatagtttataaacgcgttactgtataacaaacacaagaactccggctcgttgcaattagaggatgaacaaacaacagatgaagaatcattttgaaaggttttattgaaatatccatcaagagatataaaatctttgctactttatcatgtgcttaacttatttgatttgaatttttgatacaaattcgttaatgttgatatctgtagaacctccttcactgagtgacttcacagccaagtctctccattttcccgcattctctttcatctctttgctcttctctccttccatcacttccttgatgctaaactcaatctcctctcttttgcaaatgccactttctttctctgctttcacacgaaccccaaccttccatacatcttgtatatactttgcattcattggttgatcagtccattgaggcatagccaccatgggaacccctaaactcaaaccctccatggttgagttccagccacagtgagtcatgaaacaaccgatggctttgtttgacagaacttgaagctgaggactccacttcaagaccaagctcttgtctttatccactgtttcaagaaaccctggtgggagctttgactcctctgaagctctgacaacccagaggtagctgaagttgcttatcgccgaagcaatctcttccatctgctcactactcagtttagccatgctcccaaaagctatatatactaccgatccttctggcctcttgtctagccagtcagtgcataaggcagcttcttttaagtcaaagaggttcagatcatagtcgttgtctgatttgatctgttggtctaagtacattgatggaacagttggaccaattgtcaacacaggacatactttcgacaacaactcctcttcctgtagacggaaatcagagaacagaaaaatagtcattaggtgataaaacagagtagctaagggaaaaacagggtagctaggtcaaaaagaacagagtaactagggcaaaaacagagtagttaggaaatgaactaacatgaaggtcgaggtcatggaaggaattaacgagtacgaaatcagctttgtcgaagttggtgaactgttgaagcaccatctcaaagtaagcaaggtgtgaaccagtaggagtgacgaaagtaggcaaatcttggagctcaagaagaggcaaatccttgatgggaagtgtcaagctaccattgtttatgtaagaaagataattgatatagttaacggcgcaagactgcgtgaagaaaggagccgcagctagaccaaaatccattgcaaggtcaagcgcccaaggcatgaaagaatcatagacgatacaagtaatagggttatcagtactctggtgtttgcggatgatatcagcgacggttttggagccgaaggttttgaagttttgtaggtactccgggacagaaccggctgatgagaaccctccctggtcatagccatcggagattgtggctatggagataggactagatgggtcgaggtggattgtgttgaagataaaagtggtgagagtgtgagtggttttgaaacctttggagtgaagtcgtttgcagaattggcgaatcggggtgatgtgtccttggcttggaaatggcactgctaatacatgtcctctcatcttctccatctctctctctctcgttatctctctctgtcgctctcaatcttttgctttccgcagaacgaataaagggatattgggaatatacatatattaatagacttgtgaggttcttccagaagacaacagcttttcatcagagcaagaaaagaaaatggtccaaaaaaaaactaaataagggtgacaagtgaaaagcttggattttaagttttatttctttttactttattgtgttatctttgggaagatggagagtacatagacacatggaaatgaaaatgggacgtaataacaaagtcagaagattctctacggttctgtagttagaataaaagatctcgacaacatttttaatttagttgcaactagtataattaaaattttgcaggaaatcaattgtgaatatatatgtaagagatttaaaatttaaggaaatagaaatatccaattaggaagtcaataagtgaaattttctaccgctctatagttagaataagatctcggcaaaatgtttattataatagcaaatatgggtgttataaaaaaattctaaaccttagtatattaaaaaaaatctaaacctaacaaagccaaaaaaaaatcaaaaatcaaatgtcaagtgatgtatatgttaaacctaacaaagccaaaaaaataatgtatgcatttggtaaaccaaataaagcaagaatagcagccaagcactagcagttcataaagggttcagaacttggagtactaatttgcatgcaagtatcaatatctcggtttgatataaaactaaactgaaaataaactcaaaataaaaatttcgagaatgggacatttctttaaatataaactttcatagtctggcttggtctatattaagagcaaacatccaaagttgtttatggagaaggtgctgcagtaaatttttggcgaaaagaaagcagagatcccaaccgttgattttttttagttttccagccaaaacaccatatattaagtttgtggaataaaatcctaaaccctaaagactttcttcaagagaggaacaagaataaattgttttcaattgggaaaatttctccccgcctcttatttgtcgaaaatatgaaaacaagcccacacagacgattctatttgaaaaaggaaaacaatgggccgaataaatattaatgggcctgactaaatgggcactatatccaattaaactatgctaaacaacgttgccagtaaagttcgccgtcgtcggagctcatggatcgaccaccgtcgtttacacactatcaaaatcctaatccgaaattcttccaccacgcttctctttttcaaaatcgtaccaattttactccatcgctccggcggtgattggcgagctctccggtatactcccttcttctgttgtcggaatttccttagattctctctcgaaaaatctagctttagatcactcttccgatgaggacaagcggttagtcattactaatttcaattgatttcggttaggtttaaatggtattgaaataaattagaattgatttgcggttcggtttacatagagaagaagtaacaaacaaaatattcacgcgacgaggattttggagacaaatgcgtcgattgaaaaaggcgtgttttggaaaggggtacacccacagaattgctctcacgcgctcaacgctcactttgtgcgagtgggtgtgaaatagagccttctgattggcttagaaactctaaaaaaagtgaaatagtatacatgttgctagctcctatatgttattatctagtttttgaaagttgttttttttttttagttacgattgattctagatgatatctgatggtagtgataattttagataactataaagttcacatttagtggtggttggtgatttttgatgacttgaagctctctgcagaaacgcacttggacatggaaatgttacatctgaaccccatatagtgcttctgctccaatgtcatcttcaactcttctcctaccttcaagtatgtagtggattaaaaacatcggttgttcagcattttagacccccaaagtcgtcaaaaatgtctcacccttccagttctatccatgaggttattacaatatatgattgcaagttttatgtttttaaaaccatgactgccattatcccattcatgtttctgttttcttgtacagatgagcttctcgtatgagttgttgtttgtgaaactttattgtcacccatttggcctagtgaacttagggaacatatttaagctgcacaccaaaattattctgctcttattgaaactatgtgcgatctcatcttgatagttggattttcaggtagaaagaagagttggccttttgcttgtgagtttgaacacttaaaactttttaaaggctacattgacgaggatgaagaacggcacaaatttggacacaaaggaggtaaggcccgaagcttatttaagccttttttggacaataatgagaaattgaactgagtataagatttagcgagccatcattggtgcctcactttcatctaaaatgctgcttacttaagagtttctattcatttgcctagctaaagttgaaacaaaagttctggtggctcgcgaggaagaagtacaacttcttaagaatctttcacatccgaacattgttgtgagttggcgaatccattcagctatttttcatatgtttaatgtctgttccacatgcattcttcttattatctttgtttttgcagagatacttgggtactgtaagagagagtgattcgttgaatattatgatgcagtttgttcctggtggatcaatgaattgttcctggtggatcaatttcatctttgttggcgaagtttggatcttttcctgagccagtaagttctgactgtacctgaactttgaatctttgataatccttgtgtttgagcatcacagtcacaggcgatgaatgttgtgtctgaacctctttttaaataggtgataataatgtacacaaagcaactgttgcttggtctggaatatcttcacaacaatgggatcatgcatcatagacgatacttaggagtcaaattagataggtttgtctggttcttgcttaaatatagccaaatgtttacatacttaagaatcaaattagaaccaattcagccacaaaagtgaaatagagaataaaactatcaaaggtaggttgtctttaagacctgcaactacatttctcatcccaacctctcaatttattcatgtagggatataaataaatgctaaaaccaacatgaaatcctcatttaatttggagaaaagatatttaagtttttataatacgttaactctatgtacatacatttttaatgaaacttattctataaatgtaaaacaagaaaagtcgagtacttttatcgttttattgttatttttggagaaggtcccaaaatggagtaagaagtgaagagattctccacggttctatatttttcgacaaaatcaagaaaatgacttaactatttgatatcttcttcactaatatatgacgttttgttattctctataacatgtgacattattgtatctttcactgaatcatccattggatatgacactgccaatacatgtcctctcttcttatcttcaccaatatctttcaattctttttttatgtagcttaacagttaaaagagagcaacactaagagacaatatgtttttgcagtctacaagaggctaaaggtctagaaatcatatttttggaagaagattggctataataatgttgggctttaagttcccaaatacgcaatggtggtaaagttgcattgtttttattattattattgtcaacaagaagcaatatggggatttgaacatacaacaagaagcaatatggggatttgaacatacaacataagaaaagtcaacaaaagattatgctgaatgaaagacgtacaaaacaagatattatagaaggacctttgctactgtatgtgagttacctatttgctctgaacccttgatacaaatgtatcaatgttagtatccgtagaacctccttcattgagtgacttgacagccaagtctctccatttcttcacgttcttcttcatctctttgctcctctctccttccatcacttccttaatgctaaactcaatctcctctctcttggcaatcccactctccttctctgtcttcacacgaactccagccttccacacatcttgtatgtactttgcgttcatcggttgatcagtccattggggcattgccaccatgggaaccccgaaggtcaaagcctccatggttgagttccagccacagtgagtcaagaaacaaccgatggctttgtttgacagaacttgaagctgaggactccatttcaagaccaagctcttttctttattcactgtctcaagaaaccctgatgggagtttttcctcctctgaagatctgaccacccacaggaagctgaagttgcttactgctgaagcaagctcctccatctgcacattagtcagctgagccatgcttccgaatgctacgtacaccaccgacccttgtggccttgtgtcgagccagttaatgcagaaggaatcatctttcgattcaaagagattaagatcatagccggtgtctgatttgatacgttggtctaagtaaattgatggaatagttggaccaattgtcaacacaggacaagctttcgaccacaattcattctcctgtaaacaaaaaaagagcagttagtacatgcacaagaacaagagatggtttaagaattgtaagaaagagatagagagagatctaacatgcagttccaactcttggaagctattaacgagaacgaaatcagctttttcgaaatttatgaactgttgaagcaccatctcaaagtaagcaggataagagccagaaacagagaagaaagaaggcaaatcttggagctcaagaaaaggcaattcctcaatgggaagttgcaagcttccattgtttatgtaagaaagataataaacatagttaacagcacaaggctgcgtaaagaaaggagtcgcaactaaaccaaactctctagcaacgtcaagtgcccaaggcaggaaagcatcatagacgatacaagtgatggggttatcactagtctggtgtttttggatgatgtctgcaatggttttcgagccggaagttttaaagtctttgaggtagtcgtcgatggagtcagctgtctcgaaacccccatggtcatagccatcggagatggtggctatggagattggaccggataggtcaggattgatggagttgaagacgaaagtggtgagagcgagagtggttttgagacctttgaagtgaagtcgtttgcagaattggcggaatggtgtgatgtgtccttgcgttgggtacggcactgctaatacatgtcctctcttatgctccatctctctcacttctccccctttctctcttaaaatcttttgctttaaccaaaatgaatatgtctcaagagatgttgatgagaatatatgtagatataggttttgtcggtttcttgcttagataagagttttgcgataagaagaaatgatagtttttttgttttactcttcttctttttattataaaaaaaaaatgggaataagaaaacaaaaccaatttgcatgtctttgacaaggaaagaaaatgtgttaataaatacaagttgaacttcttctttgtattaattttggcttcattattttgtctaccatgtgcttttctgttctgtatactttttttaaaaacacaaccatgatatgtactattttgaaataagttgttaagtaaacatacaaacgatgaatataaacggatggagaaaccatgtctgtgttcagcgttggtttttttttgtttttattacatttttggtaaaaaattgatgaaaagaatatcgatgtcaagatgtaaatacaaacacacacaaaatcgaagcttttattgttattatttggagaagtaaaagagatggaaaaaaaataagagagagccgaaatggagaatgtactaattactaaagacgtgaaaaggttctgtacggctctataatagtcgacaataagaaaaaggaccttgtctatttgatgtattcttcaagtatatctgacatttccttatttcctatctatgatgtatgattatatattgtaactttcactaaatccagtttcatattttcttatcacacaatctcagatgtcaacaatagttgtaacatctctagtggatcaatattgaaccaaagcaacctttataacgacaagtgtctagcctggacatgtgcactggaatcgagcaacattaaaaacaaatgtttactactataaacaatcggtttcttaagtcaaacaaaaaaaaaacgaaagaagaatcaaatacgatagaatagaacaaaataagctatattattgttattcgatcaaatcataaatacattaatgattgaaataaggagtttttaaacctttgctgtcgaagaataattaagaatattacgagaaaagaaaaaaaaaatacattaatgattgttaagatgacatcagattgtgacgcagtgattgcgtcatcaaaacacgataattaggctccaaagaccaacagtgattaaaaaaaatttcataacaaataaaaatctagctatatctcagaattttggagatgatttagacacaaactgagttgcggaagaaaaagacatgtcgaattcatgcagtggtgataaactctggttgctacaaatcctacatttgtcatatgccagaggtagagaagaagatgaacattcatggtgatgaaagagagctatgctccatctgacaatgtcccctttgttgtgctgatgtaaagaactgtggccaacatagagcatatttttcagaattggatataaaaaaacatactaaaccgatttaaagagtgatgatgaatgtgatttggtttttaccattgttgccacggacaaaagcgtcgccatatgtgttcttcagctggccatttacatactcttcggtttgctccattgcgatgttcatatatccatcaagacaagtaagaatgcctgcaaacaagaagagagacaaagtgtcatatgtagattgatacaacatgatatgccaaagaaagaataagtctgacttttgtagataaaccaaagaaagatattcaagctagaagttctcctagtcctgtaagttatattatagagttcaagagaccaaggtcttaatttcaggtgataaaggctccatagcaaggtgagagtccatattctatcagaagcaagagtaaatgcatctcaaattcaaccacatttgggtctgttatctcatgagagaagctctctcaattcacaaagctatcatctgaatctaatattcctctcaaattccaaaaagcatatgtttcaaagccgtatgttaatttcctgctcatctagattatatttctcaaaatccaaagcaaatatctcaagccgaaatgtattattccttctcaaacacagagacaagatagggaaaaaacaagcaagctcaacaaaaatgaatcttcagagatgggactttcaaatcaaatgagaatcaagcaagcagttcttagacaaagaaaagagtcattctgtaaaccaacatccaaaggttccagtaacatggcgagaaagaaaggcattgagacatctaaacccaaagtgataaagaagtttacatagacttccgatagcttaataaccaccgaaaatcagaagcaaactataagatatcatcacacaaggcaaaaaaaaaaagaatttgaactggatacatcttagaggagaacacaaaatgcagaaagagagagagacagacctcgataatcaacaccagagttgagcttgacaacaactggtttaccacggatagatttcaagaaatcagcaggtgtcttagttgttccagaagctttctctccaactccactcatcttctttgctaagaaaccacaatatctgcccaccaaattagatccaaatcaaacaagacccctcagaatatcccacaaagccaacaactttaagcaacaaattcatgtcagcaattcgagatccataaatcaatcaaattacataaagaccttgagaaaaggaatcatcttgaataccaaactcgtagcatctcaacgattactcccgaatcaaacaaaactatgtgccctaaaaccctaaacctcagaccaattaggaaatgcgcgaatgacttggattaagtaaaaagagaaactttgaaatggattgcagaaacagatgagtctgggaaatctaagaacaacgaacctcgagtccacgaacaaacggtaattggctagagacttccgctcgatgaagcagccgaacagagcgaagaagacatgtgacgcatttacaaataagtaaaaataaaattacaattaaaaaggcccaagcccaaattcgaatcagcccacatggaaaacaatccgaagtccaagtttttttattgtggtttaattatgtgcgagattaaaactttttagtcaattttaaaattttaatcgtgaaaatggtgaattttcaaaattcgttgggagaagaactttgcaaagatgtttgacatcagcaatttggaaatgcctaatgtgaaccaaacaaaagaataatttcagtttctttttttacattttgtaaatagtatagcttgcaataatttaacttttcacaagactttagttcttctatcgttttaggtttagatcaataaatacatctacacgtgacataaataattcaacagaggactggaacacgtacagagcccgatgatagcaacttgcaacaatctgccaaaatctatttaaattcgcctatcaataaaaatataaatatgtataacacatatattacttgagtacgtagcaaatgaaaccaaaacattagcatacaccgaaccaaacccgagccaacagttttcacttagaacgagccatcgtcgtcgtctagagaacccgatggacttagccgtgagttgttattgataaccaccggaaacagaggcgtggcggtctggttcgatggcgaatgtagtggcatggatccatacaccgttctctcgtttacgcgtccaacttctttacacacttgatcaagaatcgtcagaaagtctctgaccacagcgaaaatgcgaaaaggatgagtttccgagttcccgtggaaatactctgttacttctttaaccatcttcatgacattgtctccatgagattgtaactctgtgatctctttctcacctttgttcaagaacgagttcattgactccaagaatctctctacacctgtttcttgctttagctccgtgattacttccttgactttcgctattcctctggcgatttccgctgtttcgttgatgagggaatttgaatccattgccgctgctttcttgacgttaatcagctgagagctgagacctgaaacgacttgcaacccgagtttcttgagctctaggtcatcttggaatgcggattgctcggccatgttatcgcctatatggctttgactcggagtaaaaggaacccgagctccttcaaattttatgatctcttgaaccacaaaatgcaataaggtggttttcccatccgcgcctttgatatctaccagttttaagagcgtgtcgagcttgaaagcatgtgcgtcccctctattggttcctatattcatccggttcccagtcttgagcacggcttctaaaagcttcaagaacatccgcgtgttctttaactcaccagtagcagcctgagagtttgatcaaatgcatatgaatgatctgtttgatcagcagacatacacttatgaggtggacaagtagagttttacctcgagagtgtcgaaggatctgttaaggtactcgatttctgattcgaacttgacaatgtaaagcattgcatcaatcctcttgaaggcgaaaggaatgttcaacaatgctttgaggaatttctctgcaggtcctatcttggaaggagatccatcatcatcatctttaagctccttaagcttgtcctcttcttctttagtaggagccatcttaagcaagcattcgagaagctcgggtccaagcgtatccgagttacctgattcatgaacaagaaagtgattagacatcaactaagtcaaacaagtcaagcttcaataatcacagaccaatttgaggaatcatcaaaccaatgcaatgttgcagtaagtgcgagtaacctaagcaacaacagattggaaattactcaccttctataagagcttcacatacttcatcagcagttacattaagagctctcaacaaaatagcaatgttgtgtgactttcttggatcaagaaaccgattctcctgactcacggattgaacaacgccatctcttgttctcgaagttggatcattcaccttgaacaatgtctctatcatttcttcattcactctgcaaaaacacaaaagaatcatatcttagtcgtgtatgcaaaaggatagatcaagtctttaattcagattcgttatgtcttactgaaaggagtttgatttgatttggtcccacaccataacacggctcgagcttgctctaactttatcccaatgtaaagtcttcaactttggtttcatggtctccactttcttctctgggtcagaatcatcaccaggaagggaatgcgacatagtagccggaacctccgagacctgtggcggcggaggaggtggtggaggtggcctcgctggacaaagccgcttcggaatgccgttgtttgagcttatctgactgtgcagcgagacaggaggactaattgacttaggtttcaaacttgttcccggagaagcattcaacgacggcgcaaaattagtcggcgaacacgagttcgagcctgagccgttgatactcctgttgtcaatctgatcaacatcagagacacgggtcgggctctgtttacgccctgaagatcctctcggagagaaaaactcatcgttttcgttatcgtctccgtcaaagtcttgtcttttagggtttaactgttcagtgcttttgtaaacgggagtgaaagattggagctttggtaaagggggaagaggacgaagctctggcgagcctagcttatggtactgtgagtaagaagaagaagaagacgacgaagctggaggaggtaattccaatacgccggtgataccgccagagagggagattggagacttttgctgctctaaaccattgcttcgagagtttactaaagtacctaagtagagaaactcagaggaagtgtgtgaggaagtgtactttggtggttgttgatgttgtttctgtttcttagagccgtcggaaggagaggcgttgaagagctgaagagcgtctgatctcgtggatttggtgtcgtctgcaggggaggagcggcggcggtggcgagttcggcggatgaagatgatgaagacggcgaatagagagaggagagcagcggcggagatgacggaggcggttatggtgacgagcctagcgatgtggccgttgctgggaggcttggattgtttgttgtgagtcggaaagagaagggaagagatgttggcgggaaaagttgggagtgaggccggaggaggtggtgctggaggagggtgagaggcggtggaagttgggtctgatgaagggaaaaaagggtttggatgcggcggagacggcggaggaggtggaggatttgctacggaggagaaaagatgtttctcgtgaggtggtggcgtcgtcgtcgttaggtgtttcttgtggtggtgatgtgtgtgtggggaaggagatggaggttgggaagagacgggtggttgatacggtggtggagcggcggttacgaccgggaaaaagggttggtgaagtaagtgacgagagtggtgacgttgatcggcggtggaggaagagaagaagaaagctacaaagaggaagcagaagggtattgtagtcatttgcaacgtttttcccccaatcacacacaactagttttagggctcgttgttgttgtggcattcaaaatctgacattgaagagaaaagagagagagagagagagagagagagagagagagagagagagagagagagtgaagaagcgtttggtctggtcgatgaagagatagagagagagagtgataaaaaaggtttggtctttacgagggactcttttagaaagagaaattggagggaatagtataagtaggtgtcattacttaattcgaattagtatttaacgtctctctagtatttgatttgattgagaaatggtagttcgtgttttatttatttccacgttttctcttatccaaaaaggctttaaattttgtatctgtaaaaccgaataattgataattaaaaatacaattcgatcattaatttgtttgagaacaaaaaattaaatgatatgttgtttggttggaccaattgttagaagaaatatcgattttcgatcataatgattgctgtaataattaataatgaacatcttctttcccaacaagatttctgttaattatatttatatcaccaattagtaagataaaaagattttgattgtgactctttcactgccacaattagttaaacatttatggtttcttcttcttcttgtttttgtactttgaatttacttttgaagtatcgttaaaatatggagaatgtgaaagaagagactacttaattttagctgaaattgtgaaaatataatggctcatcaaaatcttctggattgttgtactgaatagcgagcgaagtcagaaattttcttccaacacaaccacattatttctgcaataaagaaccaaatttattgagacaaacaagatacatttaacatacaaaaaacaaaaatgttcttattgttatttttacattttacttaacatcttttacaaactatacacctaaacacataacataaaatagattttcctcaatattactgattgtgttcatgaataaataagttctctctaaatggcaaaatacttaattatttttggtttttaagccatgtttatttccaacaaactttaagttatctaaaacataaagcatataatgaatctgatctattaacgtatttcaacatttcaaatctagaaaagttagtgaaacgatacttttagttaaatagatgacatttaagtgttttgcttttgcataattaatgaagactaattactgcattgcattggattactgattagtgattttagacttatatagttcaaccgaaatgttagcttcagtcaatgcaatcaatacaatacaattcaatgtcacagagccaattgatataatatcgtgacaaggaaaatgggtaatgaatttgtttggtcggcggtactaatctaaatttattgtccatcttgaatatccaaacttataatcttacgtgcaatgtaaagttaagaatgtgataacaaaaacattaaccgtatttatttcaacttaattgctcaaatacattttggactagtgttttgaagtttgatgttctgatatcaaaccatgtaatgtcatatttaggtcttagttgatgattaattttgttactatacaatatgagaaaaatattcgatattcaaaaagtattcactgacagtgaatagtactataaattacaagtattcaagtaacaaaaagtattgggatttgcatcatgttccacttctccaaagattctcctctctcttcttagaaatttcaaatttcacttgtacttctctttattttaagttgtcttaacttttacaacttttcatctattacttctccaaaactacaattaaccgcaatttgaaaattccacttaaggtttggtcaataaagttaagctatgtagttaataaactatgcaaaacattccctctgttgaaaaaaagattcattctgaccaccattaaactattgtttagtcttcatgataacactaataagtgtaaacaattatacactacaagtgaaacaaaaaacgacgacgtagaacaaaaccgtcggtgagaaatagtcggagcaacaaaaactgagtacaaaaagagcgtacagagagagagctagacgacgagaacattttactgtaaacccgtgaatcacgcaaatccataacgtttcactgagtcatcccactttgttttctttatgtacacgtgtcagtcttcttctctcttttgttagccctcttattcaccgactattacctgttccggttttcaaagtaacatttaatttacgatgttaccctttcaactaagatatacacaccataatcaaatcatacaaccaaactgtacaaatgaaataatgaattatctctatcactatttattgtagaatttaaatgtgattgtttgcatcatcattcaaacgtgagatttttgattggagtttcttctttaaagagaacaactttggagataataaaaagctatgatttatgtattgaaaattgtaaaatataaagtacgttgacaaacaaaaacaatataaagtatttaacgttttgaaactagagaagaaagtaaaaggagcttattattttcgtcagtgatttcaaattcttcaagcaagtgatttatactattagcttgtgtgtatattgagtatgcaacttttttgggggtacttgtgagaaaacgtaccttttagagtgaatcgtgctccaaacgacgtgaaaggcaaaatcttttgcataggattggatttttgtgggaaaaaaagtaaaagaaaactaaataaaaaagagtaaaagttggcaaaaataggaaagccaaagctaaagtgctacaatagctttagcttgcttcatctagatttttttttcttcttttctttttagtttcacttgaataattcactagaaatgattagttctttttcttaaagaaactatgtttaaatgtgacatttgttgtataagctcgtgtatagtttggttttatttgcaaaataacgattactataacgaggctttaggcccattataaaacaatatggaccgttttctcaacaaaacattatatgatcccttgaattcattactccaatatttaatacaatgaagactaatgagccttcttgacatacaattttaaccaatccggcacaatggaatagaaccttagtacacacttttatagaaatgtgattctttgactatcctatcagcctctttattgccatcttgaaaaaaatctgtaaaaatgtgatcaaagagatcctttatagcatcttcaaaatggaatggaaacaagccacttaccaaaggctttatgatccgatagcacacacattcccctctttaggtcagccaactatagagcttttcgtctaatttcaggaggattaagatcagtacattggtcacggcgaggtataacacctttttactttaaacttcaacatcctccatagccttttttttaataatcgtttcatgttcaaagtattcttttctatggaatataagttcataaaatgttattgacgtcgtgataacatgggatatatagagactattacaagagtggataggtgaaaatagcccaaacaaatccatctgaacttcaaaacgctaaatattatccttaacaaaacaacaaaacgctaaatatcacgttttaaaacgtttctttgtttagggctactttgttcctctctctgtcatgttaatctggctagattgttatgtttatgcttattatcttgttaccaaaacatttctgatgaggcgagtcgcagatggatggttcatttcattcaccagaatggcatgcagctcgtttggccagtctcaagactacacacactcttacttgggaagaatataagcagaagcaaaaggtatagctgctgatcgataaatcgatgtttttaggagcatcgacagataagaaatgtttctcactctatatgcttcatgtgaccgctctttaggaagaagaattgaaaaagcaagaagtcgaagcagataccgataaattgatgcgtgagtatagagctcagctagatgctgaaagggcaatgaagctctctaagggaaggaactattctagtgacatatccaggaaaggtatacacttacaataaatttaagcagatggaatgtcatacaatccgcagttcgagtcttgcttttctaatatgccatttgatcttacagataggaaggagagagagctcacagatagaaagtgcagagattccaagaggaagaaaagcaaaaagagaaaggtgcttacataacaactgcatcgagtttagtttgaacatcttctataattctgttggcttgaagcttttagcttacattgtgtttattgatttgcagcattcgaaaaggcgatcatcagactcaagctcatcttctgaatcttcaagtagtgacaaagacgaatctaggaagtcaaggtcaagttctaagaggccaaagagggagaggaaacacaagtctagaggcagacactcaaaaccaaagtaaagatgaggctgatggtcctgcaccacaatcaaaattctttggcagtcttaagagttgacacagtgcaagacttgagattgtgttcatcaaatgctcaattttcaccccgaggacatgatttgtactatcctcatctccctgcaatatttctctccctgctgttttataaaacaagaaagctgacagtaatggcaagtattttgtagaggaattgaaggtgggctatcataacataactatttctgagacaatttaagtcttaaataactgcaacaacaaaatgagggcaaattacaaatacgaataggaaaaaaaaaaacagagagaacaaattatccaaaagactgaaatataaagtttgagacccatccccttcaacatctctcacaagtatacacaaaagacaaacaatgatctttcctccttttaagaatgttgtccaaaccaaataacgccaaacccttatctcatcttcatctcccaaatgctgttcttcaaactattgctgatattctggattgaaagcaagcgcctcgcggtagattagttccttcatctgctcctctgagagtgcatggttttcaaaatcaaagttgaaaggtattgtacactctggctcatcgcttatgtcgtgcaacgagttcaggtatggatgggccaatgcgtctaaaactgaatcaagaatcgagaatcaagaatcaataagaggtgatgactactaactaactcttaaataaccaagaactcattattattattccttcactagattgaatcttttttcgggattttggaatgatccgtacaagcaattccagttattttgcaagttaaaaatggtatagaggttagggactaacctgtgattctccgtctaggatcaaatgttaacatcttctcgataaggtctatagctaaaggatgcactgtcgggaacttatcagtgatggattggcgaggataaggtggaagctgtcttatgtatcgctttgcgttttcgttcaagaactcgagctcttcttctgatggagttcctatgagctgcaaaaagaaaatggtctcggtctgtttctttagtgcttcaaagcttatttttgggtcaaagaagggttactacttacctccatgagcaagcgaagctgatggacatgatctcgtccagggaagagtggcttacggtccattaactccatgaaaatacagcctacagaccaaacatcgatagctgcagtataatcagaagagtttaagagaagctctggtgcacggtaccatctcgtgacaacatattcagtcatgaaatcactctcagaagtgactcgagctagcccaaaatcgcagatttttaggtcgcagtttgcgttcaggaggagattacttggtttcaaatccctgtgaagcacatttgcagagtgaatgtatttcaatccacggaggatctggtaaagaaaatactgcacaaagagacaagtgaaatggagttcaattagtccccgttttcaagtcgagttatataggtcaacaaacaatctcaaaactcaaaacctggcaatgttcttcggataatgcttgatttgaccgaatgatttgatggagatcagtgtccattaactcatacgcgatgtaaacatcgttgaaagcgtttcttaatggtggcgggataatatctctgattgcaacaatctgatttaacagaaagatggtaagtgttttatcaatcggaaatgttttacacgttgcaaacgccaacatagataaacggttacattttacgatttgatttctagaatttaaaatcttgacgcagatggaaaagatcatactactgaataagcgcgaaacaatccgtatcaaaccgaaaaaaatacaagcacactgtgtcaacattcatgtatattcccttaaatctaaatgcaataagcaaccaccagatacaacacattcatacacagaacctaatcagcccatacaatatcaatcaaatatatacatcatctatttacctaaacaattttgcatcagctagtagttaccatgtttcgagtgtatttaaatctacaatcctattatgttctacataagactctataaacagatgactcttagttaacaaagaaagagcaaaaactgacattttcatgatccatgtgacgaagcagcttgatctcacggagagtcctcttagcatcaatcttattgtcaaaagcgttagcaattttcttaatcgcaacgctctcgttagtttcagaattcatagccgaactgcaaaatcaaaatcaaataaaaccacaaaaggataaagctttcattgaaacaaaaataaatcccaatcataattagagctcaaaaacgatacaaaggaatcaattttacaaattgcggatcaaaagtaaccaactttaccaaaacccaatcaacaaaaatcattttttatttcaattagaagcaaaagccaaaaatcaaaagaatcggagaaaaattaccaaacgatgccataagcacccttgccaataggcatgatcggaggcttatacttagcggtgacctcgaagatgtttccaaatatgttatactgaataaacctaccaccatggctaagagtcgccggaatattctcaatcccaggcatctgaggcgatggagccgccgcgggaaaacctccaggagcttctgtcatctctgtatcagccgccggttgacctgaaccaccgtccatgaccggtaaagatgaaagcttttgaggttggtggtggtggtggatcgagaagagggaaatggaaaatctttttttttttttttttttgtaattttggggtgagtgaattatgaatgaaattggagaaattgatattcgttggttttggggtcaaaacagatctgagagacaagaagtgaaagtcatgtgcgtacggatctattaatttttttatttttttttgggtcttcacttgacccgtgtgtgtaagcaagcaagcaagccactgttcaaagtttgatcctttattctcatgtttaacactgttatggttacaaacggcatcgttttacattgacttatcaccatttttttttttgttccattgacttccttccttaatcgttatcattaacaagtaacaacagcatttttttgaatgtaaatgttgggtgaaaatgaatcatagataaatgtagttattatcattgatattatgtttttgggttgtactttaattttgagattatttttgtaacatgaaaaatcgctaaattttatgtagattgaaaaacacaaaaacttataaaccgccaaaagttattagatagtatctaaattaactatttaagtatttaaagttctctatcaagaatttcgatgaacttgatagtcgtatagtgtgaatgaggccacaacatgaaacatgcttggttgagggttatttggatttttaaaaagtatggtggttcaatttgataatattccaaaattacaaggatcatctcaatattttttacataatgaagcaataaatctcttctcttgtgttatacagttgggttcgaactcgagacggcttgctttctgcctctatccctctttcacacgagagctcttactgggtttagggttttcgatagattggtaagtggccacgacactaagcgtcaccgaaccagttgtcaactaaatagggaaactttaggcttctgtcgcatttaggcacgattctctgtagaagaaaaaaatatcagctttgttgtatctttcggattttcgagtgatcatcaaaccttcatcaccaggttcctttcgattccattttaattttgtggactttggagtaatttgcttaaagaaccaatttttgattgatattttctgctctcctttcattttgacattttgatctggttttgagaactttggttgagtaacagtagcctgcgtttaaaagatgttagctttggatgtatagatgtagagttaggtttctaattgcctttatttttgctttggttgatgatttatggttgattgactcgttaaagggaagtgcgctgattttgtggacaattatgttagactgatgggcatgaatgtgaccaattgattttctctccgtttccattatgatgcagaagaaagttctattttgctgaaatgttttgcaactttcagttgttcattcataccatgattgtactcatctttgatctcgttgtgagtactatcacttactcttggcgtagtagttcttaggatgaggtataagtataacaattcgaaaattcgtcgtattcaatctgtgtaatctgtttttcactatatgaacaatatgtcaatgtcctgcgatgcctcagggcttctggagtcacttctgcaatgttaaaaagagtaatcaaaagttgttatatcatgcttcagagttctctcttgttattcctcatcttagtatttatgaaactgtgatattgaagatataacataatctaatacttctgatacttgggtctcttctgtaacatgtgacacattggatcttgcaggttaaagactttgaagtaatggcgggatttccaggttttagttacctaggcccaaaaggcaagaacacggttgtagctggtggcttgacagcttttgtttttggggtatacttctacacaatgagggcggttggtggcacagacgagcttcaagtggctatagacaagttcgaaggccaaaaacaggtggacactgacaccaaggttccatctaaggtctaatcctcactggcttgatatgtccaaccaaacccgttatttatctttgctttccaagcttcttttgtcacgaaagtggctcgtttctgacatcgagtggcatctgtgtttgagtctcagtccaatctataatacattgattaaacaagagaatgtatgatcaggacatggttttgatgttcttgacattgtcttaagttctcaactttatcatactctttgtacctaaacgtttggtctaagctaaggtgtggctatccataaatttctgttactacgccgtcaaaatcaatcaaaagaaacccaatttgtcagcccaaaaaacatgcaggagatgggttattttgacaaaaagaatagtatcgggttcattccgtcataaaatagggtcttatcaatattttgcaaataaaccaaaattaaatacagacttgtttaatttctgaatctctctcttcctctttctcgcgagctttttctctctgggtttagggttccggtaattttgcgacgacaccgagcgattcgtgcctccctccccttcctttgacttcggtgcgtaacttctttctatgtagggttactcttttaagtaatttcgttctatgaagtcttctgctggaattttggtatctatcaagctttttttcttgaactcttcactgtctgtaatataatgggaggtgaatcatgcatgtatgtttcgattttgagacgaatcgagctgctagtactaaatttggtgttagtggttgctttgctttatgtcaaaattgaatctgtgagatctctgtaaccggacttgaagtccttttttcgtctctggtgcaaaaccacaacaagttttagagagatatcgatttcttaatgatctgtgtttatttacttgcggcttgagaataaacattgcaaccttttgcttttgtaggctttacttagaatgtgcaggtttcatgatacttcttggtgtttactatctgcttttcggatgttatattgattaatggcttgaaaattttgaaattgagatatctataaaagctacacagctgtgtgaatattgttataattcgctcaatcttctgattcgttttctcatggaatccaggttctaacttgattaccagtgagaagtaggctaagatggaaatcatgtcaagagagaatgagactgctttgtcaggtcctaggccgatggaatggtctaccgtcccacacagtgcttctcaaggacctggtcccaatggcaagaaccggacctcgagcttggaagcacctatcatgttgctaagtggacatccgagtgctgtctataccatgaagttcaatcctgctggaactctgattgcatctggatcccatgacagagaaatcttcctctggagagttcacggggactgcaaaaacttcatggttttgaaaggtcacaagaacgccatccttgatcttcattggaccagtgatggctcccagattgtatcagctagtccggataaaactgtaagggcttgggatgttgagactgggaaacaaatcaagaagatggctgaacattcatcgtttgtgaattcttgctgtcctacacgtagagggccacctcttatcatcagtggatctgatgatggaactgccaagctttgggacatgcgtcaaagaggagccatacaaacatttcctgataaataccaaatcactgcagtcagtttctcagatgcagctgataagattttcactggtggtgtagacaatgatgttaaggtttgggacttgagaaaaggtgaagccaccatgacacttgagggccatcaagatacaatcacaggtatgagcttaagcccagacggttcctaccttctcactaatggaatggacaacaagctctgtgtgtgggacatgcgtccttatgctccacaaaaccgatgtgtaaagatctttgaggggcatcaacacaactttgagaagaacctgctgaaatgttcatggtcacctgatggtacaaaagttactgccggtagctcagaccgtatggttcatatctgggacacaaccagtcggcgcactatatataagctcccaggccataccggttctgtcaatgagtgtgttttccacccaaccgagcctatcattggatcttgcagtagtgataaaaatatctacttgggagagatctgaatttcaaagctgtgaaacctttgcaactctaagtggaattgaagtctttagaatcgacgatgtgctttgagacattttgtttattgaaagaaaaaacgaaacattgctctttggtacaagtaatcaagatttgttatctcctgtaatatcttcattacgctctttatcttcttctactttaacagatgaggtcatcattttagttctccttaaaattgttatctttggtattacaatcttgcagtatcttcgattagattcttacagattcaagcagtagcaagtataagcccagtccagtaaccaactaacgcatataagtctttagattcaacaatgtgcttaagaaagtttgtctattgaaagtaaaaagcgaaacagtgttactgctacaagtgatcaagaagaagatttgttatctcctgtaatatctttatgctcttcatcttcttctactctaactttgcttccacagcaacctcttcttctatgttcttcaaccacagttttttttacaatgctgtctcttttctctgcaagctccaatcttttctccataaactcagaattctccttccaaatctctccattagtgtaaacctctttcttccatatcggaaccgatgccttcaactcgtcgatcaagaacttgcaagcatctaaaccatctgcacggtgaacagatgagaccgcaatgagcacgctagtttctccaacaggaactggtccaagacggtgagcaacagcaatcttgtggatatcccaagttgatctagcagttgtacagatcgagctgaggcatcgtgtggccattggcacatatgcttcataccttaactccaacactgtcttgccctcgaacatgtctcttgtagtgcctgagaatgtcgcaatagcaccagcttgaggggcactgacataatcaatgtacttaacaacatcgactttgtgaccttcctccaagatctctataaggttcttctcctctgcagacatctttgatccaatagtaaacctcgatacaatcgatgttctaggaagagtaaaccaagcttagcagatgatccgatagcaaattctaacctgcaattggaggaaataaacaaccatgactatctcatcacctatcatccaaaactaatcaaacagacaatttgtttagtcaaaggcaaacagagcaaatgaggaacctttcttgcgcaatctaatggcaatcacatcttactaatccagaaatggaagagtcaaatcaacaaagtaggagaatagtggaccaatgaacaaactcaaaaaacgatgtctcaaatcggattaagaatttgccaaatcggtcaatttttattgaatcagacaaaaacagcaaaggcacaaaactcgtctacaaaactgaccaaagttcgagtttttgtaagattgaggatcgaatggatagaatcatagaaagacagagataacgacaaagaagaatcgtctctttcagtaccttactacactaaaagtttgtaataactttaacagctacccagaaattaaaagaaggcaaagaacaaaaagagatccagaaagattttatctgacctttgagagtttggtagggctgcatgatgaagaagaacatgtgctctatattcaccttcttgttggatcagactagtaggttggtgagattgtaaaaaacaaaactttactaattcaatttcaaagtctcttcttttctccagatactctgttttaccattcaaggaaaaaggataaatcttgtagaaagaagatgccaaaatgatttttttatttagaaattaaacagcgacgtcgttttgcagctacagtgcgatcatctaatcagtcagtgtcttcaagtttaaaccgcatctctagtctctctctacttctctctgtgtacaatattcggaaagtgaggaagatacactgaagcaaaagagcaagtcatggcggcgacatcttcctctgcttttctccttaatccgttgacttctcgccaccgtcctttcaaatactcgccagagctctcttctctctccttatcctctcgaaaggctgctgctttcgatgtttcctcagctgctttcacgctcaagagacagagccggagtgatgttgtgtgcaaggctgtatctatcaagccagaagctggtgttgaagggctcaatatcgccgataacgccgctcaggttagattgtgtttcgtttgcatttggatagagacagaggaaatctaaattggtgatcaattttgtcaatttaggggaagatataaactaactgagtattattagtcttgtaaatttgacttctttgaattttgatttcgtttctaatttttttatattctttctgaatgttatgaattgattcagcttattgggaaaactccgatggtgtacttgaacaatgtagtcaagggctgtgttgcaagtgttgctgctaagcttgagatcatggaaccatgttgcagtgtcaaggataggtttgtgtatccaaatataatttgattttggttttgctatctttcacatttatacattctgagcttgtgttgttgtggtgatttcaggattgggtacagtatgattactgatgctgaagagaaaggacttataacacctggaaaggtatttgattatggatttgaccttttattgttgttgaatgattctgtattgagtgtcaactgtcaagccctctgattttgttttcttgctgcaaatgttttagagtgttcttgtggaatctacgagtgggaacacagggattggccttgcattcattgctgcttcaaaaggctataaacttatcttgacgatgcctgcgtccatgagtttggaaaggcgggttcttttgagggcatttggagctgagcttgtgttaactgaacctgcaaaaggtatgactggagcaattcagaaggctgaagaaatcttgaaaaaaactcccaattcctacatgctccaacagtttgacaaccctgccaatcccaaggtctgtaattacttcttgtttcatcatactctctaactgtgacatgaattatgagctacgattacttctggccttgtacagtagtaagaggtggtgtgtgaaagggttcattagagatgatagtgaaattcttccgcacttccttttggattgttgtagagtttctatggtatacagttttgaatcatcacgattatatctgggattcactggttccattggtaaaagctgcaagtatttgttagtgttttgatataagattaaatgcagattcattatgagacgactggtcctgagatttgggaagatacaagaggcaaaatcgatatattggttgcggggattggaactggtggaactatcactggtgttggtcgattcattaaagaaagaaaacctgaattgaaggtacatagcaagagggcttgtagcatatcagctggaatcaactgtagatgttataacctccgtaattagatttagttgatgtttacttgtacttgtagttatatttaattagttgatgtttacttgtaccaggttattggtgtcgaacccacggaaagtgctatactttctggtggaaaacccggtaaggcagtgattttgtttttcttgtttctctggcacgttattctttttatcttgcgtttatttgacatgtatttgaaatgcaggacctcacaagattcaaggaattggagctggatttgtacccaagaatttggatctggctattgtagatgaatacatagcggtatgatctgttggtttggttctctataactatacattcatctttttcactttcagcaagcaacaattttcctttttaacttcacctgttttgttgcttcttatcagatttccagtgaggaagctattgaaacctcgaagcaactagctctccaggaaggcttgttggttagtctatatttgttattctgtttgacttatttgttagtgggaacactctttataaaagatagaaaacgaatgtaaatgcatatgagaaatctatgacgattagtaaacgactataaccttttcaggttggtatatcttctggagctgctgctgctgctgcaatccaggttgcaaagagacctgaaaatgccgggaaactcatagccgtaagtcctcaatgttcttcatcataatttctttatggaccaaaacctagtcttgtatctgtgaccaaccactgaatgatatagaaaaagagttcttaagttatctaatcatgaaccttggtccttttagagtcttactacttattttaacatttgtatttgagtagttggtttggtttatacgtctaatgaacgtttacgttgccttaatctctctgccacaccaaaccctagtcattgcaaagaacaagagaggagcttaatctctctgccacaccaaaccctagtcattgcaaagaacaagagaggagcttattattcaattactatagcccaacgtagggaatcagtgaaaggattttagcttagtatggagtaaaaaatataacagattcatcatatgtatagtttgatatgtgagttgctgaatcttggttttcaggttgtgttcccgagcttcggggaacgttacctctcgacccagcttttccagtcgattcgagaagagtgcgagcaaatgcagcccgagctttgattttcttctgtaatttcgtgaccaacaaggaacctcttctttgatttattgctgattgtttttcttctaatagacgtttctgcagaaatctctacgtctactgtgtatatttacaattcgcaacgcaatttggtgtttgttattaataaaggcataagaggttttggtcaaacgaagagtcttcttcttgagcacaattttcgagcgttttgtttaatgtacctggaaacttgtttagctttctcccaatggaatccataaatgaaagttatgacgactcttcgagttttggacaagacagtctcctatataatcgtcctttcgcctatctatatctctccttccacttaaaactattgtactctgtgcctgcttcttatatagcgatgataagagcaggatcagtgggaaaaaaatcgacatgtgagtatacttattgggacgacggtgttggagaagaggtgatgggtgacgatagttgggattacgagggacgcaagatctctcacatatatgttgctttcgacgaagtcataatgtctattcagtttggttttttggagaatggagctctagtcctgtctaaacagcatggtggcattgaggagggctccaactttcgtgttgtaagttttgtgtcaataacaattatttatttttgcgtttgcgtaagatccggtcaagttttgtttttgatgaagtttaaacgcagttgagactgaatcaagacgaatatgtaacttgattaagtggagtactaagaaagcatggtggagggatcagaaatttgacatttcgcactaacgtcggggagtatatgattggacgttcaagcgacaattatccaaatcattggaagatagatattgatccggcaatatgtgatgaacgtgagtttggtggtttctttgggtctaacaatttataccatctgacatcgattggtatgtatttgagacccattacaagtctcgacatggttgttaaacgcgaaaacagttgaccaagaaagccttgtagcctagttcaagttgcctgttgagttttatcttaaataaagtagcatttttggatcaatcatctttctatttctcaactctcaagtaataataaaaaatggtcccatttcttcctttattatttgtttttgtaaatttgtgctccattttcttgtgatgaaaaacgaaatgtttaaatgacaaaattcgaagtcacgaatcatttcatgtatagtatacccaaagatgatgcatcatttgttactaataacgtattatgactttttggctcacgaattctatagacggaaggaaccagcatcttaattaaatatttggaaaaatctttagacgcatctaatgttcttaaatctatggaaaatcggcatcttaactgttagcaaagaaaaaaaaaggctttaactattactagtatccttagatgaatatagctttaaataggtaaactatagctataaagtaaataacaaataagcaaggagattaaatatttatagttacttttttgttcttcgaatttagtaaatttactgttttcaagttgctttacattttgattaaggaagttttcttagagagattaggtatgtaaagcttttcttcgtctatatataagtatagatcgtcctcagaagaacaaattgttttattaagaaaatattttaatccgagcttaattctttcgtctgctatattctaaatgaaatcccgtggtagggagatgttcaaagtcggaccaattgggtcacaacgtgcttatcttaagaatttggaatgggaagagaagggacgcaacatgatctctagtatatatgtcgctttcgacaaagataccataaattctattcagtttagctattgtcagaacggaggtcatgtcgtgtctaaaaagtatggtatgtctgatgcccaaaaacaaaagtatggttcgtacaacggtcgattccacgtaatggtaagttttgttataatacatcttcatgttttttcttccttctgatagttataatatctggtaatttttcttagtggaatctttacattttgtttatgtaattaacattgttgttcatcatgtatagtttgtttttgctcttgttactgatgaccacgttaaaacaaatttatgcaatatacaggtgagactaaatgacgatgagtttgtgaccgggttgagtgcaatatatctttgtaaagggatcacgaatttgaatattcacactaatcaggggaaacacggcccgatttgtgatagatattcatcatcaaagaatattatggataactataaggtggaaattgatgtgaagatacgtgatcgtcgtgagtttggtggtttctttgggtcttttgataactatggcactctgacttccattggcatttatgtgtgtcccattacaaggatcaatgacgtagccctcagaaccaactacaaagtcaccgatgactacgacgaccaaagcactttctatcaatcatctggtcctttaaccacaatcaaccataatcggaagcttgaatatcaaatgcctcatgaggtctccgatgtcaagcccattgttcataaccccaatttcgaagacaagatcagtctctaccaatcatcggatcgtctagccagaagcactaacactcggacacttgagtatcagatcccggagttcctcgatgtcaatcccattggtcgtaagtccaaactcaaatatggcatattctccaagttggcgcgtcttttcagaaatctcttggattagatctttttttttttcgtttgcattcgtgcaagatccggattggtatgtatttgagtcccacccattacaaggcccgacctggttgacgaagcaacttcttgtggcagtattcaacaatagcttaaataaagtagctttaatgaagcaatgtttgtttcatctttctatatatatcgcaactcttaagtaataaaaaaaaattatcaaaaaaaaaactcttaaataataaaatggtcccatttcttcctttattatttgttttcgatagttctgtgctccatgtgttttgatttaaaacgaaatctatgaatgacaaaatcttgtgtgaaaatgattgttggagaggatgattacattcatgaatactataacttgtgtagactaagcagtctagttccgtgctatatatgagcctatgactacgctcttgatttgaagttgtatatagaatcttctcaatatggtaagttgaataatttctgtcattcacttttagtttcacgtctagctaggcatagaatctgcatttagggatagcagtgaaacgtttgtttcatatagacaagcaaaggaatggtaaaaatattcgtgaactcacttgcgtttttctaacatcatacaaaatttgtaccagagctttatttaaactaataagtggtatatttttaccaatctagatcattattatggtatcttagaaccaatagacaacaattatgatgctcatataataaaagaattaataaaacacatggcaaaaaccaaaaatgcagactttgataataaaatctttgaaatatcgtcatcttaacttgtttgcaaagaaacaagctagagacggaaggaaacaaaagggcttttaatattactaccatccttggattatatgaatgtagctataaataggtaaatcacaaataaatgcaagcagaaatagaaggtcaataaggggtgaggatatacattatttagttttatatatttgatcttttggattaaataaatttactgttttcgaagttatttacattttgattaaggaagttttcttagagaaattatgtagcttttcttcgtctatataagtatggatcctcatcacaagaacaaattattttatcaagaaaagagttttaatattttcaactgctattttcaatgaaatctcgtaatagggagatgttcaaagtcggaccaattgggtcaaagcaatattatgataagagttgggaagagaagggacgcaacatgatatctagtatatatgttgctttcaacaaagattccataaaatgtattcagtttagctattttcataacggagttcatgtcgtgtctgaaaagcacggttcgtccaaaggtcaatcctacgaaatcgtaagtcttcttagaataatatcttcatgtgtttttttaaaaacaattctggtataaatagtggaatattcttaagattttgttgctgtaattaacattgttgtttataatgtttatatatacttagtttttggtatacttgttcatgatggccatgttaaagcaaatatacaggtgagactgaatgacgatgagtatgtgactgggttgagtggaatattttgggagagaaaggtcacgtctttgacatttcacactaatcaggggaaacacgggccgttttgtaatggaactggatattcatcaagttatatggcagattataagaaggaaattgatgtgaagatacgtgatcgtcgtgagtttggtggtttctttgggtcttttgatgacgaatttgacggtctgacatccattggcatttatgtttatcccacgtacgataacaagcccactctcaatcaagcatgggatcctctatatgcattcgcccataatcaaatcccgacgatcgcggatggtattcctgttatgcacatccgttataagcccaaactcaaagaccggatattttccaagttggatttcaaaagagctatgttgtgcctgataaaagttttcttggattaagattaaatgctagtcttgaacgatatctagctcttgtcctttgacatagcttttttgttctttaaattaaattaaagccgcatcgatggaggaatgacacattttttttgtcttattttagttacaactcttaataatactccatcttttcaattacgtaagatgtttcaattttattaatttttttcgtttcaagttctttgcataattttattttatttgatgttattgtgactattaacatgtagtagtgtcttcttttagtggttcgattatttttggtatctttgtaaccagccaaagcgccaaactaagcagtttgtttggtataaagaatcaaagcggcaacgagtatcaaagtttgaggaccagaaacggcttgcggaaatcctctgtttttttattaaaaaaaagtcaagggagaaatccttgggtcacaactttcacctttatatatgagatcaatgaaacataaattctaagtatcagaaaagagtccctctttataatcgttggagagctcagtctgtgattgacaaagctttcttcattcttgagacgagattaggcagagtcttcacagcttcatcaacagtttggtttacacaatgctccaaatcatttaccgcttcacttctcgtcttctgttgcttagcaacctcaaacttgtcttgacaaaccacaagagatctattcaacctctcctacattcatcagtaaaaccaaaacaccatcttgaatatctagtactcaaacccaagcgctgttgtcatgtaatagagaatccaggagacaacaaactaaactatcttcataataacacatttgaaaaacaaaagtttcagaccaatcactaatcatccatcaacctctaatagaacaagaaaaagactttaagacttcaatcaccaattttccaacgttcatgggcatttgtaaattttgctgtatcaatctcaaattgtaactggaaataaagttgagaaatagactcacttggaacaccgacatctcattatcaaagtagttctgtgcatttgtgataggaacactgcaactctctgcacatcgactaatctcagcgtgtgttcttgtcctatcaaagcactcgtatgcacatttgaaatatgccttctgcatcaacacaaaagcacaaaaataactaactcttatataaatctcaaactacgcagtaagcaaactaagtccaagtacatatccaatggcttcttcgaagagtatacacagagaacataactttaggaatttagcaactaggagaaagaaaactgagtctagggagctgtgaaaaatccactttgtttcttcaattttagaaagaagacatcaaaattttcaaaaacttttttttttgtttgagagagagagagagaaagagacgaacttgaagggtgaaattgatgtggtcttgtactggagaaagaagagactgcgacgcagaactgacttcgttaactttctttctaatcctctctctcaccatcttctcctccgccgtttgatccattttttcccggcgagttgatttattagttcaactttgctctcacaatgattcactcgaaaaagtttggaatctttacttgcaaaaaaattagacaaaaaaagactgaaaaagagaacatttttttactccttccccaagttctcataggtagcttcaaccgcctcccatctctgaaacactaccttatttgggcctagcctcttttaaattgggcccatttacgaacattatcatctcctttagtctggctcaagcatgaagttacctcaacagccgtctctgtttcttctttcaaaatctatcaacttctcactttttttttgtcaagggtttcattattattgactttacattaatttatagagataagcattaagcatgatcgtcaaacattgaccaattagttaaatgtaaactgacattgaagatattcaattattcatcatgatcatccatcaaaattgctaaaaagccacatgagttgtttgtcgagaaacaggggaaaaaacagagagacaaaacaaaactaacctgaacttaaacaaaactccacagagaagaggaagactgagtacagaccatacttaaactgttttaactactacaagtgtgctaacggaccaaagaccaaacatatagtgactgggaaaaacaaagctactaaatcactgcatctcaactttgtaactagacccaccaacattatcagaaaaccatagtaatctacaccaattttaagagcagacagatgaaatgaggaaccgggaggataggtttttgtttttgtctttgtccttttagagctgcacttctctgtcgtgtatccaactgaaaggaatcttgggtcctttcttggctcttgcttgagctctctcatccaatctcttgatccttggagccaacccgcataaatagtcttgtgctttgtttccttcacctgaaagcccggttaagtcctggattttccacctaccaaccagaaactcaagaatgtctgcatagtctttggcggtgtaaacaccgagcctctgagccacggaagagaagttgtcaaagaggttgtcgttgcgcccatcatacatcaagtgagcaggcattgagattttctttctcatcatgtctgcaaaagccatgacagtaccatcaggatcaatctcaaagagcttttcaactatcttggtgtatgctgtttcatgacgcttctcgtctgcagctattgtgccacatatttgggctagtttgatgtccccgtgctctttggcttggcgggctgtgtttccgtgagagatgaatgtcgctctttcttggaatgacgtatagatgaagccaaggtaggggttattctctgtccgcggatcctatgaaagataagttaaagcgattaggtagttatattaaccaagaaatcatgataattgcctgaaactatctcaccattccagatccaatcaagtactgaatggtcttttcgatctgcctcatgtcaacacgaccagacaagtaaaggtatttattcagaagatcgccatgtcggttttcttctgcagtccaagctctggtccaaatagcccatgaagtaggactagcacctgtttcatccctaactccatccaaagtgttcaacatagtttgataggtcggaagtgcttcttctgtgatcatgtcccccaccaaaacaacaaagtaatcatcagggagctctctagccctctctcttaactctcttacctgatcttcaaacccatctgatgcagggtcaggcaagaaatcctggggttgccaagacttctccacatccttgaggtgaatcagaaggttctcctcggcccagttttccatagatttgaagatctcgatcttttgaggtggcatggagtgcaagacttgaacatgcacttccctgggtggcgtaaatggtttcttcaaactctcaacctccctgcattaaccagaaaataagtatcattagcatttaattatgctccattgaaattaccagtcaaggtctcatctctgatacacaactgaaacaagaacacagtttattgtatttagataagcattcatgtctacatttccaaatcaactaattctatgtttgaagcgaaacaatttcacaattcatgactagcaaacacttagagatggttaaccgtaagacaatattttatatttgcattcatggattggtcttgcagttcaatatgaagcaaaaaagaaagattgtgaaagaaacaaatgtagtgactactgatcagacaaagacaagataaagagccaaatgtcttcaaaacagagaaagaatgaataataaattacagaaaagtgtgaaaattttggacgcaaactaaagagagaagccacgaagtacgcatgcatagagaaaggccacgaagcgtgatatccaacgtaatgtctttgaagaaagataaacagacgtaaactgatacgttcaagaatctcttgtcaatacaaaagagaaaactcatcaaatgagtaagaaacaagtggataaacatttcaccattaaaaattactaaaccagagaaaacaaaacaaaactttctctttgactaagaagctttcctcaatgtctgttaagtcttaaccaatctaaagatcattataccataaagaagataactagtgttaatcttaactaacaaccaatcaacgagcaatctacataatctgatgcagaataaatatggtaaaggcaacgatttgatagatggggcaatctcagagaaacgtgagaataatagggaacaatcaacaaacatcagattcaatgaaaaagagcattaatgaatcacctgagaacagaggatggcccattcttataaacccagattaaaagaacgtacttttattgaaatcacactcgagattaagcaaatgtaagcaaataacactgaacaaaatcgagaaaacgtagatccaatatcgataagaacaagcaaaacccagaacacagtaaacaaagatgaaacagagagaatcgaaagtagataagagagacgatgatggagagaaagagactgacttggggccggagctgagagccggagaagaagaagcgaggcagaggaacttgggagatctgaaagaaggagttggcggacgagtcgaggaagggaatttgtaaggctgagatgccaccaaagggttaaactttagagccatttctggatatgatgaatgaatccttcttttctacagagctagagctctccctcaatctctatctctcggtctgagtttggttcttctggctttttctctcaggtttagtttcgtccacagaaagagaatgcttatgcacagcgttgagcgtagcaagcaataagagagacgaaaataaataattcttttttttgttaaaaaaattattctaataaggaaaatgacgtcatattgtcatttgtgtgtgaaaaacaaggtgacaaattataaaaataaataaattgggtatctgttctaaaatacccttgagatgcttcaattttgacactattgttcttacatatgtcggtaaaatatttgtatcaaataattattagtcaacaataatgatcaatgatacatcaaaacatcgagtagctaagtagcagtatactaaatattaatatagttgagaaaaagttgcaagaaaaaaaagggatacatcttgaaaagaattgttgattaaaaattcttttattgagttgaatagtaaagttgaaaaaattgattacttttgagcacctatgtcaaagatgattatgattcatgcttagtctctttcactcatgacttgtgctaattgttagatgactctcctatatgtgtgataatttggtattagatctatgaaaattgatgagcaatgagaaggggtaaaaaggtcaaaacaaaatataaagtgtttatattaatttatgtgagttttgtaataatcgacgtactcgggcgtgagaatccacgtaaaagccaaataagtttgaagcatgaaagagacagagaggggacaagtggcataggatctccacgtggatgtcccacttggcatatgaaaactctataaaccgtacattgggtttaatggttttttgcattttagcatcattcgatacttttctgccaagtttagctagctcaacgttttgagtaatttgatagcacaacgttttcggtttttcattgagaccatgacaacaaatttaaacttattctttgttttcgttccatcacatttaagtgtaaacattaatgcttgtttaacatctctttcggtgattaacattaatcaatggagtatatacttcgattaacatctctttcagtcataaatcataagtgtgtgtaaacatccccattggtgttcaccatacgtttgtgtaaacattagatctcttaaaaatatccaatttatccaataagttagcacacagaagaaatatgtagacttttcatagctgaaaaacacaacaagtactacaacataaaagtaaacacaaacgcatacttttcaggtcatgtgtaattattccaccgccgatataagtataaacagaaatcaaaacgatacattcaatacaatcaccaaaataaagatatttatcaagcaaacaccgtcacatttttagatttctcaccaaacctcgaccatcactttttaccgtccgacggaagtcatcgcttccgtgatggtcaagtgtcctttctgactcctttgtcatcaatcgaaaacataaaatatttacaaacaaacatgtcatatatcatttcacgaccgaactcagcatcacgtctcagcgtccccgggaggtaaaaggttccgttaacgtcaaggtaccaatggacccttgtgatgtcaaaacaccaagtacactctcagatgtctcagaccacattctgaccttctctgctttgactatatcgagtagattatctggaagctgcagatcaccacccaagatctggaccaccttagacatgtctggcctaattgctacagcctggtgcgaacacaacactcccaatttcaaaacaagctcgagctgttctctattgtcttcgtgacggattccatcattgactgcctcgagaatatctccgttttcccagcactttaatgtccattcagctaggacgacctcgtcggaggctgttcttcgctctatcagcctcctaccgcaagagacttctagcataaacagcccgaaggcatagacgtctgtccctgtggttgctcttccgcttcttatgagctccggtgcaatgtaccagaatgtcccagcaactctagatgtctgaggatcataaccctgatcgtacaacttagccaacccaaaatccccgagccttgcattcatttggtggtcaatcaggacatttgccggcttgatgtctcgatgaattacaacttgtacccattcatgatgcaaatagcagagtgcagaggctatgtctttgatgatcttgaaacgttgattccaagtgagttgctcttgattcgctctgtggtagaggtacttgtcaagacttccattgggcataaagtcataaaccaagtagagttcctccttgtacctacaataaccctgaagcctgactaggttctggtgtctaagccgaccaattgtcgatatctcagccaagaattcctgcattccttgttttgaatcatgtgaaattcgtttaacggcaatctctgcatcagaacctggaagtgtacccttaaagacctgaccaaaccctcctttgcctagaagttgtttgaaaccttttgtggctttaaagagttctttgtaagcaaacctatgaggcccacattggatctcccattcctctagaacctctttaacctttttatgtctcctgtagaaaaagatacttaaagctgatgcaacaagcgcaacaaagagaaccaatgccaagctggtcaccaaaacaatccgataaaccagagatttttccttgggatatggaggaaatgttggtattcccaagtccaggtttggaacatcaacgccgccatgtacaaaccaactcaacatgtaatgcattgctctaacagaccccgttgaggctgagaagcccacatacatgttctccaaaatatagggtgatagatcttggttcaatgaaagaagaggcttgttcgggtaataagcctcctctggtgatgataaggtgacattaagctgtttttccatctggctatacaaaatcgtgactcggagtagacttccacttatcaaagaaagatctttaaattgaccttcttgatcataataaccagcaggagcaaatttgatagacctcattccgtttatgttgataccaacatggttatcgttaatgtcgccaaattcctcatctttatttatatcgagctccacagcgatgacatgatttgagctatccccgttgtttgctttgttaaagattccaaggtactgatcagcggaggcaccagtaatgcctcttgtgggagagatcacgaaggccataccatgagcgcctttgtgcttatcctcaggggcgatagcaaagaagaacgtgacagagaaagaagtaactgtatcgttggccgaattcttgaaagggactatctcgtcctcgaaggcttgaccatatgcgtgcttcttggtgctcgtcaacgtcctgtaacctttaaaaaatccagcggatccctgcataaccagtttgccacgggagttttcagtacaacagaagagagcaaggatcaagaaaatgacccgtgagccgattgtacgagacatgatttttgatcgacggttttagaaactaagagcttagtttctgtttttgtcttttatatctttgggagcatgatggaagtcatctaagccaacaaaaaaaatgcccatgaactagtcaaggccctacaaggaataaaatcagagagattgctacaggttgcagagtcaatgctttcaaaaccaattatttaactagtttgtatatatatgaaagtaaagtaatgactgcagacataataaacatatgaactagtcaagacatgtgaacacttgatatcaattaattaactagttaatggtgtcccaaccctccatggaccattgtagaaccgatgagttagtcaagaaaactatttagttatgctttggtcagaagataatattctacatcaacattttaaaatatagtcgaccttgtataccttatgacatcatctgttcaccacagaagcacaatcttgtttaaggaaaataattctaatcttatcaaatctctggaagatatatcttatgttttacaaacctgggaatctggcatcatgtctgcttgtttgtccaggcgcctgatggtaacagcgcatgttagagcagttcccaaaccaaaatccgaagataaagtaatagcttctacagataaagtagttcacaatgttacagccgacttgagtagataacagaccacacgatacattcaatacaatgaacaacataaaatatatagagcaacaacgtcatatataattgcacaaccgacctcgacacagctttcagcgtccacgggcttcttggtgtttgtccacgtcaggaaaccattgataataccagtggatccctcaagaagcctgccaagtgagtttttagtaataaacagagcaatgatcaccagaactaacaacaagttgaagttacgaggcatgatcaatgattgattgagtggtttacaagggaagaagataattcagtttttgttgttgtttatatctttgataagcaagataaaagtcaaagtgatgacttcagatacataataaaattcttggcatgaatatatttttctaataacatacatacatgacatcatgtttacttcggttagtaggaatcagcctgaagagcaatgacaccaaggaggaaatgcaagattttcgaaattttggggccaaacatatatttgaggaaacatgaaggactaaaaagtaattaacaaaacaaaaaaaaaagtaaaataaaataaaagagatagagaaatacaaaccctcaccgtcggttaaatatccgagcattatcgcctccgtcgccgtagatatcgctggtcgtaccgttactccctccttccgatacctctcccgtcgcctgtgactcatttccggctatatccacagtccacagatcggccggcaaaaacaggaatcgttggtagaagaaacgtcgaccttaaatgggcctattgtggcccaatagatatatacataagcctcttaacttcagccgagagggtactttcgtaataactacaaacaatttctaatggacaatggcactgtaaacatgaatttgtctcatttgtgtgatttttttttgccaacaacatgacaattagttagatataatatggttgttgaaaccaaaaatcgatgttaaaattaaggtttcttctataaaagtaatcaatagttgttcaatatttttgatatttaagataacacacaaaagaaattgatagtgtaaaataaagaaacacactgaaaaacaaaacccacatatacaatagtactgtctactcttacaagagcttattaaataggaaaaccataactaacaagtttcgaaaactccatcactcccgtagttatctcataatctgtgattctagtcaattatatataatcccaaatgccttaactttcatgattttagcgtgtgattgattgcacgcccactagagaaacaacctgggtctgcctgacggaagtatcggttccgtaatggccaagttacctatggactcctccgttgtcaccggatcaattactttgctgtacctctcgtaccaattttccaacttctcggatctaacaatatcaagcaggttatccggaagctcagaaactccgttcaaaatcttaacaactgtagccatatccggcctaacctcttcagcctcatgcgaacataacactcctagcttcagaacaagctcgagctgtcccttatcattatcttgtcggattctttcagtagctgcctctacaatatcaccgttttcccaacaatttatcgcccagttagtaagaatagcctcttccgactctgctcgtggctcaaacagttttctatcgcaagaaacttcaagcataaacataccaaaagcgtaaacatccgttcccatagttggtcttccggttctcatgatctctggcgccatgtacccgaatgttccagctactctagaggtttgaggatcatatccttgatcatataccttagccaatccgaaatctccaagacttgcattcatcttgtcatcgattagcacgtttgctggcttgatgtctctatgaatgacgacatgtatccacccatgatggagataggagagtgcagaggctacatctttgatgatcttgaaacgttgactccaagagagttgtttttgatctgatgttccgtaaaggtacttgtcaaggcttccattgggcagaaagtcataaaccaagtagagctcttctttgtatctgcaataaccaagaagcctgactagattggggtgtctaagccgaccaatagtcgaaatctcggccaataattctctcattccttgacttgagtcatgagaaacccgtttaacagcaatctttgcatttgaacctgaaagtgtgcctttaaagacaggaccaaaccccccttcgccgagaagttgtttgaaaccatttgtggcattgaagagttctttgtaagaaaacctatgtggtccacattcgacttcccattcctcgagaacctccaaaagtttcttatgtctcttatagaagaaaacaattaaagctgatgcagcaagcgcaacaaagagagccaaagtcaagaacgtcacaagaactatcagctttacctgagactctgccttgggatatggaggaaaggttggtatatcaaaatccagttttggaacaataataaaggtaaatacataccacatccacatgtaatgtattgctccgaccgacccagtggaagctgtgaagccgatatacatattctttgaaagatacggtgacaaatctttgttcagtgaaagaagaggccactttgggacattagcttcctctgctggtgataaggtgacattaagctgtttttcttcctggctatacaaaatcgtgactcggagtagatttccactgattaaagaaagatttttgaactgaccattttgatcataataaccggcaggagcagatacaatagatctcataccattaatattgataccaacatggttatcatcaatgtcaccaaattcatcgtctttatgtatatcaagctccacagcaatgatatggttggagctatttccatcatttgtatcgttgaagataccaaggtactgatcagcggatgcaccaggaatgcctctcgtgggagagatcacaaaggctataccgtgagaacctttgtctatatgctcagggacgatagcaaagaagaaggtaaatgaaaacgaagtcatgttaccgttgaccgaattcttgaaagggaatggctcgtcattgaaggcttgaccataggcgtgtttcttggtgtttgtcaacgtcgtgaaaccattcattaacccggcggatccctcaaaaacaagcctgccaagtgagctttcaagattagacagagcaatgatcaccagaaccatcaaccagttgattttacaagacatgctcattgattgattgattgattgagcggtttacgagggaagaagattatacattttgtgttgttaaaatctgtgataagtaaggaaaaagtcaagtgaggacttcagatacacgaaatagtcacaagaactgcaaatattttattaaacagagagccatagagttggcagtggcatgaatatattttttaacaaatgtttgagaccaacgatcttattttacaaacatgagatcatttctacttcggttaggaataagcaggcaagagaagtaacgccgaggatgaaatcttaattttttgaagtttgggccaaaaatataactgagtatatatatgaaggactaaaaagtaaattaattaaaacgaaaaataatagaaaagagagggagaaacacaaaccaccaccgcagccgtagtagattcctcgggtagaatggtttcgccctccttccgataaccctctcgtcacctgtgactcattcccggcaatgtccccgtaccggccggcggactcagggatcgatgtagactgaagtgttaaaggcaaaagaaacaccgaagttaaatgggcctactatggcccattagatagatataggcctcctaatcataatttaagtcgagagggttctttcgtaaattcaggagaatatgattggaactcattgagaaagctatgttgaatccctcctacagactacagtctctgttctgtggtagcttaaccagttgcagagggaagcatcccgagcccaagctaatgttgaagccctacagtctctttagctttcattaaaaaccgtaagatacattttacccttgtgaatttgcttcaagtgtcaacttttttcattagtattaccaagtctaatgctcatatcatttctaagagttctacttcaaaccaaatcctccggttttttttgtttttctgttttaccttttattatgttacaacactcaaaatcaacacaacccaaagaaaaatgttcaaatcaaaagaaatcacacaaatctgttaaattcctttctcccaactgttgttgccatggaggcagtggaaccaatgctcaaatttcctactgatttaagtgtcttgtgcttctcaagaaccacacctccaggtgaaccaggacctctgtggctgctgctgttgctcatgaccaatgaccctttgttccatctaaacgtatcttgcgtggggggatacgacattctcctcttctcgctgactggtgtacccatcactctctcctttggattgctgtttggtctaacttttgctttggcagagactgttggagccatgtagctagggaatggagggcagcttgtgaggctatcatcatccttgaaaggagaatcttgacctcttagtcttcctcttgagtatcttgatgtccctgtgtggatgggtctggagggagtgtgaaaagtggatcttgacgatctgggtgttgaagtgtcaaagtggttgtcaagcctgatatggtgttgtttgcttgactgagacagaggacttgggcacagtcttgatggtgttagcctgaaatctctttgtggttggctatagctcggtgcaggactagcaagaggattctgccggtccacccagttccaccattgagggaaagaacgattgtcctgagtagacttaggactgttcttccacaactgcacagagatagatacgttggaaaagacttaaaatgtacatcaacatgatgatggcatgaagaaggattgagtattaccttgcgagaatatgcataggccatggatctttctctcttgatgattgcgtcagtctttctttgtgatcttgaatccctttcctcttttgtcagcacactgtcatcccaattatcattaccagcttcagacgcagcccatttggcttcatctttctctacctgggcttggttttccaacattttgatgcgacgtgactggatttgggattgaacacggaccacttgctgcatgtacttcattgcatttatcgtctgccgcttcacgctgtatcctctcaccacaccttgaagtctgactagacctttgagagctctgaaactcttccttgcctgtttcattcaggtcaatataacttccttgtcttggaaatggaagtgtaatggacaaatcttgatagagaaacaaagaatgtgtatacgtaccatgtaacctctgaaagctccttgaatctttgttgcagaagcatgttggaccggaagcgttggctctggtctataaacaatctcccgccgctgcacagccctaggagaaaccgatcttggagaagggggcttaggcgtagtgggtcttggagcatccaatcttggcgggtctgatcttggagaaggcggcttaggcgtagtgggtcgtggagcatccaatcttggtgcgtctgctagtggagaaggaggcctaggcgtggtgggtcgtgcagcatccaatcttggtgggtctgctcttagagaagcagctcttggagagggaggtcttggagtgtccaatgttggtggctctgctcttggagaaggcggctttgaagagatggcttgtggggaggcacctcttggtgaacttggtcttggagaaggaacactgtgaggtgtaattctctgagaaggaactcgagtagaagcaggcctaagagtaggaggggcattagcagaggctgatgatggcttcgatcgatcaaagggctttggcgaaagtgatcttggaaggtcagctcttggagaaggaggctttggtgaaagggatcttggaacttcagctcttggagaaggaggctttggtgaaagggttcttggaacttcagctcttggagaagggactcgtggtgaggcaactcttggagaagttggtcttggggaagcaacccgaggagaagcaggcctcggaggaggagaggctgaatatggatttggtcgatcaggagtaggaggcctgaagacaagattgtgatctctctcagcctcgcccaagatcttttcgatactactaggctctctgaagatgggaagaaatgaattggtctcgccatgccttagcttcccaaaacctttcttcttcttttctttgccactctttctctctggttcctgctgcataaaaagatcaccaagagccaaagtatctctcatcaaaaactctgtaataaaacatttttgcaagctaagaaaatccagtaaggagtaaccagcttacattggctagcttctctttggaatgtggagtaaaaacccttttgatagcagaaaaccaacttcctttcttcaccattttgccaacatcactttccttacctgtcacaatcaaacagaactcaaacctttgtttcaggctcaaaggattaacctttatggtagttctaagatctatgcatggagaaacttcaagactagtacagttgtgtattgatcatcagaacagaagtattgcttaccgagattagtggataagattttgggagaaggcgcaagttagcatggttgctctgtagccaaaactcttacctgcatgaaccaaattggaaactgcagttaaaagacaaatgaaagaaaatcaaaggcagatccaaagaaactaagataaggaaactgccaaagagattaagttgttgagcttccatgaaaaggaagttttaactttttgacaaatcttagccaaactttttaacttctcttcagattaggtgaactgactaaatcaacacaaaaattgtttcttctatgcaaacgagagagagagagagagactgagacaaagatgacaactttcaagtgtaaaagctctgaattttaatatgcataaattagaaagaagctgaaaaaattgagaattttgcttagagaattttctcacagaacaagtcacacaagtgagctctttcccttaatttctctctgtctctctctactcctcgaaaatcatgtgtttcacatcccaacaagactagagacatcaaagagaacaaaaaaagacagatcttttgaaacaccccagaaaaccagaaagtgaaaaatcaagaaacagaacttaaatcatctcctaggtaagcaaacacgaataacatacctcgatgttgagatttttgtagctttctcttcttctagattttcacaaagaaagagagagagagagaaaagagaggaaaaagaagcaggcagagagaagaaagaagaactcttgtctggtaattttcccttttctctctgtctatcctctgcttcctctctctctctctcagctctcatatctttttctaacgcaaacacacaataaagaaatactattttaattggctattaagaaaaataattagtcttctctaacccatcctttttagagtgtgtgtgggtaaattactttgaaaagtctgcaactttggatctgggtctagttggtattgcgatgaatttcgaaactttttctttcctacttcctttttggaattaatcaaatcgatttatcatcatgaagaaagagaaagagttagtcactttatcactcaatgtcttgggcctattacttttaccttcattgtaaccaccacaaacgttgaaactcatccctaaccaaacggtaacaaagtacctctagtagactataagtttgattagtagattgtttttggttcattaatagtgttttatagggagacttcttgtaacttttcatctcctccaaaagtagactaatattgctttgtcttaaattcctatatatatataggacatagatatactattttgtgttggtaaccatttccgtagctgataggatgtgatgtcaattttttggtgtaaactttaactatgaaatcaatattgaatgaatattttatatagtatagaacatgatagaatggcactaataattttaaaatcgtatcatcactaaaatacttaaggtaaggccacatgaattgtctaaatttgtttaagctatcttttgtagttcctttgccttttttttttggtaagaaaacgtcataaggcattttcaaatattcatacagtttcttattatcatcaagagaaaaaaaagccagaagtctcaaagaagaactatccggttgtccccgccaaaaaagtatatagacttatcaaaattttaaaatatattaggtttagtggagagattctgatttgtttatctggtgtataatatacaaaccataattgcgacagtttgctttttatatattttgtacaaaaacgaccaacaaaaatatactacgagtttttgtttggtatcgcaatgagaagagaatctgaagaaattttcatagacgaggttgattctctttgttgtctcatcatgtttcttcatacgcgctcacatctcgcgtctggtctcactttcttgccttcattaatttgtgcactatttgccaaatgttatttcacgtgacatcgaccaatcactgttctcctctgggatatgttggataaaacgcttcatacttcttactccacaacttttttttttttttttttttggtcataggtttagtaagattttttgtttctacattttctggttaattaaagttcatttatttattttattttataaactttatcggctgatccggtcagcctcagtagaaatgcaccgaaatacttcagagtggacttctccccgaaagaccaccacactgtctgtcccgaatttggatgctttccgactaatgccagggggtagtcaggccgcctgcatttctgactaccaggtaaaccaattgggctaaagcccaactgacagactttccaaacaaatgtgatttttgtttccagggaggatcgaacccagctctgaaagtttcacccttccccaaatcttctcccaccactggatcacagatgcttgggcaattaaagttcataatatttatcttttgctctataagttgtttcatgtttcggggagaagatttctgttgacaaaaaactcgaccttgttcttggtctaagaggaagacatgcgaatcaaatgtaatgtatcgtttagggacttggaaaaatgatttactaattagtgttaaaaacgcatataattatactttggaatacattcaagcaagaataataaaatatttcaactaattgattcttcccacattccttcccactataacccgttttcatatgctgccacatttggtcgtgtgtgtgatttaataattcttttttccgcattaggacctaacctaaccctacctatattacacaatatctatgtgtggctaatatggattaatctttggtcgatatgatgctaagatataaatatttacacacaattagaaaactatatctaccctcaactgataattaaacacaacacaattaggtgatctacagccatatctcttgttgaaaactgtagaaaacttaatgtttaggtgttgttggcaagaaaatcaaactatagtactatacatctatttataggcaaaaacattaaacaattcacatctaatgtatttatactggtatatgttagttaatattaatattgaatagatgcgaagtattgatcagtaaattaaattatattgctttaacaatggcatacacatatctaggctcaaacatttaactgttgagaaatccaattaaaacatccaaacattagattttaaataggaaatttcagatacagtcctctaacttcttgcaacaagatcgaaccttgatatgttttacttacgaaattgataaatgcaacttccatagcctgtaaatgtggaaaataaataaaaattgatatgatatcagacataataatagttccatagttgtttagaggaaaaaaatataaaaagaaaactcactaggatcagttatgccgatgagaccagagccttcaaaattgcagttccaaaaatgtcttccttgagcttggtaataaagattcatggcaacagaagcacgactaatgatactatctggtaaataacatgcacctccttccgagataatctgacaatcgattttcgaacacgcgaagtttatgttttcttgaagcctttcgttatccgtagaaggtttagcaacgcaccaatctccggccgagcgctgtaacaaagatcaaacccaaagttcattacaagaaaagacaaaaaaaaagaaaaagaataaacaaaacattttataacttggttatttcacttatgttcttacatctgccttggtgactttgatgaaatttccttctgtaagagaaacatggaaatgaaactaaattgttacagtacttggaaaagattacaattaatataagattattaaatgatctatatataaacccgtatgtatgcatcgctacataccaattatattatactaattaacatcatgattatagttgtgattacctggccagaggtataagaaaatgatgaaacaaagacatatttgtgctttagccatgtttgacgtctgaaagctcgtctacagctttgctataaaactaggttaaaccgatctatatatacagggagagagagagagagagaaataatatagatattacaaaataaaaagcattatgtgattgaatatttatatttagtatctgatatatttatttgtcaaattttgcaaaagttcattattattattaaaagaaattgtatcaacaaattacatatacagtagaatggatatttctcaaaattcttaaaagatttcttactataagagataaaaatgtatttattaagtgataaaagaaaacgattccctactataaataataaaagaaaaagatttcctactataagttaaatctggatgatttagaaatcctttcactttgaaatcagacataccaattttgaaacaattgggccttttatatatatttttgggcttaattatgtttggtatttgtgatattagggctagtgtgactgtgacctaaggcaaagtatatatatgtggttatgtatgtatagccgtttatatcaacacacaaaatttctagaatttttgtgcaattctgacaaagacatcaaacaaaaacaaatatgcctaaagcacaaatatggtttcctttcatcatcttgttatgcatctcatcaggtaatctaaccatcagtttgattatgttgattgaatctatctatcaatattgattgttatatatgtgggattttagaatattatcttcaagtctttagttgattgttagatttgtttccatgttctttattgttaaaaagatttatttctatgtttctcttacagtaggaagtttcatgagagtcaatgcacaagcaccggtaagactgctcataaaagataacgaaactaaaaaagagcaaacaacaatgaatcatcatatggtttttatatccttttgagtttgctctatgttgtagggccaagggagttggtgtgtggctaagcctggcacgccgatcaaacaacttgtaaagaacttaaacaacgtgtgttcgaattcgagtgtccattgtgaggttgtatcggaaggaggtgcctgttatgatccgattaatctctataattcagcttctgtcgtcatgaatctttattaccaaaatcaaggaagacagtattcgaaatgcgatttcgaaggctctggtataattagcgtaactgatcctagtgagttttatatatctcttcctctttattttataaacagttgtatgaattttttttcttttatctgacctcaaatcaactcttttcgacaggttatgaatgttgcatatatgaatttgctaagtaagcatagaaagcttcgcgaatgtgtctgttccaaactttgaataattaatggttcaactttttacttattgagtgtttgagctttttattgcatgaggtcaaaaaacatcttatctaatatcatatcatatcatatcaatacctctataattatgtggttgatgtttgtttacatcatagagacgtaaattaattatctcttttaaaaaaaatgtaactgttaagtttaagtccaaatcacttttataaaaccatctaaattctttataagctttttaaaaactttgtataagggtacagttgaaaattaatattattaaaaaatcatttttgaaatttccccaaatcattttcttttatcactttaataaattttcttacctacttctacagttctaattgacatggagaataatcttaaaatcaaatcaaatcaacgtggttgaacaatcataaactacttcgtacgctttagcatattgaattgccttcttgaagtttaaaagcaagtttttctctttttaaaaatacaaatgcaagacaacagatttaaacaatgatttgcttggtcttgaagaagagaaaaatgaaaagtacgagatccacaatagaagataatacaagagcaaaacgaagcatgcaaatagagacataggaagaggaggttagttctacattcggatgctccggcttgtgttgggattgatacctcgggcttctcctgcatatggacccgtttgtttcctgatatctctgacctgtcctttgcgtctagtgacttttttctcgtaatttttctgcaaacaaaaattcaagatcccaaaaacatttgagatgaggcaaataaacaggtcaaacaaacgaacgttgcagaaactggtagattcaagatagtttacccggtacttctttctcgggtttttgaggtccctgttgcgttgccgggtcaatcctctgttactcaccatctaggttttggtggcgattagaaaaaaagagatgacaagaaacgttaaactatggttctaggtagagaaacagatgatatttgttgtgtgctttggaaacattctaacctgatttgaaatgtgtcgttttccatccacgtgttctggcgatgacggcatcaaatgaggttttctgaacaaacacaaaacgtatcattgagatgaacaaccacaagtgtcaaaataactgaaaaggaaaggttaatgtaatgtattattattaccttgaatagatctctgctttggcagctcgtttagcttgttgtttctgtttcacttgtttgtaaaattcatcttctgattcaccatcattatcaaccatgtcattgttatcaccatcgttatcatcctcatcatctgatgcaaatgccccatttttattcctgccatctccctctgatgacttcacaccagctccagccaaaactctgagctcaaactttctacgccgttctccaatatcatctctttgcggtaaatcatcatctccagaaatagtcttccaaaacataaggtgaaaagattatgaaaaatactagcgtaaaaagtaacaaagacatatctaagtttcacatctgtgatatgttgttaccttgggcttccgtttggtggacacaagcttggtgagcttatcagctgttacattatgtgtgctattgtctgcatcatccacataatcatcgaatgtctctagcttcctggttagatgcgaattaagaaaataattatattatacatcacaatcctcgaaaagatacaccagaaatccccatcataaagaagtatgatgaaaggagaagctattacctattagctaatttctggcgtttttgagctttatcagactttgaaacagtagaaccaaggactccattggttctaagttttccctctagagctgctcgaagttttaacatctcctcactttgcacatcaaccagatcattctgctagaaagaaagagaatttgttcaagctaaacgaagaaaatgtgccagtaagcaagaggttgaacaatttccaatagaatagaaaatccaggaaaatgcttagatttgtatttacctggtgcttgcgtttctctccttttttcttcttttcttctcttgcgttgtcaattttcatcggctgaataaacagagatcagcaaggttgtgtacaaagaaagtgtcaaatagctcacaagagattaacttgagtgacagcgagtaagatcctaacttctaccttggctgtgtcttgtgtgattctatctactgaatcagaaacaggtgaagtgagctgatcttctttaaccaccttttgcactgctccattagcaatacttcttgctagggactcttcaaatccagggggaagctcttcatcaagttctttgatctaattttaaacaaaaaacatacattaactcagcagctttaatatataaacaaacatagcttgactagttgtagaagtacaacatgtagattgttgagagattaaaaacttaaaagggtacaccgcagaaccttatctaataaagatttgatctcgacaagacgggcaaggaccggatgatcacggatgggctgcccttcagacttgagtagaagataaaatgttatagattggcaataggtaagtagcagaagctgcttaacctccaggtaccttgctaaaccattcaacgaaatttctccttcctttaactgcaaggagacataattgcataaatttctggaggagtcacaaatcccttctttcgaactagggtgatataaagtggcaatatagaaacatattgaaaaaaattgtgaaacagtaaagaggtttaccttattcataacaggatttatcttactctcaagctcttcaactgcatcgttcaactcagacaaaagaccaactatttccggagcagaactacacgaaagacatatcacgtgaatattattttacataacatgtaagaaagtctaatacaaaataaactaagttaatgaaaaatttagaaccagaaaacatcaacattacctatatactacatccatttgctcttcttttgacaaagagtttatgtctttcttgatctcttcaacatgtgtatccttatcacccttctctttcttatctgtgatggattttgtagcctgcttacctttgtcagaaatttcctgccaaacataaaccagaatggtgcgtcaatgatctaagcaacaggatagttttcaactacatgatagtaacttgtaacacccatgacccacctccatggttaattctctgtcgctatcttcttcactatcatcgtctaacccagcatcagctgctgttatggatccaagttgttctgcccgtagtcgtatgacctcttcttcttccgctttaatgtcttcatcatcacttgataggatcttcaaaatcacatcaaaccagattagccacttacgtagagtttgtttcagagttaacagaatattaacaaaaggaatctagcttttaaaagaaatggaatcgaggcaaataatcagtgggttgcagatgtcgacacttcttacatcaaaatccacattatcaccactatggtataggccacttcttccgccccatgtgctccttttgtcttcctctttatccttatcatcatcagccatttcatcgtcaccatcaccaaactttgccctcagatatttcttctgcctaatcactgaacaattaaggccccgatgagaaaacgaataaggcacttagaaaaggagtagctacaggtataccattcagacagagtagatgcaacaactaactacatatagtaaacatgacataagaaggcatccttacttttcgcagtaagtccattctcggcctcctcttcgtcttctgtatcttcatcctcctcactttcatcatccacaccctataatccaaacaaaactgaaattgaaagggaagcaattgaaagaatcgaagcaaaagatgtctagaaacataagccaaaaaacaaacctgtaaatcaaatacaggttgcacatcatcttcatccgattcatcagtatcatcattaacatccaagggaactatatccctctgtttatgaactgtggacaaaaaaccaaacatcagacataaacttacaaaatctcaaacaatgagcaatctatcacacatatctcatcagaatcgttaattaagaagaaataagctagtaagcacttaataataaggacatagtcattccaataatcaattaagctttaggaaacaaaagaaaggacaaatttttcgaagtgggtagaagtttacaggcgtcaatctcgtcgtcgtattggtcttcgacgatatctttgcgagtttttgtgcttttgctacttctcttcaaagtccctccttttttccccattgttgtgttgcagagcaggttctggggataagcaaacttgtgcaactttacaatcccttatcgaattagggtttccccttcacaaatatcagctcgacggcaacgattacctaaagtttctacgacggggaacaatttagaggatatcaatggtgtctgaagaagaagctgagtttcagagaaagagaacgagaacgtatcgttaaaaccctagtaaggttttataaattactgggcctaataaggcccattattatctaaataagcccatatttaaatggtcctttagtactaagagtatacccgtcttttgatttgtggcgacttcctttttaccgaagagactcctccggccggtgagttttcggacgcagatcatcatcagattcttgtctctctctggtcagtttcatagtttttttctaagtttgaattctgattcttaaagctcgtggcttttgagctgggtttgttgacttgatcggatttgacgcctcctaattgttgcgaattgaattatattgtttccgtgttgtgatttgtcagaagctttgacgatctagggttgtatatcaatggtgtcttagcgtagaattgagtagaaatccgaatgatttgaagaaattgtttcaattgtgcttagattttatgttgcgtattccatttatatcgacaaagttctaaactttaagatctaactcttccctgcacttgcattgtgtttatggttttctctctcagttatctgagtgataagaagtattttcagtgcttgaggatctgcaaaagatatccatctgcggtttaacaatggtaaattctcagtgctaattcaggattatgtgatgtgaagatttttgtgagatttttttttttcctctgatttgtgtttggtgggatttgattcagcattgatgctacattgtaaggttcaatgattgatggagtaaagaaaactaatttttgccattgttttgactgatcatgcgtttttttgatgccatcctttttggttttgcaggttctattacagttggatccattcctcaatgaactcacgagcatgtttgagaaaagcaaagagaagggttctgtgtgggttactttgaaaagatgtaactttgaaaatctcatcctccacttttgttatatgtttatacttgaaatatctttttgaagatatcttatatgatttttgttacttgtgtcagcatctctcaagtctaaggtgcagaagaggaaactgagctcagttggagaatccattgaatacagatgccttattcgagcaaccgatggaaagaaaactgtttctacttcggtatgttctacacattatctcaagattatgatctcgaaccatgtatgtttccaaacgtaggaactattcattagtaaactaaacagcacatcgattactcgagatattgtttaagagttactactctctttggataatgaactagaataaaagataacattctctcttaagtctctatttatccttccttgcactattgtagttgccttctagcagttgaggaagtagctcggtaaacaaataaaacgattgaaaacctacccaagttcttgtaaagtgatactggtctatgatctgtaagaagctaacttgttacaatgctttcttgtttgtaaggttggtgctaaggatcaccagagatttcaagcatcatatgccaccattcttaaggcccacatgactgctttgaagaagagggaaaggaaagaccggaagaaatcgacagaggcagagaagaaagaaagcacttcaaccactaaatctaagaaactttgatttctccttttgtgtttctcattgatttgcaattgctgcttaagagttgaattttgaaagctattgaaagatctaaaagattttgacttgtgttataatagagattttggtttgcatttgcttttccctcgagaatgttcatcgtgtataaataaaccaattccatacaaatgtacgaacataaatccaattcaaagaaactgattctaaatttcaaacactaagaaaaaaaactcaattgttattatggatctcttcctgttcctaacctagtaagatacctcatcagaatttgattccacataagcttcatcagaatttgaatcaacataagccttgataacacgtctgtacttctcagggctatcataccaggttggtgtgttgatgatcgccttttctagccaatactcatcatacactctttgcctcgacatcttctccaagaatccgttccaactatccatggctcgggtcaatcgaacagtcttaggtcttcccataagaaacctaatgtaatcccttgcaagcttgaccaattcctccccagtgataatgtatgtgtactgcaaaaacaaagatatattccatcaaagcaagatacgatatttgaagttcaaatctttcctgaaatttgtgtcatttaccaaaaagatgaagcctaaggtcgccaaaaccacttgcaaagtttcatctgcgatcccagcaagaccaccatcttctcctcctgacccttcaggacgctcctcaccatttccaccaccgccaccactgcctcctccacgtggaggcatgttgccgccactgtcagtatcataaaagtctttcttctgtatctgctctcgcaacatatcttcaaccgatttcttccccatagctttctctattgctttccatggcgatatctgataacaaaattcattacaacaatcactaagaacaaaattgaaaaaataagaagaacacacttatcatcagcaaacagaacagcaaagttcttagaaacaaacacaaaagaaatcactctccagttgcaaagtaaattcatttacaggcagaagaacttaacatgaggaaaaagcatctgacctcatcactaccatcaggtttatctttcccaccaaataagcacacagcagaactttgtttcgatttcccagtaggtaaacgacggcgatgatcaagaagaggcgaaaactgagtagacactgcagcagtagctcgaagagtaaacgaggtacgcgggaagtgatcaaagcgtactgaagacctaataggtacactggagatgcaatttggtcgtgttatccttgcaggatagtaggatggtcgaaaacaattagcctgagtaaagctcatcttttatcccaatgtttctcttaatgcaatcactttctgaaaagaaaacaaatcaacagcaaacaacgaacacaaccaattagaacccaacattgaccaaaacaaggattcttctgggcatgttcagaatttgagtatatccatttctaatccaaattcggagaaaagaacaaatctttgggataattatatcgtagtcatagaacaataagcaatataagtaaccagaaaccaataacttcgaatgtgatagaatataaaggcactggttcggtaaatataaggtaagaacactgagcaagctcgcaagaaattggaatatcatagagaaaggagagtaagaaaccataaatctaccttttcgaagctttgatgagacagagactttcgaaaccctagtttcgcttggagagaaagaattcaattttttttcccctttgcgtcgtcctgaaacacaacggaggagccgaaactctgtgagagatgaagcgatcgacaaaagtttttatctatcttgaaagatgcagcttaacggcgtcgtttttcacttgagctccgatggttctagagtctctagaccagggttggtaagactaaaccgctttttattgatatgctggtttaattttgacgcatgactatttggaaattgcaataattgagttggatttttctaattttggttgattttgatttataaatagaaacattttggcttcactagtcatttttctcacaattccatacaatttttgttaaaaatcaaagtaagactttaaaagaacgttctaaatgctatattagttgaccaaaaaaaatgctatattagctaacaatatcgtttgagctaattaacaaaaacttggaactattcaatagaaaaatctcaaacgtttgaactaatctaaacttgattatctcaatcaagtttttatgagaatgattttcatccaagtaacttggctctttaaaattttgattacatattcgtttttgatctgatctatgaccgacatggaatttctcataacgacaagagaaaaaactgtgtcattgacttttgttaagtggtacaaagtggcattgactttgactcagaaaaagccaatcaataatcgtgaaagatgtctaacactgatcaatatttcaatttgaatagaccaaatttacactataaatacatcaacacaccttcttcatttcttcacacaacaccctccatacacaaaatggctaccctaagagcaatgttgaaaaacgctttcatcctttttctcttcaccttaaccatcatggcaaaaaccgtgttttcgcaacagtgcggtacaaccggatgtgcagccaacttatgttgcagtagatatggatattgtggcaccacagatgcctactgtggtaccgggtgccgaagtggaccttgcagctcctcaaccacacctatcccaccaactcctagcggtggtgcaggcggtctaaacgctgatcctcgtgatacaattgaaaatgttgtcacaccagcattttttgatggtatcatgagcaaagtcggaaatggctgtccagcgaaagggttctacactcgccaggctttcattgcggctgcccaatcgttcgacgcctataaaggaaccgtcgctaagcgtgagattgccgctatgttggctcagttttctcatgaatctggaagtaagttctttataaacccttctagttctactacatgaatgcatgtatactaattatttaattaagcaaattaatgaattattattatcaagaatattattacactaattaagcaccataatgtttcttgggtaagttaacaaatcatttcttttatcattaaaattcatacatattcattctctattataaataacgatcttcttttacgttatgcaaggtttttgctacaaagaagaaatagctagagggaaatactgctcaccgagcactgcgtacccttgtacaccgggaaaagactactacggccgcggtccaatccaaatcacatggaactacaattacggtgcagctggaaagttcctcggactccctctcttgactgatccagacatggtggctcgtagcccccaagttgcctttcagtgtgccatgtggttctggaacctaaatgttcgtccagtcttggaccaaggctttggagccaccactaggaagatcaatggtggtgaatgcaacggtaggcgtcctgcagccgtgcagagcagagtaaactattacttggagttctgcaggacgcttgggatcactcctggagcaaatcttagttgctaaagatgttaaaatgtggttcgtatgacacggtttcatagtataagtgtggtcgttcacgtgtgagtttataactaaaggtgtcgaataaaaaagattatgcggtgtatcctaatgtaccaatgtgttgtttgaatcggttgtcacagaatgaagtatatcaggctatcagccaatccataataaacgcatttactaaatttcaaccttttttctggttaatggttatccaattttacagaggatagtgtttgaattttttccctgggaacaaattacataagctgaaacttcagagaaaattctttacgaatgaaagaaaaagtgtgaacaaatggtaaattttataaaagattatttgtctaagtggttccttctagtgattctcgattcaccatttcgtcagacacttgtaaggatgatatataataattaaaaatgtaaccagatggttctaagtgtcagaaagtgagaatattaagagggaaccactgccgagtaatgtatatttgtatgatgacaacagttgtaaaatttccataactaagaccgatcgataaataggcctaaaaaatgtatgcatatttgaatgaaataagatattgacagtttaaaaaatgaaggaaaagtaattcaaacttttttcaatatatacggatcaggatattcacggaaaaacggtctatttccccacgagaagtaccgcatcatgccagatagagcccaaactttaactccggtctacatgtccatgaaaacaaagttttaaacatatttctccccgaaacgtaagttctatagctaaatctccccgaattaatacttcgagatctattaatccatatatctgggttttatcggttattatttatttaaccgtttttaaccaaagaaaacctgattttaaccggattaaacacaaacccaatcaccttcttcctctttcctctccttcttctcttcttcaccctatttcacgttatgggttttgtttttttttctcaaaattggaattccactttctttttatgattaaaccacttatgattaagttttaattaggcaaaatcccagaacctatcttaaataattcagattcatgagcgtcttttctaataccaattatgaaggacgcttttaaatttagaaacccataatctcataataatctcatagctgaagaaacacaaacccataatatcataaaaatctactcaaaaaaactaacaaaaatctcatgttgccgcaacaccactcctcgtccaagaattagctctttcaccaccaccactacctttaataactgccgatttccctcttcttcatgctatcaagccaatgatgatacttcttatcagcttcttcctcaacaaaactagatcttttcacttattcttcttcttcttcccatccatgttgtgtgtattcaccttcaccacatcgaatccataaaataacagagtttgaggagaacttgaaatcacgaattcacgattaagaaactcgaatttgaagttacataaaagcaattgacaaaaatgagtgaatttacaggaaatcaataaactgaacgaaggatgaggaaagtctctttatacttgcatccaagatcgattattgatttcatcagaaaaaagttagtctggtattgtttttaaacgaagagaatccaagcaaaatttcaggtgaagaagaagcgttggatcggaacgttaataggtcggcgggttcgggttaatttttgataattttggtttagttttggttaaagtttgttttcaaatggttaagactgaattggtacattaaaccgacaaaaaccagatatatgggttaatagatctcgaagtattaatttggggagatttagctatagaacttacgtttcggggagaaataagtttaaaactttgttttcatacacatgtagaccggggttaaaatttgggctctatctggcatgatgcggtacttctcgcagtagtttgaactaagaaatatctttaaaataacaaaatttcagaaaaaatggtccacacacatgtaaaatatcgtggacttacaaatgagactgagagcgtacgtacgtatagatgcatcagaattcatgtacaatatcaagagggcctctttcgatgacttcttatttgtctctgtttacaggaggacccctctactgctttttaccagtcaagactcttaatctcttagatcatagaatctatgaaaaaactgttgtcatgaaaacattttttttttcatttttgagttgaaatgtaaatgatgttttcattatggaaaatgaaaagctatttaaaaaatttaatgaataatatataagtttttttaggattataaaatactttatttttggttttggataatggttttctgttttataacaacaacttacatggatatagagtttttttcagatcaaaactagattagcccttttcagaccaagaagcaaaattggcaaaggaggcataatagttatgtgatattgactctcacgtcacggccgttgttgttcgctgtgaaaccaagtttgaagccagtggaaacctatagttcgtaaattgtgtgagtgatggaattggatgttctattccttatggtgaagtctatatttttgaaaacttgatctgaggctcttcgtttgcgcctgcactaagtctatatgtgtagaatgtagggtagataaaaaaatctaaattgaatgtgatgttcctttttctaaattaataatgtatacaatatctcatatatatatgaagagttttatgatgatgcgaaagcgagctagccgaaaaatagaactaacgtttcgtttatagtctgtagttagttaagtttgacgtaaacattgatcttgaaggcatggttcagaccactttttaaaatacctttaaagttactagtatagcggaaaaaaaaaatttgattaacatctggttcaaattataaaattaaacattttttatacagaaaaattggaaatagttttagataaaaaacaataccaattagcacatgaaaaatagcggctactgaataaaataagtaaaaacataagctcactcaagatcaaatccgatttgagttaaagtattgcgatagtcaagattagatttgatctgtgtatcgtggaatcatcctaaatgttataatttaagattacgaatcaaacaaacacatcttgaaaacaaccacatggctgttaaaaacaattagtattactattaactaacttcttacatcttgaaaaaacaaagagttccttcacatgaggccatgagcatgtgacatgcttgagttgactttgaaatttgaatggatagggccacgtcaacgcattcaaggatccttaattagcgcttaagtaaaacctctttatttgtcgtgactcgcgaaccccttttttattaacgttttagtcaacacaacatttcattaatgataattctactactattagtttgcaatgttaactaaactctttttacgtgagaaaacttaagattatcatttccagaccaccgcaagttccttgaaaagattgttatatatataacagctgcatatcttaatacggatttatgggctttaatttgaaatcaattgtatcaaataggtttgaaaaaaaaaatcgtatcacatacctttattttttgagtgtagtataagcaagcaatattgatgaatgcgtgagtctgcaaaatttaaccccaaaaaaaaagtaagcaacaatatatattcagcaatcatgttagaaagtattttaatcatgttgaactgaacgatctccgcgctaattagtattcctaagagacaccaatcagaaactattggatagttcgacggtttagaatttgtccagttgagaatggttttcaaactattttataaaatttttttagcgaatttctaaagttaagttgaccagcacatcttgtggttaaatgtttcactcgtcgttgaaaaagtcttttcaacaaaatcttactttctggatataattaatatcatatgtacaaaaattgattaatgggtcttaaactatttcatgtatttactatttagatagagacgtttaaaaaaaaactattttcgtgtctttactatttagatagagattacacgacatggaaataatagtacatggtcaagtttatatacggacgactctcatgaaatcctacaacaagaaaacaaagcaacatatagtataatgtgaaatatacactgttaagcaacatattacgtattatagttatttttatgttaatgacgtacaatgtacaaattctagtattcttcacctgaattatttgatgctaaactacgtacgtcgtggttattttcattgttctttaattagccatctcgaaatataattatttcaatgttacaagattttagtcgctctaataggatgtttatgaatttaaaccgacccaatccgacttgttttttcttctaaaaaatattatcttgaaaatgattttattaaattcgttttcgtcttagtctaattcagctataaagtataaacgttatgaccaagtccataatcaaatcatcatagtatttctccttaatcacaactacaagaaaaggaaatgggtcatgactttcttataaaacattaactaagatttgaccaaacataattttgtattatcaatattacaccataaatacggccacatatcctcctagtttcttcacacaactctcccctcaaaacattccatcaaaggaaaaaaatggcgacacaaaatgcgattctgaaaaaagctctcatcattttcctctttactctaaccatcatgacaggaaccgcgttttcacaaaactgtggtacaaacgggtgtaaaggcaacatgtgctgcagcaggtggggatattgtggtaccacaaaagcctactgtggcactgggtgccagagtggaccttgcaactctaaacctaaacctactccgactccaagcggtagtggcggtctaaatgctggtcctcgtggtaccatagcaagcgttatcacaccagcgttcttcaacagcatcatgagtaaagtcggaagcggttgcccagcgaaagggttttacactcgccaggctttcatcgcagccgctgaatcgttcgcagcctacaaaggaactgttgctaagcgtgagattgccgccatgttggctcagttctctcacgaatctggaagtaagttcaccgtttactacattctattattctttttatgtatcagaaaatgtctaaaaaggaattattaaagtattatcatgtttaaaaatttatataaatatctgatttatcagtttgcattaaaaactttattttgataattgaagaaaaatatagagacaggaatattttcctcataagaaataaggatttgctagctatatatattaccaaaatgtgttccaagaatgtgtctaaaacaagtttaaaataaagtttatctgtttggttatgtaaaggtttttgttacaaagaagaaatagccagaggaaggtactgctcaccaagcacaacatatccttgtcaacccggaaagaactactatggtcgcggtccgatccaaatcacatggaactacaactatggtgcagccggaaagttccttggacttcctctcttgaaggacccagatatggtggctcgtagcccaactgtggctttccagtgtgccatgtggttttggaacaagaatgtgcgtccggttttgagccaagggtttggtgcaaccacgaggaggatcaacggtggtgaatgtaatggtgggcgtccagctgcagtgcagagcagggttaaccattacttggacttctgcaagaagcttggggtcactcctggaaccaatctctcatgttgaagacactactagtttatgagggtttttcattaatgtcgtctggttaagaatttcgtatcgaataataaagtgaagtcgaaaatactagaacttataaaatttgtaagagattagaagttatattgtgtggttgatgtctcttaaggtaactatattgtgtgttgtttgtatccgctcgctagcataagtaataaagatggaagtattatccaatcaatatattggtttccctgtgtttcacactagactagtatacatgcatataagtaacgaaaattacttttcttctatcatcacatcttttcttctatcatcagttcatcacatcttttcttattaagttttaaagaaaagaaattagagtactagcggaaccaaacgaggcttgtgattgatgataacaaccaaaacaaataaaaaagaagaggaataatgttatagatcacatatgatccgatcatttctaaccgtcatgaaattcatcgtagatatgacaacataattattaaggatgtgctagtctttgggtaacattttatgctattgttagattctgtaaaaataaactagtgtttttgttttgggattggcttaaactggaggccatactggttacttggtgatctgaatctaatttcctaagaaccaccttcgattttgtttttttaatgattctttaattattccacatgtttatataatttgctcctttttaagtgcatctgaaagtcatagggatggaacattgataacaaagcaacagattgtcacgtgaaagattaattctagtttcagcttctcaaagtccagggttaatagttgacttgcgaatttatagtgttcaaatatatagtagctagatcttgtggatattaatatatgtagtcttccttaaatttctagcaaaagcttaagtatttaaaatatcaagaatatattaaatcaattacaaatcgactgattttgaactacaaatatgtccacaagcccctcatgttcacaaaatccccatttcctaacactcatttgctataacaaaatgaccatcaaaaacgtcattttttccctcttcattctagcaattttggccgagaccgtgttctcgcagaactgcatggatactagttgccctggccttaaggaatgttgcagcagatggggtttctgtggcaccaaagatgaatactgcggatttttttgtttcagtggcccttgcaatatcaagggaaaatcatacggatacgactacaacgttgatgccggtccacgtggtaaaatagaaaccgttatcacatcagcgttgttcgatagcatcatgagcaaagtcgaaagcaactgctcggcaaaaggattctacacttatgaggctttcattactgctttcaaatcttttggagcttacaaaggaaaggtggctaaacgtgagatcgctgctatattggctcatttctcatacggatctaaaagtaagttcattatattattaaaaaccaaaaataaaaaatttgcattggcgtttttacctttaatgcgtaagatatttgaaaatcatggatgcatgcaattttggttttttggaagcttaaagataatacattttatttttacgtaaaggtttttgttacaaagaagaaatatcgaacgagagatattgttcaaagagcaagaagtacccttgtgaaccggggaaaaactactatggtcgtggtttgctacaatcaatcacatggaacgagtattacggtgccggcaagcacctcgggctacctctactgaaggatccagatctggtgtctcgtagtccagaagttgctttcaaattcgcaatgtggttctggaatagaaacgtgcgtcccgctttgtacttaggatttggagaaatcacaaagagagttgatggccgtgaatgtggtaactggcgtcgcgatgatacgaagaacaaagttaagcaatacatagagttctgcgagatgcttggagtaactcctgatcaaggtctcgattgttaaagtcattagtgtgatggaaatacttttaaattaataataactaatttgattgacctatggaacatatatatatttggtttaaacttttcaagattttattttgatagttacttttcaaatatcggaactccaaaccaacggcaaaaatccatttggaaaacggaattagtttccagtactaaatagaaatatcgatcatatgcatgtagcattacgagggctggtttggcttgatctttatgacatcatttattggtatgttttctctggttgtatagctgatgctttccttttattttcaatgaattttcggaccaaattaaaaagtgaaatagggtaataggtttgaggatgatcgatttacaaactcactaagtttggcgatcgaaacacaaaaaccataaaatttggaactctttaaagacgtaaacaagatgaaaacttttattccatagtcacaaagtttaaaattgaatttcaaatcgtttggacgtttcgatttaacataagccatttaatttattattcatccttccatttctatgtactagtcaatgttgcttatattttgtttgctaacagattaagaaaaaaacaaaagacaaaaactcaagaagatatttattttttagccttggtagatggaaagtcattagttagcattaggaatatgcaataatgttaggccatggcttttgaataattgacaatacatgttaaatagtagtacaccgcagcctctaagtggaaaaaaaaaattgtataaattaattaattcatttctaccatataaaaaggttccttccaagtggtctacgaatacccgaagatattggacttttttagttaccagtacagctgaggtgaccatcctagaaggaaaataaatgaagagattatagactatcttcagtaatgtatgtggatttgttgacgaaaaacaaaattatacaatatatagactcgaataatcaggcagtgtgcatgaatgtctatatgaaacttaagatcattttataataagatacacctacgaaaaactctactttaagatgaaacaatgagtcccaaataaatttgaaagaatgagttagtacccagcgaatctgtccttttatttaattgagctaatattactgttaagggaatatgaattgtcttcatctcgtaaagtttttattactattaaacaatatacatacgaatttgaattttgatacttatatgatgacgatgctaacaaaacagaaaacaatggttagcgtatctacataattcaacagtaacagctggttatatgtgaaataagcataaaacaaagcctgaatttctttgatagtgagcacgagtcattattatccagcgagtacgttgattaatttgagattttatagtaagaacttttcttaagaagtataattcataagaactaattggaagtgcaattctagcgttagaatgtgtggatttagaattgcacttccaattagttcttatgatcaattgtttttctttgacaataacttcattttaatgagtaaatacagtttctttgacaataaatcgaaaaacaaaacacagtcatcttatttatctacttctcgtttctttttattcctaatgctaactcgcaacgaattcgtggtgattcagtacttgatagacttagcatgaagttaagaactaaggtttgagtaatttcattgcgattgaaatcattataattgatcattatgattatctcttaaactttaaaaatttccacgcggcgactcgagttttaaaaaatcattgaaaagaatgagttggttgttgaatcatacgattcctgaaagtccggaccagtgaggcagtgaccgagccggaacgcacaacgtccggtgcagttgtcacttccaccagaaaaggcgaaaccaagagctttgaattgaatagtcaaaaataattgcttctactcttcattcttcaacgtatgcaacgtaacttgtatgattgtgcatttatcattttttatcggcaaattttagccttacacaaaagacataataaagtatcatggccttttttgttgacattgtccttctcttgtcaacaatcttcctggttttaagatacatatggatggttcagaatgtcatatagtataatctattactctacactttgattgatgacattcttattccgatttttatccaagtcttttattagatgaaaatcaactgttattttataaaaaaaataaatagtggatttaaagtgatttgagtgacatacattaggtgaaatttgaaggaatttcttagttaaaaaatcaaagatgcaaatcttatagttttaggtgagattttagagaatgttaatagcaatttcctaaagttcactaaaaccatctcaaaactcatcaaaactaaaatcactctcaattcatccttcaatacagcccctaaaactgagaatcattttttgtcaactaaaactgaaattcatacatttgatggaatttgagtagccgccgggtaatggacccaaccaaaggctcacatagtcacatggtaccaagatttatagtgatattatgcgacatctctctaccacatagtcacatggcaccaagatttatagtgacaatatgcgacttctctacttagggccggctttcagaaactctagaagaactagccactgatcgactatattagagtagttaattttatcaattacatttgaaatgtttatctctagtaagataaatatcaaacaaacaaaacttaatccaaggacttgtcttcatatcgtctattaagagtcgaatttaagaaatgaaaaataaacgattcaagcttaagttagttttaggaaaaagacatactgtttgctccatatagtttgtacatgtattaaatatagaataacaaaatattttaatgtttgctccattgacattacatgtattaaacagtttaatagaaaaacgaacatttttgtttgttcaatcattgggaaatcatagaattgttcaaaatatgaaacaaaagtgagaaatatcaattaatataatagttctgtttaacaagaaaattgaatttagaccaagtccacaatattcatcttgagtaagaacacgaccaaaagtcaaactcgtttcgaaatacataaatatgtaccccgctatacaaaaaagaaaaagacatttacatccacttatcccaatagacaaatgaccaaactacccaacatctacccctatatatacctcaccacctttgccctctcaaccacaaacaataacacaaaacatggctttcacaaaaatctccttagtccttcttctctgcctcttaggtttcttttctgaaactgtcaagtctcaaaactgcggttgcgctccaaacctctgttgcagtcagttcggttactgtggtaccgacgatgcatactgcggtgttggatgccgatcaggtccttgtagaggtagtggaaccccgaccggagggtcggtcggtagcattgtgacacaaggtttctttaacaatattatcaaccaagctggtaatggttgcgcggggaaaagattctacacccgtgactctttcgttaacgccgctaatactttccccaactttgccaattctgttaccagacgtgaaattgctaccatgtttgctcatttcactcacgagaccggacgtaagatttatgtctttcttctcttctatctttatatactcaaaaataaattaatattttgtgtctgtgtatacatctactttagtcatgactcattcgaagtttataactttagtaaactaaacgaatgattggaggatttgatattttaaaacgttttgcattatttcaaaacaaatgaggattatattatattattataacacgttaagtattttaaggaaaacaattggttataagaccatataagattaaacctttgatattgtagtaagaaatgacatttgacttgatctcaagtaactaagatgatcctaatcctaaataactcttctgtttcatgtgcatctccatacgtattagatttctgctacatagaagagattaacggagcaacacgtaactactgccagagcagcaacacacaatacccatgtgcaccgggaaaaggctacttcggtcgtggtccgatccaactatcatggaactacaactacggagcgtgtggtcaaagtctcggtcttgaccttctacgccagcccgaacttgtgggtagcaacccaactgtagctttcaggacgggtttgtggttttggatgaatagcgtaaggccggttctgaaccaagggtttggagccaccattagagctattaatggaatggaatgtaacggtggtaattccggtgcagtcaacgcaaggattggatactatagagactattgtggacagcttggtgtggaccctggtcctaaccttagttgctaaaaaacctttgaacccaaacacggacatatgtgacgtggcatgtaataagtgagatatactaaaatttcacacgtatgtactttatgtcgggtctcggtgttccctgcgtcacaagcaaaaaattgttgtaataaacttgtgaaagtgattttcttttcttatgtgacttcttatgaaagagaattttaagattgatagatgtttgagtttgacacttgcagtatctgattttgggatactcgcataaattgatattataatattttataatcttgtatttatcacgccaaaaacaaaaagttttataaaaaaaaacataatgataaacgtgtcatcaccacattggtagtttaatggtttttagattgtttttggtcaacatatggattcattagagacgtatgcaggatgcagcctagcgtaatcaatgagtctggtttatgtttgtgaacttttcagaaagaaaaaaaaaactgattttattaaagaaaataagtacaaatgttaggaaatttcgcaacggtgatttttgtagaaaatatgttgtacacttattacgttcacaatcccctcatataataataaatgttaccgtttggattctatccggttaaatatagaggatctattataggatgtataactttttctttttttcttttttaggatgtatgacttacttatatatacaagtcatataggatgtatgacttgtatatataaaacaacatctatgttataagttcaaagcatttcatttcgtatttcagatgatttcagtccgctatacgtatctatactcgatctattcattgcaaatattttgaagttcaatgttgaaaagtcaaaaccatggcaaaccatcgtacagagatttatcatgaaaatatgtgttggcttcttttaagagtcggcttttagaaaatgctcgagagaagaggggcaattgattggggactcggtttgtattattgtaattaatcaaggaacactccaatatttttttggatcgtttagtaataagtagtcaaattcaataattttttcaggttcgatgttccaagccgtcgacaattttctaacatcgcacttcaaaaattaccacatttatattttttggttaacataatattattatttgtgaagggcggcttttcttagtttcattaacataccgactttaaaaaaacaaaaaaacaaaccgacagttatctataaaaaaataaaatatatcctacaacttttttattcattagttccaaattcaaaaaaaatgtgtaaccatgtaaattaaaagatcctaattcaaccaattatttttccaactacagtacaattccaatctaccaggttttttttttgtttttaaaagaaaattcattttttttttttttttttttgtcggccaattcaattgcccatacatcttcggcataacaatcaaaaccattgttaaataaatgaaagaaattaaatcacaattgattgccagtcccacggaaatgaccaatatacccaatatctttcatcatataaacctcaaactcttccctctcctcaaacaacaagaacccaaagatggctctcacaaaaatcttcttaatccttctcctatccctcttaggtttatattctgaaaccgtcaaatctcaaaactgcgattgcgcccctaacctatgttgcagtcagttcggttattgcggtaccactgcagattactgtggttctacgtgccaatcaggtccttgtagagtcggtggaccccctaccggtgccggtttggttggtaatatcgtgacacaaattttctttaacaacattatcaaccaagccggtaatggatgcgcgggaaaaagtttttacacccgggactctttcattaacgccaccaatactttccccagctttgctaataccgttactagacgtgaaattgctaccatgtttgctcatttcacttacgagacaggacgtaagaatcttttttctcggtttttgacctttttatacactaaccatatcctagccttctagggtacattactagattgtgacataaaaattgagtatgcgaatttaaaaaatttagagtaacaattgtttatttacgttttaatctacagtagcgtttgagtgttttaaataattactaaaatactataacatacatacgtttgaaacaatcattatctagaacgaaaaaagaatcatatttaagacgtaagagattaaattttaaaaccttggatgttatctcatttactctgtttttgtcctacaataattataaactgaacattgattttctagcatttgttcgtttgttcgtaaattaactagtgtgtttcaatatgcatctttgtacgtgtagacttctgctacatagaagagataaacggggcgtcacgtgtcatgtgcgaccagaacaacaggcaatatccatgtgcaccggccaagagctaccatggccgtggtccgctcctactatcatggaacttcaactatggagcatgcggccagagtctcggcttagacctcctacgccagcccgagctggtgagtagtaacccagtcgtggctttcaggacggctctgtggttttggatgaagagcgtgaggcctgtattgaaccagggatttggagccaccataagagccatcagcggtttcgactgtgacggtaggaacttaggtggggtgaacgcaaggattggctactatagagactattgtgggcagcttggtttggaccctggcgccaacataacttgctaaaacgctcttgggacatacatggcacgaaagtattaaaggtgaaataagaagtgttgttgtaattgtagtactttttttttttttttttttgataaaaagctagagtaatcttgtgaagtgaaatcacattattaaaagattaataaatcgacttatacaaataaaatgcttgattcttgatatttataccgcacccaaagaacaacagaacataactttgttgcataagtttttgactcctatatgtaaaacttcattcctttcttatctagtattgttggtttcttatctcaattgagcgatcggattagaattggtctgacaactagtttattatgtgaaacttttaaaatgaagagttttgttgtgaatcagagggtttgaaagaatttgatttcagtttaaaagtaaaccgaatttgttcaagtcgttgtaggcctatgttttgtctgtttctatacatgattgatcagtctcttgaaagtatgatatatagatgatagagcttgttttctctatgatatacatgttcctgcaatatatcttgttagattactaactggactaagtctggcacgtaagacaacgatcttccacaagtaattctagtttacaagtcattctaataattttaattaatttcaaaatggttggaataaaattacctagttttactatttaagagaagaccaacatcaaagattattcttatctaatattcaaattatggatattaatgcattcatatacgactcgggattagtatttcttacaagacttgttcaataaaatttcttgccaacaattatgacttttcctgttgtttacaatttttcacaagtctattgtcgattttaaatttgtgttatcacacacaacatgagactagtaaaaccaattgacattgactacaggcttctaccgattaaacttatcttgtataacaaactcaaaccatattttaatttttgttttccaattggcgactactttcagtaaaagtcacttagtttcttgctttttagaaccacaaaaaccaaatatacttttttcacctatctcattttatctctgataatttttctttacactaaatgtttgcatcacaggaacaaaaaaatatttggtttaaccaatttcgtagattgaaacgaaaatgttggtgtttgtttgaaaatttcccaacgtgttacgtgtaacgtttcgaatggtctaagaactaataagcatgcgtggcattggcgttgacgttgactcagaaaactacaagtatattttatttacaacaaaacgtatgcttcacggatccatcatcatctataaaacacgaagctaatgttcatcatctctctctgcagtctgcatcacagacacaaaaacaatggctaaacccacatcacgaaatgaccgatttgcccttttcttcataaccctaattttcctgatcctaaccgtttccaaaccggtcgcctctcaaaactgtggctgcgcctctgacttctgttgcagcaaatatggctactgtggtacgaccgatgagttctgcggcgagggctgccaggcaggaccttgccggagcagtggaggcggtggagatcctgctgtttcactagaaggaacggtgacacctgacttctttaactctatactaaaccaaagaggtgattgtcctggcaaaggattctacactcacgacaccttcatggccgcagctaattcttaccctagcttcggtgcttccatctccaaacgcgaaatcgcggcgtttttcgctcacgtagcccaagaaacagggtgtaagtaaattttctcatataattttgaatgaataaagatacttataacataaattttattctagttacgactatattggttcaatttgactaaattaaatttcagcataagataataaaatcagtaattgttgtatacaaattttggttaatcgtatatgtccaccactataggtttcgtttttgtgaccatatggttataccttgttgcagtcatgtgttacattgaggaaattgatggaccagccaaggccgcatccggagagtactgcgacacagagaaaccagagttcccatgtgcacaaggaaagggctactatggccgtggtgcaatccagctctcttggaactacaactacggtctctgtggcaaagccttggacgagaacttattggcttcaccagagaaagttgctcaagaccaggttcttgccttcaagaccgctttctggttctggaccactaatgttcgcacgagttttaaatcgggctttggcgcaacaatcagggcagtgaatagtagggagtgtagcggaggagattctacagccaaagccgccaacaggattaagtatttccaagactattgtggcaagcttggagttgcacctggagataacctcacttgttaaagtttccttgctatccatccgaaacacaactagtgtttgaaaaacttagagatcacataagagaaagtatcatattagtataataatgttgtaatacttcacattttaccaaaaataataataataatgttgtaatagctagtgtcaataaacgatttcttatgcataggcacggcggattttacaacaaagggccgatgtgtaaaaagaaaacacccaatagtgcttcccaagaccgtaatacccgagatatcctatataaaccaagataagaaatcctctaagtacagtctgatgaaaactatggaagaacacttagaaaatacttgaaagagtatagagaattaaagaatttatgaaaaacactattttatttgaactttctttttgattcatttgttcaacctttttacaaaggatgggggtgatgaggtttttgtaccctccaaagttagcttacaaaggcttctagactttaccctacaaactcctagattattctacataattatctatctagtagaattttctacaacacttagaggagatgatgatttttttttaataatgtttctagagaaatcttataaaacttagcgcaaaatcaagtttaccgtcgatacgcgctggtcataatgtaagctttaaaagccaacgccaatcaccaatagtccaatgcacatttggaccgccggaggaagaatgtgaaatgacgacgttttaacgagaggtgaagtagaccccacacgagaaactacttgtcgtttcaatcaaacagaagtaaacaattacagatatttacttgccgtttcaacttccggatggtccactccttaacgttcatatttccttaacgaaattaaaaaacaaatgaaaaatttaagaaactacgagagccaagtcagcaagaagcgaacgcacaaacaaaacaaaaccagagatttcgttatccactgaagttcgtttgcttctgtcaaatttgccaaatcgtaaccaaaaaaagatggcagcttcttctccatctctccttctaccactaggtaagaacctaagctactgattctgttttctgatttcttctcaaagattagatttctcgtcttggaattcagggtttctctgctgaatctactttctcagagataaaaatctcatctttgttgattctcttaatccttacggttcagattaaaccggcttcattcatgtcttgcatagttgcaattagaattgtagaattc

SEQ ID NO: 373 - DNA, 109741 bp, Arabidopsis thaliana
gaattcggtaatacctaagatagcagccaaacgtcttgagctacttggctataggtccttggcaatagtgtggattcaatattggtaacttaataatggtcacgactcacgttggatttgctgcctatgcaagatggtttgtggggacacacgatcaatgcatgcggacaattattttattgaacgattagctttacttgccaataaatacatttggtaaacgttacaagatctgataatttttgttttatgcaactctagttaggttacgctgaatgtattttcaaagtttgtagtatatatttattatttaatccaattttgttcaggcctaaaaaaaattacgatcatgcatgcatgtttggatgagccatccacatatgtaagattttacgaccaaagtttcattgtcaaatcagaatttttatcaaatcattctgaagtatgttatttaaatattcaaaagatgacaaagaagattatggaacaagtataaatggaaaataatatttggatgattggagcaacatggttacggaacgtgacaattggagaagaatacggatcgaaattggaacaatgatcacaccgaaaggttctttaaatttctccaaaattaaatttctttcgtatacttgaatgttttcttaagtcaaacatttgattactcacatttttcaagttcatgcatttaaattaacgtgctaatggcgagactaagaaagataagatttttaactactcgaatatacttttccggtaattacttaattaatattcaaggtcaattggaggatcatgatgccgaatgagtactaattgcattcatgttcaagggatcgaagttgatttgtgactcaaccctttgcttaaacctagaagagtggtgctatatgaaaatttgagtatgtgctataggataagcttttagcccaagttatgtatgtttttaaaaaacatttcgttgctttctttaactagaaaatatatgtatattataatatatctagtataccaaccaatcccaagtaaagtaaagcttattgaaactaaaccaaatcaacttatgaatcaacatatttttttctaatataatgtaacttcaaacgaaacaaaaaacaatcagaatttattttaaattaattgtttagataaaaatacaatgaaaagagtattatttaattgttcggatagtaataatactagtgattattcatttctcggcttagttttgaaaactgatcaaaaccaaaccagaaaaaaactataaaaccgtatgaaatactgaaaatcccaataggtatgtacataatgatgtatgatatatctgatcaagtataaggattcgagtatgcgaccatatagtcatataccaatcatcaaactatatatagattttcaaatattatttattttacagactcataattatgttgtctatggctgatcacatgcattgcaagatctcaaaaatatcatgtataaattcacgtaacacatttattacgcatgcatatatgctttgccgcatttatgtagaaggacatcatgttgagttcatgtttctctttgattgttacgtattttgtctaaatactgaccaaatattagttgtttcgttacgtaattatgttagttgaggttggagactgattttcagaagcaatttacaccttaattagtaaatatcattaaccgcagtaacatactgatatttactggcactggtccttcaatcttctaattatagttaaactaaatttgaaaatttgatcatgtcataagagcaagaaaaaaaattcgtgaataattctttcatttttatgggcttttagtattttagaagatagagtgaccattttatttaatgtagtcgttgacatttacacactatattaaaactcgatatagccatgtgatcatgatggatataaactcaaatcgatttgttaattgagaagccaatctaatttaattattcaacataaaaaataaacagtctatttttgtgtcttcagatggcaattgttattagttttcatcgaattgatccagccatctacatacataacataaaggcgcggggaaattaaacatacatcatatttgtagacttgtagttgtgaattttgaaaaagtaatacaaagtatgtaatggaaaaaatgtatcgtttctagacttggaaaacgttgggctttgaaccagaagaaggaaacatattgggtttctgaaaggtaaacgagacctacaaatacagtccttcataaataatgggcccataacatccatacttgtgtgagacagacgtttgttatgtcttcaatcatgaacatataattcctttttttcatttttttcagcaagaacaaataattcttaatcaacttacaactttaaattttttatgcttgttatatgatattatgttaaggcatggctcaatgtttttagattttcaaccaaggcctatattgagaatttgagagcttataactttttcttttcttttcaactgtacgataaattaaaataatgtatagagaggtttgcaggagccatgccttgcatatattcccgcccaattatcctgcagaattttctccacgtgacattacagtaaattccaacagtgcatgatagataatttttgtttctaagtttcttctccacttgattgatatattctgctgttttatttaccgcattatacatcagattcaccttctttaccgaagtttgattacaaatttacaaagtatcgtgaaatcgtcatgggtaataaaatcatgacaccaacatactaaacttgaaatcttaaaaagcataaacagaaaaaataatattattatctgaatcaattgattaagttcaaaagaatatcaaactgtttatgtaaagagacaaaaaaaatattttctgattcagtgaattaagttgataaggaaactgatcaataagcatttgcatatagataacgtggaaactgagagtacaactttgttttgcaataattcatgcatgcgtcgctttatcgactaatattcgtacataacaagttgtactcacacaagtcataagtacattatcattaaataacatagactatggaatcaagtaacatttaggtcacttatattttaatgcaccgcatctaacgcgattagtcattaatacacggatcgtccgatctaaaataaaatttgtttttattttatatatacagtatataacctttctcattatttcttcttaaatcattacaatcatcacaaagccatcgcaaattagaagagatttaagatggccaacaacatctcctttccttgcgccatcatatttttctctatcaatattttcttcttaatcaagtcatcacacgcaatgccatcgtttaacgtccaaaggtacggagctagaggtgatgggagagcagatgcgaccaagtcctttttgacagcttggtcattagcctgcggctcacgggctcgagccatggtctacgttccccgtggaacatatttggtcaaaaacctagtcttttggggtccttgcaagaacattataactttcaaaaacgatggaacactcgtggctccagcgaactactgggatataggtaattccggttattggattcttttcgctaaagtaaaccggatctcggtttacggtggcaccattgatgctagaggagctggttattggtcttgtagaaagaaaggtagtcattgtcctcaaggtgcaagggtatgtttacatcaaaactagcggatttgatttgttcatttattagctagttatattaatttgatttaattataattggacatggcttcttttgcagtctatatcgttcagctggtgcaataacgttctactaagtggtctatcgtcgtttaatagccagaatatgcacgtcacggttcatcattcttctaatgttcggattgaaaacgtaagaattagggctccaagtggaagccctaacaccgatggtatccacgtacagtcttcttctggagtcaccattagtggcggaaccattgcgaccggtgatgactgcattgcacttagtcaaggatctaggaacatttggatcgaacgtgtcaattgtggaccgggacatggaatcaggtaactaggaattcaacaataatcaacttaaatgcgatggttgagtgccaattaaagcaattttgcttgtaaatgtgatgcagcattgggagtcttggggattacgctaatgaggaaggtgtgcaaaatgtaaccgttacgagctctgttttcaccaagacgcagaacggagtaagaataaagacatgggctaggcctagcagagggtttgtgaataatgtggtatttcgaaatttgataatgaataatgttgaaaatccggtgataatcgatcaaaactattgtcctaatggaaaaggttgtcctcgccaggtatataatctagtcaatttagcttaactcaaatcctaaatctagtctttatttaatggaatcttattatgattgatcaaacagagctctggagtgaagataagtggagtgacttttgcaaacataaaggggacatcaacaacaccaatagcaatgaagttggattgtagtggaagcaatcattgcacagggcttaggttacaagacattaagcttacttacatgagaagatcatcagcttcttattgtaggaacgcccatggacgagcctctggagttatggttccaaggaattgtatgtgaaatcatgatccatgattatttatttgggtttatatagtacatgtaaaccctaaaattgttggatgtagatatattctaaagtgatatttgtttgatgtttttataaccttagattcatccgaatttgaatgtggtgaaactctttggtgtgaatgaaattgaaaaaaaggaaaaagagagaagaaatcaatttgattgttcgcttatcaatgtgcttgtgccatatctgctttgcttgtgaaaatcaatttcgtaacggtaataggtcatataataacaagggataataaaatagtaaatttgatcccaaaaaaagtaacatcctttttctttttttttgataaaaggttagggttaacaaaagttccatctgacagatccaattgactcatttttattttatttgatggttaatatattggcatcacaaaaaaaataaaaaaaatacaatgttgaatcttaacttctctcgattcaatgatttttgtatcacaagggaaaaaataaactatgaccataaaaaataataaactgatagtgaacctgtaatgagagtaatacaagtattgtatgtttcatatcgtgtcgtgtgaatggtgtggaaaaaaaaaacaaaaaaacaatcgtgtgaatggtttggatgacgtgtctatataaaattggttgaggcttttaggttgactatgtagcaccgcaagattcggaggacggagggtctctttactatttaaccgctgagatctgatctcttccgttccgttatcacatggcacgtgccaattaccataacataaggctcatattatgatgaaatatatgtttttctaatttaattggttttgtttttttataaaaattattatccaagatggaacaaatgaaatcacttttgtttgagatcacgtaataaccttacaaaagttatccttcttacttgctctgttatcccccttaattctctgtgcatcttttgaaaataccttcggtctaaagccaacatgttcgaaactttgaatattgaaattaattacaacaaaataactaaacttattgatttggttcgctgcagaagataaccattaataattaagaattgagaccaaccgtcattgatgacgtatattaatatttaatcttccactttataactttttataggcatcgtttaagtttaactaaaagccaatacaagaacaaatcgaactattgatatctctaacggtgaaatgactggatttcggtgatgattaaatttggatgaaatgacactagcgacattgtggaaaatgttcctttgatcaaaggttccctcgcgatattggacactcaccctacattagattcatctgcaacacattcctttgaaatgtcgtcgttcttcaccattatatgcgctaattaaatcggtttctttctgatgagcaagaacctgatgatactaaaccttagttcttctgcaactaacctaataaattattattacttgctctgtaatgccttcttagttccctgtaaagcttttgataataccttccgtcccaagccaacatgcttgagtattcaaatcaaaaattattaattacgctagttggagaagaaaatcatttaagaattgagactaaccgtcattggtaacggtacggactacggcccatctccatttacgtaaaccccatctgataattattctaatacatgttgatttcccaaatggccatatatttaattatgttacatcccatgttacatgttgcttattacgtgatacgtaaacattggttgactttcagtattctttctttttttcctaagagtttttgttgactaacgctggtcaagaccgtaggattcggtggcgtttcttcttctacggacacgattgaatataagatttccatagtccacatgtcacatgccataaattatgcaacacatgaaacctgatccaatttatgtatattcttagataaatactggagtatatatattaaatataattttaaccgaagaacgatagaaaagtccatgggcactagcatgctttcttttattttattttgaaattacctatttagtactattgaaactaacatatacaagcgaacatggatcacatgcttactcgtttttagatcagcattatttaaggaattcacaactgcttatcatcatcacatgtgattatgcgaaccgtacatatcattcatttgaatttaatcaaacaatcattagctattataatttaaacgtacgtttactttttaaaaaatatccaaacataccactatctacacaattacatataaatacccgtcataaccgtttacgattattacttcaccctcacacttcaacaaaaaaacaaaacataaatactttacaaaatccaaaatctacaaagatctattactctttctctttgtaattaagaaacattaaacatggataataataagcttgtagctgttttgctgatgttcttttcaagtttcttgctgatgaaatcatcaacggctgcttccaactacaatgttgtcagcttcggtgctaaaccggacggtcgaaccgactccactaaagccttccttggcgcgtggcaagcagcttgccgttcagctgcagcggttactgtaacggtcccgagaggaagcttcttgctcaaaccggtggagtttcgaggtccatgccgcagtagaataacgtttcagatctatggaacgattgtagctccttcggattaccgcggtttgggaaattccggttattggatcttgttcgtgaaagttaaccggatctcaatcattggaggaactttagatgctagaggtgcttctttttgggcttgtcgaaaatccggaaagagttgccctgttggcgccagagtaagataaccgtttaactaacttttttaatattttcgtgggggtttttaatctgacatcggtgatgatatggtagtaagtttgacattggtgatgatgtttttttgcagtcaatgacgtttaactgggcaaacgacgtcgtagttagtggcttaacgtctataaacagtcaaacaacacatttagtgataaacagctgcaacaatgtaattgtccggaaagtaaagctagtggctccagaccaaagtccgaacacagatggcctccacgtccaaggttctgctggtgttaccgtaaccgatggcacttttcataccggagatgattgtatctctattggtccaggaactcgtaacctctacatgtctaaactcaattgcggtccaggccatggaatcaggttacgatctattattcttatttaatagcttggagagcaagattcaaaaatcttcttaatactgattattaaatattaattgtttgcagtattgggagtttagggagagatgcaaatgaagctggagtagagaacataacgttgataaactctgttttttcgggctcggataatggtgttcggatcaagacatgggctagacaaagtacaggttttgtaagaaacgttttgttccagaatctgatcatgaaaaatgttcagaatccgatcattgtcgatcaaaattactgccctagtaatcaaggttgtcctaaacaggtaaatttcttaatcgaaattgaaacctagcttcctacatatacaaaggaattctagaaacttgatttgattggcttgtatatttgtagggttctggagtgaagattagtcaggttgtgtatagaaacattcaagggacgtcgcggacgcaacaggctttaacgtttgattgcagtcgcagtaatccgtgccaagcgattagattgcatgatattaagctaacgtttaacggtcggtccgctacttcgacttgtaagaatattaaaggagttaaggctggtgtagtgatgcctcaaggttgtctttgatatataattcatggaatttgaagtgtgtttagatgacattacaccgtcatggacgcagagtattttttgccttctgtgatcgagttattttgttttgcgtcttcatccatatatatcttgaaacttcagtttgtaccctttttcgtacaaaatatatttggacctattaaagattcaagtcaaacattcgtttgatattttttttattaatgtaaagcgtatttgaatcaaaaatcaaaatgtttgtcccaagttcagctaggtatagagagatcaatgtatagttatactctaaaaaatattgaatgtaaaaagtatgaatacaaacaagtgagcatggacaatttacagttttaagtaggttggtaaatttactcaaaataaatacactgagctttttttttttgaagtcaacgtttgttgtggttattccggctctcctctacagttgacgagttactgtttttcttcccactctgcgacttgtatgagcttgaagaatctccatcgttcttcttgtgagacttagactggagtctccttcgctcttcttgtgagacttagagctcgaatctccatcgctcttcttgtgagacttagagcttgaatctccatcgttcttcttgtgagacttggagctcgaatctccatcgttcttcttgtgagacttggagctcgaatctccatcgcccttcttctgagacttggagttggtgtctccatcgctcttcttctgtgacttggagcaggagtctccatcactcttcttcgaagacttggagttggagtctccatcgctcttcttcgaagacttggagttggaatccccatcgctcttcttcgaagacttggagttggaatccccgtcgctcttcttcgaagacttggagttggaatccccatcgctcttcttcgaagacttggagttagaatccccatcgctcttcttcgaggacttggagttagaatctccatcgctcttcttcgaagactttgagttggaatctccttcgttcttcttcaaactctgagatttggagttagatggattggagtcgatcctaagatttttagccgagaagcagtgccgaacatggacccggtggcacacagtctcagtcgaacaacctccttgtacattcaccacaagtattgcttctttatcccgtgtgtcctcacaccaccaattctgaggaatcccatctacaaactcttctaatgtatggaactcctcatggtgaaccgatacctccactgaactatccggttttatagttcctgcagctggcattacctgaaaaaaaagaaaaaaagaagaagaccgagtcatcataacaaggcgagtcttgagagaattgtgactaaggattgatcgttttagtttggatacctcgagccaccgtgggaaaccgaatgatcctaacggatgtaactcaagtgtgtcttcgtcttctctcactgtactctgcccttcgcacaagatcctgaacacagcgttttccttgacgcatttgttggtgatgcgaagcacgaaggtgtcttggttctggagaacgatgctgttgctgctgacaattgtctctggtacataacgtaggtcgttgagcaacgctctgactttctcgttggtcttgatgattctcccaaactcttgtctccttaccgatctatcaacatgctcaatcttgacatggaatttgcaacggaccggtttgtgatcactctctgtcacatccatacaagcatcatacctatccataaccccccaaaacgaaattgttaaagacttttggaggatataaaagggtttggatctcagtagtgtgtaaggaaaatcttacaacataatcgaagcaacaacaggacagtctaaactgcactcagattctggactcgtacgcgtgtctctgaatattactctgtcacaccatgcaggaatccgctttttctcacccgaatcgtaccctgaggcagaaagcattgacaaaacaaaggtcaaaactttaatatgcgattggatgaaaccaaacacttgcatacaaagtgcggtttatgtacctcctaagccaggccggtgtctttcaaacttataagttggagggaatgtaatgatggcttcacgcattccttggaatactcttccagctttcatctctgccctgagctgatctttttctctaagccaatcgaagcttctttgtgagacaaagtccctagcttcatcatatgatataccaaagaggcggtagttgaaatcaccaaaaaatacaaccatgtccgcctcagctaggtcctgttttgtctcttctgtgttaacgtttgcattctacagaaaatgtgatgggtctaaggtaagcaagaaactcaaaccaaaggtgtaaccatgatcattagctttgtgttaaactagagaggaaggcaaaaggatgcttacatttgcgctctttgtggtatgagaaccggtagacacaccagctgcaaaagttcaaagtcatgaggtatacaggcagatggcttcaagaaagataagttaggtgaaaaattggggatagaaatataccggctggtgcattatgagcatttgatgaccgggtaaaggacattgttttgtatatgtgatcaaaatcagcatttctgcggtttacagcttctagatgagcagccaagtgacagttgatgaagcacataatccgatcaaagaccctaattctcaaacctacacctccctggtttgatatacaaaaataaatcaggtggaatgctgctatcagaacccagaatgatctacattgttggagagaatgaaacaaaaagctagatgcaatggtaactagagtatttagaaatggatggtcataaaacttaggtaaagggaataagctcaggttttaactttctttttcatcctgaagacaaagaaatatttaccttgtttcctattgcgcgtccaaaaccacatggaactgctgcaacatcaatatcgcctacatgggttctcagattcttcctcaccctgaattgaaaaaacaaaaattcaggaaaacatcaaattacatatatagcagcacttgttttattggataaggtatctcatggattcacaactcaccaaagtgaaatgagcaaaccagctaactgccttgatcccatgcgttcaaacactgctttttcgtctaaggttttccctattgtgtctatccagtactgccctatcgtactcccttcgtttcctcctacctaatacaagaccaaaaagaggtcaagaatgacataaataacgcattcaaataaaccttttcatgaagaataaagagtcagagttcttgttttcaactattgtctcaccgattctttagcagctgacattgccaaaaacccagcacccatctctacttcttgcaagcctacgacaagaataccaacatctgatgctacagagcctaaccaagacataagcgcatcatgggaagcttttccctggccaacattccatgaaccagtcagaatcctaacactgtctgtctgagcatatgtccgttctttttcagccagttccgaccttattatcccgtcaagaggcccaggagaaatcacaggccatccacgtataccaccatgagtggctaagctgaaaatgtagccatcggctgctgccatcttaatcactgcgttattatgtgcaacccatcccgcgattagattaccttcgagatcaattatctggatgtgaccactaacataaccaatgtatatcctttccccgaacgtgcagaaacacagtacagcacattgatggtgacggaaatcttgcaaccggtttccatttccgtcccattgtataagcaatccatttgtgcagccggtccaaatcatgccatccccggctaaaaccatggcttctgttcttttggcatcttcataagcccctcctcctcttgttgcaacccttctaacagcatccgcagctcccattatagcattccttgagcgttgcaagaatccatgcggtttctccttcttcgaagtggaagcaattttggccttcatctcatcttcagcagcaggctgatcctgccccaatggcatgtcaaccctgttttcagtctgaccttctgagttgaacactttcagtaactcttttgtacgaccatccctgcaaagatattgagcatccataagaatatcacatcaaagaagacacaaaaagatcaaaacttgcaatcaggagctcaagtatcaatcaatactcaccacaaggagaaggtttgaagctgagcagcccaaactttggatcttacattatcagctaacaaacacttgacttcagaggaagatatattgcaagtcccgttgacagtaacttgagccctgagatcaatccctgacctttccaccaacaaagcagccatatgcttctcctccaacctaagcgaaagagatttctccatagattcccaagtccatatctttatcacaccaccttctgaacatgaccacaaatcgcctgcattttccaaatacaaacaatgggtttcagattgaattcattacaagactatatataaagtatatgaattttttttgaggtagaaattattaccataagaactcatgattacggaattgacaggacccttatgagcttgccaagctagaccttccttgaaaggagaatcatcaccatcatcaagcacataatccatcttccaagaccgaatctttccatctttatgaccactccaaacaagcctattcccattatcaaccatcaaacaagtggtgggagaagtactagccgactcttgaaacggtgcagcatcctcatcacctctctgtacacggccgcttaaaccacaacctggctcaaaggcatcatcaaagttccagaatctaacaccactctcttgtccagcccacaattgcgtctccgtacaagcaatgttcctcaagaatctcccaacctgagtctccttcaacggatgtggtctcaactctaaacaaggaggacgcgccgagtgcaaaggagaccgcgtcgggactttaaacatcccaacaccgcctccggatccgacgaattcaggaagaggttgaaaatcttctccgatctcaggctggtgcaagtaatcatcagaatctcctgtatctcctccggtgaaagggaaagatgaggaattggtggtggtggcgtaaggatagaactcgtcatcggaagaatcgccggagataccacaaccggagacgatttcagtgattttaggaatgtcgtcgaggctgtgttgacgttgacggtggtgacctttttgaccggtggcacgaagctggtggctataggaatggatttttcgaggaggaggaacagagctcatggcggagagagcttcttcttcgtcgtcatcgttttcgtcacggtggttgttgttgatgatatccatggcgaaagattgaggaaagagaagaggaagagagaatgagagaaatggggagaagaaaatgtaagagaagaaagagagagatggagcgaagtgttcgggagaaacatggcgagaagaagagagtttgttgcttctctagcttcttctccatttttcatggaagatttctctgcaatacgctccatctctctttgccttaatttatcatcttcttctttcgtttttgtattatttgagtgtttatgtctaagtgtgaatgtaataacaaaagagattcattttaatcatatgggctaccaatgtattgggcttttgagttgagaaaaggcccaataatattgtcggacgttgattccgctgcccctgtaatcagtgtgtgttccttcttgtggaatttagggttccaaagatgtctaacgtcacgtcgaagcaagaagccagtgaccccttgagtcttacggttttggttgatgttttgcttcttccttgttagtcatgcaacggataatgactctgttcattttggttctacatgctttgggttaaataacttaaattgcaacgttaaggagcactttttttgtgggtttatatcattttgcttgcatatctactatacattcacctataactccgtttattatgttttttgtttgtattattttagttttaagtatgataaaagagattgtttgataataaacattattgttactcataataatcatcaacattgaaacatacatagagcaaataaaggaagataatcattttactctttgtagatcacacatataacactcttaccaaacagtaagatctctttcttagggatcaattgatcttcttccaccttcccagcttctctttgccctgtccatttggtttttatttatcagatccacataagatagcacaactacacagagatacctatttgccatgtccatttctttttagtgtttcatgtagccccaaaaaagtcaatatttatgacacaattcagtttagaaaacctattaataaacaaataaatttattataaaaaaaactgaaagaatttttttggttaaacggtttaattaattaagtagtatattaattgaatgtataaaattatctaaaaatgaaagaatgtctagtacgttgaatataagtataatatcgcacgatgtgagtatacttctattgtaccttacgagttggaatggcgtgaggattctcctcgacagacactgccttaaatcctataggcaccaacacctcttcgaagctgatccacataaaacacacaataattaacatttaagtttagctatatccaattattcatatatataagtctataattatgtataagagaaactgagggattgattacatacgtagagacatctactttgtagggaggtccaccaacgtggtcggtaatctaattaatataaaggcaaaagtattaatccacttagtctttgattatatatagctaaattatggaatatttacccaaaaattaaaattattaccggatacatgagagttatgagttcgccgtcaggttttaagagttcatacatagatttagcccatgcaggtctcatctccggttcaatggcacagaagaacctgttaataattactagttaattgaattttcgttacctttttaataaataaaacaccttagcctggtccttcacattaatgtttctaaccaaattttttgtttagttacgtaatgcaaaccttaattatgttttcaattataagttaataaactcacacataatcgaagatgaggtcgaataattcagtaggacgccacgtgaaaacatcttccttcacgaacgaaaagtactctgcctttggtgaggagccgtaagtctatatgtagtcaacataaaatattattaattttcagtatctaaagacgaatacgtaagaaagtgagatgattaaccaattaacctcattagctttcgcgagtgcgctttcggaaatatccaatccaacaacgaagcgttcaggacttgccatcgcaacgacgtcgtgtccctactcacattcataacatatttattcacaatgttaagtaacaatcatttcattatgaaaatgtttcactagggaggctaaccaaataatattggttcaatcttaattaagtaaaattggttcaatcttaattaagtagtgaaattcataaaaggccaactggatgattttaattcagtttaaatagttttttttttctaattacaaataatatttttacattcacatcttaaaaaaccaataacaaaactgaagagcaaccaaaataaatgaagaaaaactacaccaaaattaaacttcctttaagaaatgtaaatgaagttatattgcgtcttcataaaaaaaaaagatgttgagtccaaaaccgtatcatactaattcaaactagattcggtttttatcacaaaaatctgaaattgttaagaatatatttttctatattaaaattttcattttaaaaatagaattcaaaccatatatatataaccaaatggaaagatagagagagaggtaagctagaagaagactgactccaccacagccggggaccagagcacggccaagtgggagtgaggaagtgtcgacaagatgaacaatgagaggtgtggctctcccttggtcccatggtgttatctcttcttcccaacatttttcccatccacctgtttataattttatttagttacatttcttatttaattttccttttgtttagcttccaaaatttaaaattttcagaatttttgggtccatagatgattaaaatcacattagtgatatatgagtcaatcttaattttaagtagaagattcgttaaacttaacaaaatataactttaatgatcggaaagcacttgattttggttagtgtgacaaggcgctatacataatcacgagctctgtttatatatatggaccaaaaacctaaatccccgttaatggtgagaaaagatattgagggaagaataaatcaccttcttcaacagttttgtgcaggaacgtagcaacttcttcaggagttggaataacgtttccaccattgctctgatctgagttttgttgttcttcagccatgtttcagggttggtctttctttctcgtctttctattaatgacactttgatattttttgggggtcttgaagttgtggaaagctataagcacatgatatctatctatatagaggatagcaaattgaattactatattcaatttataaaacaataattgaattgtgaattaaaatacaataattgaataaagtgactttgtataaagctatattattgtgtgtttcaacctctatactttgtgctcattttgtgtgttctctcattggaacacgtagctacgttagaattttagtccccaatcatatattggacaatttaactacatacattatagcattttggtagacttatacctttggtgtttcatatagagaaaaaacaattaaaatgatcattatagcatttttaatatatctgacattcgaaaatttaaaattaagtatattgatgtatttataaaataatttttagtacgaaacattattttaatattcccgttttacatttcatcagaattcagaagactatatatactctatagtatcaatttgattccattattataatatataaaaaagaccatgacttatgacgcatcttatccatggtatgaaaatcagaagcaagtggaaatagtggccctagtttcactcaattattcaccaatttccaataaatagttggatgatttagatcatttctaatgcctatttttattttattttcctattttaaaaataattttatttaataggaaataaaattgattttactctaatgtattgactctcaaatagagttacctataaaacagagaaaaaaatagggataactcagtatatagagtaaaaagtaaaactactatatttttttctctattttagagataattttattttaaagtcatacatttgaacaaaatcaactttctttcttttaaaataaacttatttctaaaaataaaaaataaaaaattttagaagaaaaatagaattgtacattgaaaatggtcttacctccaaaaacgactctttctgagatcacggactcacgcacgagtgagagtgattacaagggaccacctcaaaatttaatagaagcaataatccaagatacgacctaactcccatttacactggattgaaagtaagcacggcatcgtttttaaaacacaaaacgacaactgtttccaaatctgactgtgtgtaacatatctctttctctgtaaggtgtaccgatttaaccaacaaggaatattgtggatgagaaaattagacattgcgtctcattcaatagacactttatttattacaaattgaaacttttgatatatttatgtatttagacgtgtaggttatgactctattaggagaaccaacaatgtaaattttattacaatactttagagccatgagagtgtgatgtgatggtaatgaggtattatcacattgacttcttcttcttcttccatcggccaactttttacattccctaaaagtgaacttcaaactttaattaaacgtccttctttttttttttatcttgcttgtttcgctatgaatataaagtgatctgaagtggaaattatttttttcccggtcttgtatctggagcaagttcgttatccacaatagagatgacctcaaatatcctgagggaatcaaaagctcttcatagctacaaaacagttaaacaagtttgatatttaaccaaaactgagagacgttaagagagttatagagtcgtgaaaagattaagagaagatgaaactgatacttggtatggaggttccaagcgatcatcgaactgcataacataaaataataaagatacatttcagagtcccaagatatttgttctgatgagagacatgtttttatgttttttcttacaggaagcatcatatcaatgcatgttatgataagctctccaccagggcatattattttatgtttctttataaaagtcattgaagaagctgcgagaatgatcagaattgtagccatatcacgtggataaggaaaagaaactcgaaagctggcaaagacaattctttagaaacaaaactccacaccaatcaatagagtaaaaaactctaattggaaaggagaaactttattaaactgaaacacaatataacacagatacagataaggaacatgtgacataacaacaaggggagagatcgccaccgtcgtggcgtacgtagacgctggtcacggcctgataagcattcacctttaaacacatatatcttacatagagtatatgatactcagtttattcttaatagattaggattttacacacatatataacactgatcttactaaacagtaagatatgatctctctgactctcccttgaatcagttaatcttcttccacctcgcaagcttctctttgccctgttataatacatccgaaggaattatcattataatgcgatttgaacatgcaactaataataaaacacaactcacaagcatgtttatataccaaaataaaatatcgacttatattttgatataacatatatgtcatctcgcacagtaccttacgagtgggaatggagtctgggttctcctcaacggacaccgctttaaatcctaccggaaccaacacatcttcgtagctaaactctcaaaagaaaacacacacacacacacatttagttaagaaagtatagtacaattatggattttaattagtcattaataatcttaaatgattttgtatatatatgacatattgaggggttaactacgtacgaagacaaagctactttgtagggagctccaccctcgtggtcggtcatctaattaatagaaaggcaaagtattaattcatatatttatatatcattgaatttgtatatggaacattctcacgacaaaaatatgaaataattaccggatacataagagttataagttctccgtcaggtttgaggagttcatgcatggatttaccccatgcaggtctcatctccggttcaattgcgcagaaaaacctgttagttactacattagttaattggattttcaattccttattgctaaaattatgttttcatagttaataaactcacacataatcgaagatgaggtcaaataattcgttaggacgccaagtgaaaacatcttccttcacgaacgaaaagtactctgccttcggtgaggagccgtaagtctatatatatataatcaacggaaagtgatttattttttcagtattcaaagacaaacgttaattattaggaagtgaggtgattaactaccagaagttagttattatgattaacctcattagctttgttgagagccttgtcagaaatatccaatccaactacgaaacgttcagggcttgccatcgcaacgacgtcgtgtccctactcacgttcataataatattacaacatacaattttaatgtacaagcatttaagtcttagaatttgaatccgaaaacctatcataccaagttaccaactcaaactagattcggttgtaatctccaaatccttaaatatgttctaaactacaaagatataaaaactaaaaaaaaagctcgaactcaaaccaaaccaaaatggaaagagagaagactaactccgccacagccggggacaagggtacggccaagagggagagctgaagagtcgagaagatgaagaatgagaggtgtggctcttccttggtcccatggtgttaccccgtcttcccaacatttgtcccatccgcctatatattttataagttacagtaaaattttctacaaattaaattatagagatactaattatattgattgataaaccaatcaagaacatgaaaaaaatgattagctgtggaactattttatcgagtattactttctagaaattttacattatatgtattcctctttgttttgttttctaccatccaatctaaaatgaaaaacagaatgtcgatttttttgagtattgaagataaaaacacactttaaataagaagtaatttagagatacatatataaatgacatgatcagttcagtccttactaaatgattttgagtttaaaatctatttaatttaacagaatctgagtttatatgttcagaagatttaagcaaatgatttttcttagtgcgactcatttatcaaatattcacaactttttcatgtagaacataagacgtatattatagtcaatcaccttctgcaacaacttggggctggaatgtagcagcttcttcaggagtaggaagaatgtttccaccaatgctataactcgaattttgttgttcttcagccattttgagtagttgtgggaagcttcaagcacaagatatctatttatagagagattaacagattaattaatgaatttaacaaaaacatattaaacaatgactgaataaaattaattttgtattgattattattgtgctctttcacccaactatatacatacttttgtatagagagatatttgcatagtcatattctttaatattttgcaccaaaaaagaaagtcattctttaatataaaacggcaacgtctatcacaaatttaacgacaggataagttggacaacgcattagggtaagctaaacaaattcaaagaaatatgaccagtgggctttcttgggcctattatattttctttcaactttttgtcaactgttcacctactgatagcagcctttgaattctgaaggaatttctgtctatgccatttatactaacgttaacgacgactatttagacttttgattttgtttctaattctgtgatttgaacaaagaaacatcgtttttttttctttttatctacttcgcatccatgtcagcaaaaattaacggtttcttaacaccgatcagtgtatgagtttgtcggaatcggaagtttatggaaaagatgatcttccgaaataaagtaaagggttggtgaaaacctccacctgctcttatcattagagaactccatttttagtatgaaaatatattggggaatggtgtaaggaatatatccaatatctatatttttctgtcacaatatctatccacgatttttacacactaatttgatttgctaaaatgttcacaagatgtttttggctaaaacatcactaagtttgataccaaagtgagcatttagcggtcaattacaacactatttccatttgctagtggtgaacattcttatctccaaaacagagtatggcataacttccaatctctctcgatttaaaattaaaagtgaaactgccgacattggtttataaaacggataacgacaaaaatatatttgaagtgtgactgcgttgtcttacacacctctttctccttaaggtatatgccaaattcagtaaggtatattatggatgaaaatttggcatataccataaagagaaagggacttgtaatttcacaacaaagtcacccataaatgtttgtttataaggtatatgcaactacacatataattattaaaaaactgaaacattggacccatttattcatctagacgtgtaaatagtacactcggttcttactataggagatccaaaactgtaatctttattgatgtatatagagagccatggtatagtgtgattgtgatggtattgaggatcattacaatgaattcttcttcttccatctgccaactttttccattccctaaatattgatttcaaatattaaactttttcttttaaaatctttcttgttcacaaagaaactagagactgtttcttgtttactttgcgtgtatcaggagcaagttcgttatccacaatagagattacctcaaatcccaagggaatcaaaagctcttcatagctacaaaacattttaaccaaagtgagatattaattaagagagttgttagagttatgaaaaaggttagggtccaaggagaagatgaaaatttaaacgctgagactgattcttggtaaggagacccaccaacgcgatcagctaactgcataacataatcaataaagaaacatttcagaatcacgatatatgtgttgtaatgagagagatgcttcttacaggaaacattaatgttataaaagctcttgcatacggtttgcccatatgttatgtaaaaggaaaccaatgggccgaataatattaatgggcctgattaaatgggcactatatctaattaaactatgctaaacatgaaacgttacgttttcgaatcacacacaaactcagtgaggttcgccgtcgtcggagctcatggatcaccaccgtcgtttacacactatcaaaatcctaatccgaaattcttccaccacgcttctctttttcaaaatcgtaccaattttactccatcgctccggcggtgattcgcgagctctcccgtatactcccttcttctgttgtcggaatttccttaaattcttcggttagtcattactaatttcaattgatttcggttaggtttaaatggtattgaaataaattagaattgatttgcggttcggtttacatagagaagaagtaacaaacaaaatattcacgcgatggggattttggagacagatgcgtcgattgaaaaaagcgtgttttggaaaggggtacacccacagaattgctctcacgtgctcaacgctcactttgtgcgagtgggtgtgaaatagagccttctgattggcttagaaactctaaaaaaagtgaaatagtatacatgttgctagctcctatatgttattatctagtttttgaaagttgttttttttttttagttacgattgattctagatgatatctgatggtagtgataattttagataactataaagttcacatttagtggtggttggtgatttttgatgacttgaagctctctgcagaaacgcacttggacatggaaatgttacatctgaaccccatatagtgcttctgctccaatgtcatcttcaactcttctcctaccttcaagtatgtagtggattaaaaacatcggttgttcagcattttagacccccaaagtcgtcaaaaatgtctcacccttccagttctatccatgaggttattacaatatatgattgcaagttttatgtttttaaaaccatgactgccattatcccattcatgtttctgttttcttgtacagatgagcttctcgtatgagttgttgtttgtgaaactttattgtcacccatttggcctagtgaacttagggaacatatttaagctgcacaccaaaatcatttcactgctcttattgaaactatgtgcaatcttatcttgatagttggattttcaggtagaaagaagagttggtgttttgcttctgagtttgaacacttaaaactttttaaaggctacattgacgaggatgaagaacggcacaaatttggacacaaaggaggtaaggcctgaagcttatttaagccttttttggacaataatgagaaatttaactgagtataagattttgcgagccatcattggttggcctcactttcatctaaaatgctgcttacttaagagtttctattcatttgcctagctaaagttgaacaaaagttctggtggctcgcgaggaagaagtacaacttcttaagaatctttcacatccgaacattgttgtgtgttggcgaatccattcagctatttctcatatgtttaatgtctgttccacatgcattcttcttattatctttgtttttgcagagatacttgggtactgtaagagagagtgattcgttgaatattatgatgcagtttgttcctggcggatcaatttcatctttgttggcgaagtttggatcttttcctgagccagtaagttctgactgtacctgaactttgaatctttgataatccttgtgtttgagcatcacagtcacaggcgatgaatgttgtgtctgaacctctttttaaataggtgagaattatcagaaattgtagacatatatatcaggccgagtttgttattctcttcatatgagccaagaaatcaaaccattttaagttataagaggaaagaagtatacttgtagtcgaaaatgaggtcaaatttttcggttggctcccaagtgaagaaatcttcttccaaaaaggagaaatgttttgcattagacagtgaagagaacatctgcatttgagagttaaacatcaaattttcaggttttattcaagcatcaaatttagaacacaaacctttgttgatctttctacagaggtttttgaaagatcgagtccaacaacatgacggtcagggtttgccatcacaaccacatcataaccctgccaaaacacctatttttagacaatggaaatcttacaagaaagaatcagagtgtgacaaaaagaagtagaaatcaaaggactaacggtgccacatcatggaactaaagctcttccattaggcaatgaacccgtttcgcagagctgcacaacaatgggagttgcttctcctaaatcccacaatgtttttccttctacccatagcttttcccatccgccttaaaaaaacaacaaaaacatgcaacaacattagaaacatcataatcgttatcttcttgataatgcattcatatctcattataagagtgtgaaaaatattcatcagcagtcatttaaaatcgaaatcgatccgcgaaaagaaaagaaacaaagttagatgtgaagatgttaccataaggctctttgatctccattggtacctagatcactgagattagaaacagcatggaaagattcttttgcttacagctgatgtattgcttctttgctgagttctataaccaaacttggcatattatatataaccagttctgctttagaatttactacgacgtagaaatatgtttcaaagcaataaaatctaaaagagtagatgcactggatcagggaaaaagtcatcaagacttattcaacattctggacaattaagaacccaaaaaaagattaatcaaacctaaaaaaaacacaaccatctggtgaacacaaagcaaagtagcaaactataattttgcctttgattataaggagaaacgttgaatatcatcacatgtgtttacaaatactttttcagattcccatctctttcaatatgccctacaagtttaatttctcagtgacaaattcacaaaacatccagatataagcatatgagtatctatcacaaatcacaaggtggagtgaaatgtggaagatttcttccatcttccaagcttctccattccctgaaattgattccaatgtaacattatcttccaattattaaaccgaaactgaaattctccattgagttatatctaaaggcatatttgaaagttcatgttagtgttttaccttgcgtggtcctacagcaagttcgttatcaacaatggagattgcctcaaaccccagtggaatcagaaccttctcgtatctacatattgagagattacaaagtgaatatcaagcagaatatttcagtaataatgctcttagtaaaagagataacagtagattcttactcagacacagatacttcataaggaggacctccagaacgttcatcaatctgcagaaggacacattgtttttcagaaactactgaaatgtaaggaagcggatcagagaaaagagagatgttatgattctcacaggaaacatcaatgttataagctctccaccaggtttcagaagtttttccattcgttgtgcccatagaggtctcacgcccggttcaaaggcacagaagaagctgcgagaatagtcaaaatgcagtgatatataagctaaagtcacatttgtatgaaccagaaacacacatctagactgtttacatacgtataatcgaaaatgagatcgaatttttcagctggctcccaagtgaaaaagtcttcactcaagaaggagaagtattttgcatttggcaatgtagaaaacttctgcattgagattaaacaaaatgtgttaaaacgtactaagtttgaaataggtatcagaggcaatactccgactcaaaacaagcattgttaaaaaaccaacaatgcaaggctacatatatgaggacatgagcatgtccatctcatttccaaatcagaactattcaaacctttgttgatcgctcaaccgcagttttagatatatccaatccaacaacatgacgatcaggggaggccattgccaccacatcataaccctacaaaaaccataacatcttacacttagtaagacaatcagcaagtcctgcaaaaaccaatgacacaaggcaggtgcatgtacaacagaacagatctaacagtactactactcaatggccacagtactctagcaggaagcaaaaactcaaagaacaaaatggcttcaataacaagaaagctgagtactttaactttatatcaagcaaagaagctgaagcaagtttgattttcaagtgttgacttattaaaaagagacaaaagagtattgaagaacatacagttccacaaccaggaactagagctctgccattaggcaaagaaccagtctcgacgagatgcgcaataaccggagttggttttcctaagtcccatggagttgctcctgcttcccaactcttctcccaaccacctaaaccatttcacataatgcttcagagaaagaaaaaaaaaaaactattgatctgagaaatttttgggatttgttgtttaccagaagaattctcgctcatcaaccggtggaataaatcacgggacgattggagtgacgtagctttaccggcgttttccatcggatcaaccaacgcaaacaaatcagcgacgactaaagagtgaaaaaatgtttctgcgtagaaagctaatcaaagttttgtgctttattatattaaaagtcatattttttaatgggaatctaccggagctaaattgttttgttacagagatgtgaactgacgaatagtagttgagaaataatcctataaaaatagcactgatgtgtatcaaaatttagacaaaagaatataattgtggttgtgtgtgtttgtttaatcaagattcataatttacaaggaggattatcttctctgttttgtaacgagaagaaaataaagagtgaatgtgaatcaatcgaggtagaagagagtgacaatcttgcgcagatttttggcttcttgacatgtctccataagaagcttactgtcatgaaacgcgaagcagatcacttgttgaacttgtgatatgatgtccatattacacaacctgcacataaatatatattaaccaatgaggttcagattccatcttcaccaaaggtatatcaatggttttttattcacaaacctgctggcttctaacaatggcaaatggtcattatgtggcttttctaccacgttttgtacctgtaaattgaccatagcaatacagacaagagtttcagatgtaataaatcagagacgcaacaagattctgacttttgaacatgcagtttttgcttactttagacaatagttcttggctctcaggaggttgttttttcaaactttggggtagaattactgtaagcagctctggtctctctgctctcaatgcacctctgatgactgcagcattagttccagatgcacctgatgtgtatatatgatttttctgcaagaaaccgaattattcgagagatgttttaaatggatcggagtcaaacacaagaggatgaagttctaatgacttacggttataaccatggcgtagctaagtatctcaatcagttcttgatgcatgaaacccatatttcttgtcccaaagaagccaattgatctaggaccttgctgctgtatcgccaatagctcctgtcgatttaaacatacacggttacaacaagctaaaagactcatgatattccaaaatctgccaatcaacaagtatagtttacaacataaagcctaaagagtgatataagagtttaatgtccttcatgtaaggctgcgtgctgaatttgcagagaaactagtcttacttgtatgtaatctacatcagcagcgggttttagctctgacactgcaactgaaccagatccttcaacgatagcctgtgcttgagtcggaatcctgaggccagaatcttcatccgattcaagcacacattcaatgtggtcatctttatctgtcaagatttctgtgttctcttgatttctcatgtgttctggtaagcactatacacagcatataagaaacagccattaaacgtacatcatcagagaaaagccggaaaaaacaacaactgcaaaagacttttgggaagagagacacaaacacaaactctcaagcttacactatcatgatgaaacttgagaaactaaatatcttttacttttacaaatcaaagctgatgtttcaaggagtgcagcaacatgcttttaagaccaagaaaacccaattaaagtgaaccagagaaccaactttgagacagaaaccaccccctaaaacaaaatctacaactttgagacattacgtacatgataagatacaatgtagtcttataaacactaaggactcaaagacacacatacaaccatcaaaagctttgatatacaatgaagtttaaatagagtgaaatcttgattcttgaataagtcagcaaaggccattaaaacactggaatcccacctaactactacattgaagacgaaagcgatagagagtaaataacacctaggataaaatttcaggtcgaaatctataaatgggaagaaaatacaaactttgatgaaacaaaacatggatcattctaaacacagtcctacgaattcaatcactttccgaaattgatcaaactaatgctgatcaagcaatttagcacaaaaactcaatgagaattagcaaacaatgagagagagagaatcaaacgataccatggtaacacaccgcgaataggatctgcatctcccagagaaaagctgcgactgggaagaacaacaggaagaagaagacaatcggcgtttgaaattagggtttttcgatctgaacgacgaaggagcatggaaagaatctggaggaggaggaggaggagaaatcagagaagttgtaagaggaagaagtagcctcagaggtagagacgaactcatctctctctctctctctctctctcacaacactgtcttctttattccaatttctcttctctccacagatatttgagagacaaatgacaaatctttcagttctcgattcttgtcggaactctttttccccgtcggatgtgtatttggtcgggttgaagaagaagaagataaacaacacaacacacagaccaaatgcatacaaaaacaataacggaggaaataagccaacaatacttttttattaatttttcgttgtgagaaaaatattctattttagcataattttaatattagtggttaaaattgatttgggttaaaaagtgaaggtaaaagcaatgtacctttttatactggaaacgaaaattagcaacatttatactagtctcacacgtgtgaaaaagatcatttaaaaaaaagctacagaaatacaattgcaattattcactctaagcttttgtatctactttgcaaaagatttgatatataaggagaaacaaacaacttttatgggttttatagagagattaaagaaagtgaaactaagagatgatttattcaaagatttcatcaaatgtcccatcttttcttgactcggaacatcaagactgatgatttgatgtcatcttgtggaacttgaagcatgaactggactttcatcttcattggtgtcgttttcacttttccagcttcatcaccaacctgccacggttaaaaaatgagactcatgcatggtcacaactcactcaaacaaaagcttgctcaagagtgatggtgtcccttagatattattagatggtagatgcatcattaggtacaattgtgtggtgaatgaatgttctatatgctatagcatcttactcgtatgactcggattcgggcttaagcgagtaaaaagattacgctgatgagagaagagagaaaagaaaactaaaggttgatgatttacccagagagatgcccagccaaggcgaacatcagaatcatagccagcttttaatttgtagtctttaccatatgtgcgtttgtacacagcactccacatgtttgaatcaaagttgtaccaatagctgcatatatagtaatcatcataatattatatgaaactgattgtagcagatgagatgtttctaccagaagagagagagagtaagagagaacacaatgaggccactaacctcaacttatctgaagggctaaaccgccgtttgaatgcaaatgatgcagcattggaaggaagggaaatacttgggatgaaagacaatgcatcatcctgtatgagaaaggaaaatattttgatgtcagaaccagaagttgggggacgaaggatatgttcatgcatgtgcaaccttgtataagttattgaattgtagtaacacataaaaagcagagaagggattttgtaaaagtcaggaaccttataagcatatctcagcctcaactcttcatctgtgtatagagcggtacaaacaccattcataacttgacgtttgaggatcccattaacagataaagttcttttctgcttctcctcctcctcctcatctttttcttgtaacgaaatttcgccaagtgggaatttaagagttgctcttggctgcaggaagagtaaaccatatgggattataattagcatttaaagaaaactcccaaccaagcaagaaaacaatttaccggtaattgatactactgcagttgcaaaaccaaatagacaatgtaagagatggccactcacgtaaccaataggcacaggtgatgaaagctccagagagtagccaggttcagtcagatttgcctccatagcaacttctccttgttgtgcctgtaacaacacacagttaaaccgataaatacattagaaaaaacccaacataatcactagcatacaaccgaaatccaaaactataaaagaaaatgttaagtttcaatagctagtggtagttagttgcacagcaatgtcccactcagaaacaatcagattctatcattgtgagatgctcaacagaaaaggaaaccaaaaccaatgatataaggtaccacaaatcctatcaatatgaccaccattcaacaatcaatcacataaattgttctgttccatagatgacaaattacgcccaatttgatcatttagttgacaagaaggtttctctgcgcacagttcatcaaattgacaaagtgttccaggaaaaaatcaatcctttattgtaacaaacggtgataattaggaagaagtagagatatgtaccttaacattatgaagagctcggagctgaagacgcgggtgaacatcgagagtgctcttaatgaaagtattcttctcttcgacatcatagagaacagaaacgtgtttggaagtaaaagagacctgaggctgtgaaatctcgcgctgggaattgttctgaaacgagagtttaagcttggcaaggttatcgaagagcttacaagacactttgtttaagaaaaggagactatcgctgtcgaattcagatgtcacacggagttttggtcggttagcagtcttgagaaaggacaaggtagagcaaggcggtcgagacggtggcgataattccgaggttccagattgaatttgatgggttggtgaaggagaagaaggaggagggggagtggcgaggttagggttttgagaagatggatccgccattggaattggatttgagagaatctatcgcaaagtcgcgaacacgggattcaagtttaacaagtacaacaagacacaagtatgaaacggacggttcttgtttttcttactttttgataacatcacttgtctctctttattttcttttaattctttacatttcgtttattctaaaattcagtaaattagggatcgtttattactttattttgctatgaaagcattttattaacgttacttaggtaaatattcctcaattttttcgtttaattagttatggttagcacgatttttttgttcaagaatgtgaaactatactatacaatagtgaaaaatcgaataaaataacatgttgttaaccttttttttatttcgatgatataataatacaacatgatgatattataacatgataataacttaaaaacaatgatacctttgtttattagtttatgatcagatgaacagtaactacaatactattaatattacatttggataattaaccacatctatattgtaaagacaatatatatagcgatgtactaattgagaaaattttaattttatttaatacacatatttattctaacaactttaatgttattttctttactcttctttatctacgtgtctaactcattataacattttttaaagacatctaattcatccaaactcaatataaaaactattgaaatcacatggtcatacaaactaaaaggtgtatgaagttaggttactaaaatttatttggtcaatagtacatacaaaatttagatcataaattatactatccaaaattgacaaaatcacctcatagaagaggtggttgttgcaccattggatgtcgacgagcaaacatagatcctgtttgacgcagcggaagcctttcaggtagaggagtagactcctctatgtcaagaaaatactgaaaagtctcactaaccacaaaatcacgcctatcagtcacaagcttgttcactacctcgtcctcctcatcctcttgctttttcttgaaagcactaaaagcagtgaaaaacccctcgagaacagcttccatacgagcgggcgggttactctctctcgggcacagtccccaaggttgtactacattaccaaaagcaagaagaagctgagagaaaagaagcattcctctatcatttccaggattcctcttcagaaactgaaactctgtttcagtactagacactctatcccacagagcatcccaaaaatcattcccataacgcaccacaaacatggctgtgaacttcattaaaccaagctccttgcgcatcatgcctccttgagggattccaactctaaacaagacaaggacaggtggcaccctgagtgtaccctgagaatcgtgtttattcagaggatgatgcatcctagccattgttttgagtttgagttcaagggctttgttctcgaggtcagcaaaatattcatcacaaacaacaaaatcatgcctatcagtcttaatcttgtccactagctcctcatcaccctctagcttttccttgaaagaattcaaagcactgagaaaaccgtcaacaagaacatccataccaaccagaggatattcccaagcccttaatagatgactatacccaagaaaaagaagagagaaaaagtgagcccttgaatctcccttatccagaaacttgaactcagtatcagtagacactctatcccgtagagccaaccgaaaatattgcccataccgcaacacaaattgggctgtgaacttaatgataccaagttccttgcgcgtcatgcctccttcagggactctaactgtaaacgcagacagttcgtcgataatagcaacttgctccagagggttatactttaaacagcattgatcaactaggcccggtgggagaggaggaggagaatgaagaggaggagacttggtgtactcagcaattttttgcttgtaaatatggtgatcacgacctttagggaacacaaagctgcatgatggaatatcaaggccaacaaatctggacttcagcttctcctccatctccaacccgcctctggcagcggcaattgaaagtctctccaacataatacttctcagctcatcatcatctggacgtggtggtggagttttattctttgttttctacaaacacaaggattaaaaaataacatagagaagcgtgtattacacgtttcaaaatggattattattggtttacaaaaattgtctcaacaaactctaagaaacaccgtaagcacgtacctccatagccgtgacgccgagaagaagcggatcgagagaaatctggcagaaataaggcttattactggttttaggtttaccccctccccaaactggaagcgttctaggttttctaatgggcctttactatttgggcttattatttgttacgcttattgagttattgtcttgttattgggtcatttagcaaacagtgtcttattattggctctgagtgtataaggatacccaaggtcacaccatttaagtagattttttaaaaatatttaacttaattaattatgatcatatgttaactgttacttatacaataccttcttttttgtcagcagtgacaagataaaaatgtcattatttcattagaaaagcttttaggacaaaatattaactgaaattgctgtttcattacacgtacactatatgaggaaaatgtagtttttttgttgtttccttgtaagagaagcgtaattgaaaagtatttcgaagtaagtaagacaaatataaagtctgcaaaactagccaatccccatgggaaggataaatctctctctttctctcttgctctctctctatttatctccctttttgaccattcacaattccacatcacctccttttcaaaacagctctggatcactctgcctgaaccataaccggctttccccgtcccattgagaatcctctggtcccatcaggcattcgtggtccaggtggttgctgtttccccatgcctggttgctccatgttgttcattggattgttcgaaggttgtgttcccacttgatgatgatgatgatgatgatgatttcctcgcccattgtggttgtggttttggttatggctgtggttgttgttctggttttggttctggtgtggttgccctcgtcctcgtccctttcctctacctctgttacgcccttttctctgcccagccgctttctcattcccttgatcctctccctgttatgtggcaaagtttagattcatccatggataacaaagcagagacccaataacgtatttagtctacttactattggctgctcttgcatatgtgtatcccattccccagaacagtcatcagattgtttctcaatcggctgctgctcggatgttgtagcatcatcttcctcatgttctacatctgcatcatgtccttttcttcctcgcccttgaccttgttttggttccttcgtctgtatgatagaataataacatataagccaagtggaactgacattaattaacccagacagatgacatttttaattcacagaatgttctcaactactaagatatctggactcggcttattagagtgagaaaggacgggcaaaggcacagtgtgtttgtcaaacttaaaaccacatacctgatgctttagcatcaaccggactttaagaccgctcctccaatttcccgcttcacttaactcggtaacctgtacagtaacatgccttcagttaaccacattagcacaagaggcatcaaaatatatagagtctgaaaatatgtgtaggtgaggcattactgctctctcggctagctcaacaatctcatactcaacaaaagcatggacctataagaacatgtaaaagagacatcaattttgcatccagttaatccaaaactacgaggcaaacacaaagccgcatgggtccatctagttaccttgttactgaaaagcgtaccatcgcttttagctgctgatctcgctgcgggtggagcaccgcttccattattttgaggctggcaggtacggatgttcttcacactgaagacaaacactcataattttagaaaacctcaagtgtataaaaagaaagaaaaagtagattctaggttttagaacaagatgaaacagttgtgtaccttccaacagttgaaaaaatcttcatcaggttttggtagcaatgatcctcagggagattctcagcaacaataatgcgagactgtatataataatatttattagcattatccagtatacactatacagaaatataggaatagcaggaatgagtcaagtacctgaagctcttctatagccgactcagtaatcggacttatgcgtctcactttctttccatcttcactaacaaactgtgagatgactcagtcaaaagttagaacataaaatctcacgtataaaagttattgaccaatacacactaacataaagaactcacaagcttagctgagttctgtagcactgcggcaagctgagaattattgttaatgacagctttaattttcttgaacgacgcaacaacatgaataggcactgaaatcaccaattaagaattggaacaaaaagattattacacttttatgcaaaacgaactcatatgacttagcaaacagacatcatcttaccatatccttcaggatccttgcaaatgaatctcatgagatgatctgtagtagccaagttcaagtcactgaaatagtattcaacctgaaaccaaactggattagatttaagatcacatgtggtcttaaaagagtgtcaatgtctgaatctaatcacctgattcacaatcttctggatagaatcttcaggcaaaccagtttttgaatcaatagaaacagaagctccagtttcagtcacttgatcgttcttagattctctcttactatgatctctccgatcattcttctttgaaaccaaatccggttcctgctcaccaccgacaccaccacgctgctgatactctccgtgattcctcaccgggacatattgctgattctgatgacgattgtgatgatgatgctgatgaaagcgatgatgagggtggtgattttgaacaggaaccaagtgtggctggattggaacaggaccaagaactggagtattgaaaggaggctggtggtgatacatatgaagcataccgtgcggcggaggaggcgggataatcatcctcggaggttgaggcagcggaggagtagttcgaccaggaacgaactcaggagctccggcgttgagtcgacttaaggagagagacctcaagagtgatggatctgaggaagaagaagctgaagtagtagaggaagtagagtgggagtgagatagatcatcggattgagtaggaggaggagtagaggaatctagggtttgttgatcagccatggatgatgacgattgaaggatgatagatgaagaactttcccaagtaaagttagggcttttactgaagtgggaatcttcttcttacagattgagagatagatagagagagcagatctctccggagaaggggagagaccaaaagaggcaaaagtcgcttcttttcgtttgtttttggagagagcttctcgagtctcaaaggtcgtctcttgtcgtatatttatagaatgtgacttttgttcttatcgacaaaagaaaaaaaacttcacttgtttggtcttaaaattacaaaattccataaaagatgtttctcaattattattagtctcagagtatgaagcataaagcagcttcaggtcattcctaaaataaacagacagaagagtttcgcttcccacaatgttggattcaatgcttctcttggacatgttggtcgaatctgtttctgatggcttcccagaatgcaggaactgcgatgttatccggaacttctttaaaggatggtaagtagttcaagtctactatcacgtgatctcctgttccttcttgaatctgtggagattaataaagagacaatgtgtaagtaaatgagttatatataaagggtcttgtgtgatgaggatgatacttacaactacgtcaaagccgaagattgtgagatcaagcttctttcttagccaggtagctgcttctgtaactagctctagatcaatctcgcttaccgggttctggtttgcggaatcaacaggtaacgattttaagctgtggaggtaatggaactaccaaagttacaatctttttagtaactgaaggctatgtgttcatggaactgttatgaaatcttgcctgtcaaagagaattggtttgagaccattttcctccgctgatttcctcagactagaagaactagggatcgatttcttgaccgcgtgaaagatcgtttcccccaagacgtaaaacttaaaaatcctagatgaatggtccacatactcctgcaaaacatcggttgagaagtttttctatgcttgacatcttgatttaggagtgtgcccctagatttgggtatccatattacattatgacttacttggataatggcaggaacaggagtgttcagattcttaaaatcctcgactcggaagacaatggcctgtgagaaacacatgaaaacgaggaatttttttgttctgctgtgaaaagagcaacagatattgcgagatatcaaatctagatggaaagtatgagatattcaccatgctgtgagcatcagcaacaccacaggcaacctgtggtttcacaatacatggaagagagagtccagctcttgacaagttctgagccagatctggttcatcatagctgtcaatctgcagataaggaactctgatattaatttgctaaagtaaaaaagaaaagcatcaatgcgaaactggagaagttaagaggccagactaaaggtctcaagagataactatgtaagattataagcataaagaagattgacgagttgatcaaaatgagaggacttttacgaccttgagaaagcaggcacctcttatctttcgtcctgctgcaccaaggccctctaatccaagaagaatatgttgcatcttgagtcggtctacgactggatatatatttcgaatagggtcgactatggcacaagcattttgatcttccatatacctgcaaataccttatatcattatgcaaacctgaatggagaatttttaacaaggtttctcatatttgtgtatgatggtatctatacgccacttgcagatataactgagtgctagattgaaaacaaagaattgagaagcttactttttcagtttctccatgccggtagagaatgtaactgcaacagatgattttgagtcggagcagttcagttcaatggacaagatttcatcagttgctttgtggaaaatgatatcagcgtgtttgagttgagatgcaagagggaactcaaacatgaggggcagaaatatcaacccacatgaagtaggatacatgggtaaagcacccctctaagaaaatcagaaaatttaacatcggtgaacattacatatatatccatattactttcatgaatcagtaatgacctagagggtaaagcatatatacgaccagcacacagagagccaaaaactaagcaatgatcaccatatatataatacttcagagtcagattgcaaataaggatctaaccttggcaaagtcctctacccgagatggcttcatgatgtaagcaactattgcagcaccatcacccattgcctgttttgggaggcgatatcaaaagggtggtcaaaatactaatcggcaagatatacaaaccaaaaaatggtaatgaaggtgtaatatcaagcatctcgaactacatttttacactgtttagttctggcctacaattagtactttcttcaaacagaccagcttatttctcaactatgagcgtattctagtataagccagaactgcagtcatgacatacctttttgtttatgcagcaaatagtcattggcagctcctcaagactatggatatgaattatgttaggatcctcaagtgaatcgccttcaacatctagaaacccaaaaaatccaacaaagttaggtgcctcataaaagttatcagtacaaaaggaaactcagaactttaatgtagcaaactttaatgcctatctttttcctattagtgagagttcataaatcgaaaagatccataattcgaatcaggaagcatgtttaaacattcaaagagcaaactatttagacaataaatgcagaagctggaattattgaataagttatctcttataggactagagattatcttcatcactaaccgagtaaaacaactagctgactgggactaagttcacgcagtatctcttcctttctgcttgaagcaacatacagaatactaccgtcactataccatgctttgagagtatcaccaaaggtaacactcgtaagagacgtctctaaaggcaagcaattgatcgagtattctgctgccgttttcctcagtagatccacctatcacatgttacagaaaaatcaatctcataacaaagttaaacaattagacaaggcaaagatttgacttgaacaaaactctttgcttaaaacatagaatagtcatcacattcgtaggctcaagttgaaatagttagtctcaaaccttgttttccggaagatcaagtccatatgaaatcccctgcagaaaatcagtatgaacgataagtggaaaccaaaagaagaattgcatataaagttcaatcatttctcatctagctctcaattgaagaatcactatacaatttcactaattgaagacaaatctataaattttgcatgaaagggtttaatttcggaaatctgcaatgcagataataagaatcatggtttggaatttgagatagcaattcaaatcagtcgttaccgttcggatcatggaataacgaagcagcctgagaagcgacgggactgattctcgcagacttggcgaagaatcttcactctcaggactaaacagtacagattcgtcaagtagaacccctttcatcgttcttcttctctctcagctgaggaacaaaagaataaatcaatacacggtggcgatttagccgttaaacatcggaaaaagtgttgttctttcggtaaatgaccgatgtacccttgtttttgttggagcacgaaataaaagttgagggttaagtcggtaattaaagagaaaaagacaaaagcaaaagcctctccgtcaaagtttcgatctttttctcattttaatgtttgttgttgttcgtctctgcgcctccgccaaaaaaaaaaagtcgttttgaaatatcagatcaagcagatcggaaacagtgagagaacactgagacacgaagaaagagagatactttaggctttttggtcgaatgctcataggatgaatcgaataacttcttcttcaaatgcgcaaacgaagaaatttcctcagtctcagccacagccgccggagaaaaatgagaaaaaactgaaaagggagagatttccggtgaaccctttgagagatttcagtacaagaagctctggaagcagcagttgtagcaatgtgagtgcttctggttcaacttccggtgaagcatccaacggttgtcacaggttcttgctctctcattctttctcatcgtcttcttcatcatcttcttcttcgttgggagtttttcctcgtagaccagtgagatcagtagctaaaaaccccaaatctgctccggtagttagtaaacccttaattagaaagaaaccaagctctcttgaggaggttaagttgaaatctactcttactgagaaacctaatttgctgaagtctcagagatgcaagacaaatcctgtatctggaaagagaccaacttgtaagattaccatgaaaccggagaaagtttcggttttgaagaaacaatcttctgtttctagaaatgttaagcttaaagatagccaaactacgattagagtagatgacagtattgctcagagtactcctgtttctaaattagaaactggatctgatttgatttatagaaggaagagtgaagctactgatgatggtagactaagtagcaacagtagtagttatcaagataggacaccacctgttcaagcttcggtgtctccagagatacagtgtggatcgtctatgaatctgtctgcatcagctcaatcacaagcttgttatgctgctggacatttactctcaggtgttagtgataagaggaaatgcaagcctaaggggatactcactgtgggtgaaaatggttttgaggttggtaaaggcaagatactgaatgattctgatgaatttgatgaaggagattttggtaatgacgggagttatgatgatatttctgttatgcctttgcctgcggatgcgtcagtgcactggcttttatctccttgtgatgaggagaaagaacatgagaaggaaatatctgatgatggtttctctcagtttcagcaaattgttgagtgtgttggccatgagactccttcgccactatcagatcgtagtgcttcttcggatctatgcaacattagtagtggtagaagtctttcgcccatggatatatataaagagacaacgagaaggatcagttcttctctttctccaaatgaactttttcggttcagaagattcattcacctttcatcatgtgatggtgaagcttcagcattcgacacttcccctacatgtgagctagatccttctgagcatttgaaaggagacaaatcgtctcccttatctgttgatacgctgggaagtgagaatgttattcaaacacctgaatccaactcaagcttcgacaattattttggactctcatgttctcaagctgaaatccaaaagaaacatgatgttggttcagatttggaatcactgacaatgaagtttcagtcagccggtttgtcaccaaggatccaggcttcatcatgggagccgagccgttcaagtttcaacttcgactatttggccacatcttctgattctattgatctctcacagtttcagagaggtttagttgacaggagttcttgtcatcctcatgtaacactggataaagtgtcaaggacacatttgagagtagagcaaacaaatagccacatgcctgaaatgaaatcccaacagattacagatactgaatttgatattcaaaatcacaaagaaagtgctgcttctctgggaaaaggaagagaattgcttccatgctctgctgcagagtcaataagcactgatggaggtggtctgatttgttctgaggattcaaattggatggcatgttacaagaattaacttcctagaaagaatagttttagcttctgtttctttgtaagtaggtccacgttagcaagatacctaaagaattttccttctgttattgtgttttatctcttgttgtctccacatttccactgtaaacagcatttttttatgagcgcatcagaatatttgagattctttaaccattgacttctctgctcaattcatacagtacaagagaatgagattatcaggatcactcagttacttcagcatctttcaatgaaagtttgctactaaactttttctgataccttccctttgcttcagttttagtctctatacagcctttcggtaaatagctatactattttattgttcagccttcaaaatactagagaaggattcacacgattatcggatcgctatattcttgtattttggtttcttcttgcaaaggacattgttgtttctcagtatcttccaataaaagtttgatgcttcatgatacctttcctttgttccaggtcttggaaaaaagcaaagtatacaaaaggagaaacaaagctaaaaagggttcttttaagcatctcttacttatttcgtaaaacactcatcatcttttaatgtaatgttgatcaagaacccattcatactttctactttccacatattctcagctttttctgttgggatttggctttgctgagtatatatctttttgttatcatctaagttcctcttgacaatactgaaaagttatcggtcaaacaatctctgaggggaaatgtctgtttatgctgaaacagcatatggaagaaggagcaaagatgttgatgaagctcgcagaatttaccaaccgaaacagagtgacatcaccggcaaaatcatcatctttatccttgcagggctttgcatgctgctcttcatcttcatcgtcatcggtttctttttcatagccaagccactgacagcaagcttgacatctgttgaagtaagaaacctcaggtacaacaacaatacatcatcatcatcatcgctttactttaacgcaacactggctatggaaatcagaattgagaatccgaatctcgggttcttcgagtttcccactagtagaggagaaatcttgtacaacggtgatgttgttggtgaaatgaggattaatggacaacgagtggcttcatttggtgacttaagaacagaggttagtgcagaagtggcttacagagggaatcagaaatcacctgtttggttgaagaatgatatagagagaaggctaataatcctcgagaccagagctaaactaagaggtgaagtgcacttgaaggacttgaacaagagaacagtgaatttgaagtgtttaatgcaacttaatctcagtgatgatgttattcatcgtttgtggtgtaaatgaaacacacttaggttgtttcatacttttcttgggtaattagtttttcttctttagctatattagcatatttataagtgaatatcaaaatacttaggtttcttttttcacaaaaattgatattaaaatatcagtttataccaaaataaatctcaagttttacagtatatcagaaatttaagtgtgtttttttctttaggtcttatctttctagttttgtcactttctttaattcttgtcatcagataaaaatgtcgcttttgaataattcaatatggttagtgtttgttagcgtaagaaacatcatcagctttgtcgtcactcttgtctaaacttctttaaatttttttactactaatctacttctttaagtcttgtttatttatattccgatgacttgaccgtctttagttttattttcttaaacgaaaaagcatctttaatgtggtggtaacttgaacgttgagacaaattctaacaatactggttagggaagtatcaatactttacttcgctatgtacgtgacaacttctcatcatacatttgatgagtttatgcgcgatgtttagttgatcttcaaaactattcttatagaaatgaaattttatcacatgttaagtactaataaaaatcttgctactattatatacaaacaatccacattttcacattagttacaattttatcatacattgtcagaactcagaattcagaatattttgtgacatcgaattttggtaatcctaatgtatacgattttgccattatgatattaatattctttggtatttggcaaagtatctcgacttatttattgatatctcactttctttacaagcattagaggttatcttaaccagtcttctatttagaaaaatatattaaaaaaaagttattggagataaacctaaacaaaacaaaacaaacaaacaaacttaaagtctcacaaaatcttcactgaaatatattttggattgttgatatacacatacaccaagtcaaagatcaatgggggataacgtgtgcaacagctaaatcattttttaaaaggaagtgacctgttggacttttttgaggtctcaatcacaaatcctttttaatgtaaatatatgcatatgcattgagcgctaatgatttacgtttaagtttgttctttaatctgtttctcgttgacaacaacaaaagatcatatcaagtataaaaatatattaatctcacgatcaaccacttgctgttaaatacttaaattacatataaatgttttgaacatgaccaagaaaataatgatcatgaaatgtcaaaacaagatacaccgtaaccatataactctacaaactaagataatcatgttgtttatataatttattgtgtaaatgtgcaattccaaataggtaactataaaaagagcctagttattataatttgtgacataaatcaaatgggagaagaaacaatactaaaaaaggttgaggtttcttgtataaagaaagacaaatataaaagaagaatattggaaggtaactaagcaccaaacccaaagtcaataaccattaacaaaaaccttttgcttcatctcaaagaaccacaaagagcgaaataagaaaacaaaaagagagtatcatcaatggatggtttaataccaatggcccttaaggccgtgaagaagaacctaactcgtcgtcgttacgaacgtctctcctattccgcaacaactcgtgagtcttacgacttcgcttccgatattgaaatgaacgtcgacggtcgtcaccatcgccgtggctggtccgttggagatttctcatcgttatcaagccgggaaaccaaaagaaacggtggtgtagctccggagaagagtcttactccgccgcgggagggtcaacttgtaagattcaagagccatagattgttttcttgcatctcaggtcaataattttatcatttcaagaaaattctcaaatacagaaaaaaaaaaaaaaaaattttttaggaaatttgcatttttatttcgtgttgtgtttgattttatgtacaacgaatcatgtagatatcgttattttgtgatcttttgatgtatacgtaaagtttgtagttggggtttgttgttaaaatgtatatttgtaaggtcataaacgagaaaatgaaaacttgtatggaccaaactagaaataatgttaataactctccaaaattcttgttgacctattccacttttgacatagtagccagctcaggagtagttctttctccacaagataccaccaaagacacataatttaaaattctataaaaaccaaatcaaattttgattttggatctgagtagctgtagattagtcagagttagtcctttaacatctaaagatttaagatttagcaaatgtggcaacaaaatcaattggagagagagcaacagaacacaatgcttgcaaaaaaattgtagctaaatgcaaaagctcaattaagctaaaagacttttgattattctacaaagtaagagtgcgtctgtagagaacttcatcatcactctcatcttcttcctcatcagtcactatctcgccaccaggcatttctaacttcccacccatgtcaaacgttggaccttcagtatctggatcaatgaagttaccttgtaatcgttcctcgaatctttggtcactgcaattgaggaaccagttcaatgaactcctgattcctttgctctgtagtttttggtacctcggtttgattcttgactccaagctataagtaaagtactcagggtactccacgagttctttcatcggtctccccatctcggtcttgtaaaagtagtaactattcttcatgagttccactcgggaacagaggatctgaggacatctcacaaccattttcgcaatgtcctcaacttgaaatgccctgcccaagagaaactcaatgggtttcattatcacattctgcttaagacttacaatctgtggcattttctctaccacacgagcaaatccttcaggatcaatcttgagcttcaagctgaaaaagtactgttgtgtagacatcttggctttcactggtaacccgagaatttgaggatattgagctataagcaaaggtagtagttctttcttgacgccaaaactaatcaagcaatctacgtttggtttaacagtctcctcgagattgtatccaactatatatgaacgtttctctagcatcctagccacaattttctttggcaaaccaatggaaattagataatctactaaaggcttgatcatggttccaactctcattcccaaaagataaggatactgagttaccattggaccaatgtccctaggactcacaccaatgctcaccaaatacgcaaccgatgtgctcatcgtgccttcaagcttaaaccctagcagctcaggatacttcatcaatacataacccaaatcttgcttctccacatcgagtcctctaagaaacttaaccacaggagcaagctcaacaaccacacttgcgtgtagaacctgaggatagttcttaacaaattctcctaatttcgatctcgagattccaattttctctaagtaagccaagacaggaatcaaattcttacgcacactacaacctaacatcaaaggatactcatttatatcgtcaatcgttaaccctagcttctgtaagaactcaacacgctcacacatgacttcaatggtggaaggtagctcaatactctccaattcatcggtgattatccccaaacccttgagatagtcgcagattttgacgcgattcacgagcttctctttcttcccttgtataactccccatgtgactgtaggcatctcgtactctggaaactttgaagattgggttgcatagtgagcaatcctgaaaatcgaacaagggttttgaaattgagggatattaggatctgggtttatcagggttttagcttcagtggaagtaatcggaaagatgagactctgtcttttgagtaaagctacgaacttgttcctcctaagaagatagctcattctggagatacccagaagattgttgtcgaagaagattacgacttcgcaataaaaatcaaatgggtaatcgaaaagatcctcgctttctcgcctgaaggagtttagcgattagagacgagagagatacgaaaggcgcgtgagagagaagccctaacgagagagagaggagtttttcactctctgcctttttttaccatccgagtaaaaaatgttaaaaaacacatttttttttgtcaattctaactttttggtgatgatgatgcaaatatgtaaaacgttgagaacatttataatttgggggaatcagctgctgagatgttatatggtcttattcatgttcgttatattccactactaaaggaatggctgctatggtaagcaagagtacttcttctacatcttgtgttatacggaactgatcttcattattcaatcactgttgaatcgtgttgaacttttttaattctacgttcatttgtagtttgttatatggtgtttcagtcccctcttgaatcgtggataatcaatctataatatattgacttattgaatattgaaaaataatcaaagattaatcaaatgctactaactccattaagcaattgccaattgaatatttatcttatcttctacagtggattcaagttcaactagaagatatcaaaatatttaataaattgataaataagattttcaaactagaatttcgctaaatagttacaattttgtatataattctttaattacttttagggtaaaagctctcgtatatattacacccatataaaccctagattaaacgttccatccgaagacacgaacacgatgacgaccgaagaagacatgaggtcatcatcatcagagtcgtctcccaagtcgtttctgtcgttaccgtacgacgttgttttcaactgtttgtctcgtgtctcgagaacccacgatccaattctctctctcgtatccaagagtttcagatcactcctcgctttgcctgatctcgaagccgaacgattccgcatcctaaaaaacgagacctgcctctatgtctgcttaaacctgaataacaacaacaaccctaaccctagctggttcatactctctcaaactcctaaacataaactgataccactcccttctcttccttacccagatccacatcccaattgctcaactgttgtctcaactggttcagagatctacttgctgggcggattcgtcgcaaaggaaaagagaagcaggagagcttatgttctcgattgtaaatctcatcaatggcgtcgactccctaaaatgcgtatagctcgaaaagaagcagccgctaatgtgattgacggtaagatcaatgtgtacggaggatgcagcagcgagtaccataacagcgtaaactggggagagatttacgacccaatgactcaaacttgggagccatttccggaaggtgccttgaacaaagagggtgtgattccatgtgctctaataaaggatggcatagcttttcctgattgtggcctcctaattagtggaaaagtttatgacactacaacgatggacacgcttgattacaatacacccatggacaagcttgacttgtgtccaaatgtttgcatgctaaagatcgataaccaagacttccaagcatcggtttccgatgggaaactcaaactagttcgctgtcgtggcgctatggcgtggcattggacggttgggggacttgaagaattgtcttgtaattatcttctttcggtggcaagccctggcggaggaaggagagtgacagtttggtggaagacgtatactaaggaatgtaaaacggagatttggtgtgcactaattttgcttgagcgcgagttggtttggggagtcattgaatggtctgagaatgtgtttaccttgcctggatctgaatccgattcagattccaattccttccttttgcattatgaattagtgacacttgctcgacactgaatatatactttcacaagtcttgctaattatatggatatatactaccaacaagaccagcagcttctttccttaatgcttattgcagacattgatggagcttactttccctcatttgtttctcatggcctatggaacataaaaccgttctttggtgtctcatgagaagcccatttaaagcccaaataagctgtcactgttacacatttaaaagactccccggagttcttcttagttgcctgccctaaaatgcataccgccaagaacagtcgaagtgactcatttgttcaatgagaataacaataaaagccaaaaatcttaacaacaccagattgaataaactttgtcgattaagattatatacaagatgatttcaatctctgcggattgagtggtcaagttccttactatgattatgcacttgatctcattttagatgttgaatcatcaaatggtaagtgaagggtccatttgatgaatttaggttttactttgtctgagaattgttgtggagaagtttgatcaataagacttcacttcaatgatccagaaaggagaataacattgaggtaaagaggtcaaaacatgaacaatacaatggcaagttcttgtatataccaaggaatttcaaaagcctgtgctcaaggcagaagaagtgggaaaccaaacatctaattttcacagctgatgatttggtaaatctaatctcagctcttctacaaccaccatttggtcaatgcactggcaaaactcgaaagctcaacgcatatttccctctctcaagacatcgatcatgttgtagattcgctgatctgctttcaatcgaatctgcatttcacaaaagtgttgaatcaacaattagcattatagagaagagcggtgagactcagagaaagctgagattcaatttcgcagaatcatgatgagcaataagagcaagctttagaacctttttggcgaggaagagcacggcatcaacagtaccctcagcataaattgatcggccgcagacattgtgctggaactcgaaggagacactgcaaagaaagacaaagaaaagggagctagttatggaacagagacacttttacaatggaaacaaagaaaagtataaacaatatcttagatattgcattacgtttcatcgggtgatgtcaagtgataaagatggaaagcgtgaccagagatatgctcctcaggtacacccaccatctccacttgctgttttggatcccgaatcaattgtatctgccacaaaagttgtatacacagaaaattcacattccgaggataaattaagtgattgccaagatgtaaacaataaaggatgaccaatgcacctgatccatgtcgtaagacacacccaattcctggaagcaagaaataacagcttttgctgttccggatgcatccaatttgctagcttgatgagactccatcacctacatatagattggcagttgattagatgtagcaagaagtaatataaaactaacagagaaagaaaaaagaatttgaatgtataaaagaagtaagaaaagtacatccaaggaataaccagaaaaggctcccggaaactgctcagccatgatctccatggccgcaagaaatgctacaacctatagaccaacaaagcacacaaatatgagcaaaaatgatcttaacttacatgcataagtaatcatttcttccagaaacattcaagtacacatacctgtttacccatctgtggagaaatcacagcataaatctttgcttcctcaacagtttcatacaatttgttcctatctccaccagttgttcccatgacgaaaggaacacctactttgctatacagctccgcattatctacattttgcgagaataccaaacttgaaatcaacaaacaatagacaaaaaaaacacttctagcagatgattttcacttgcacaaattctaaactaactcaatcaaggatcgttccgccaaccagaattcaaccataacttcaacaaatctagaatacaattgtcttttgatggtagaaatgagagattctgaagtttaccatttactgcagagggaattgtgtagtcgacaacaattagctccgggtgcttctcaaacaccgaagaaagaaccttttctctttcagttggaccgtgcacagtaatctcctttccacagacctcaactctctgaccatcctcaccagcagatccaaacgatatgggaacaatatttactcctgcagagtctgctgctttaattacagctttccccattttgccactacatccattcacctgtagaataagagataatgaatatagctaaatccaacataaaaatccccatttcaaaaggaacaagctttgacatttctacatttcaaacttaaatggtaatgcaaagtcaaatctcacaactttgagtctaagagaaatcatcagatgatcaggtttaccatgatggatatgccatttccaggcaaaacagatttcacggcctcctcaccggaatccgccatcgccgtcatggataaaaccaccggaagacgacgtgtcccaatgcccatgaaactaacacggcctttaccgtattttcctacagtctgattcgttctagaagcaaatgcgatacgcgggcgatgaagaaacacactggacgacgccattaacctgtgatcaaatcgtttaaattcaatagaatcctcttaaagagtttaaagctcatctccgtcaatcaaaacgtgaaattcgtaggtttcgaaacgtacccattcgtagccataaaggaatttactctccaggatacggaagttttgttctttgttacgacggagtcaaaagtttaaatctttcacttttgtctgaaaatttccggccggtgagagtgattggggatgtagggtttagcttatcccttttcatcaaaccggaaatctctaaccaaactaatagattcaatgaaaccgtaattttaatgaaaataataaaccggaagccttgaaccgatttgataagctaatggacctcacagtctcactcttaacctgaagaacgaagaaccgtctctaaaactccgacgaacgaaaaatgaagtcattagcttcgccgccgtgtctccgcctgataccgacggcacaccgtcagctcaattcgcgtcaatcttcctccgcctgttatatacacggtggctcttctgtgaacaaatccaataatctctcattctcctcatccacatccggtaagcttgctttctctcacttctcttataataactcaaatcgttttttcgcaatttcgtgattgagatgttaacatttggtgttaggatttgcgtcaccactagctgtagagaaggaattacgctcttcattcgtacagacggctgctgttcgccatgttacggggtctcttatcagaggcgaaggtcttagattcgccatcgtgagttctcagaatcgctttcttactttgtgcgctgcttagatttagtgacttggttctgatttacagtgaaatttgaaaactttgagctcaattgcagtgttgacttggttctgattcatttttctttctcaaggtggtagctcgtttcaatgaggttgtgactaagttgcttttggaaggagcgattgagactttcaagaagtattcagtcagagaagaagacattgaagtaaaagtcttttgcttgtagaacagaataaaaagttatgagctttcacaaagctaatgacactgtttttattcaggttatttgggttcctggcagctttgaaattggtgttgttgcacaaaatcttgggaaatcgggaaaatttcatgctgttttatgtatcggcgctgtggtatgattcttgttttgaaagaatctcaggctattccatttgtttttctcctcatatggcttcagaaagtagttgctttatgttgataacatatacttaaagagttggattttgatattactgttgtccttgttgtggtttagataagaggagataccacacattatgatgctgttgccaactctgctgcgtctggagtactttctgctagcataaattcaggtttacctcgatacttatttgctggatatacatctttagacatttttatttgacattgttttggaaacactgaaagattgattttgtatacttccgaacctaaaagagcgggtagttcatttttgcttttctttggattttggatgtttaaattccctcatcatgaattacttcttcaaattttgtgtttacgcactattgactctagtaattaaagcttataaaaaatccaatttgcaggcgttccatgcatatttggtgtactgacttgcgaggacatggatcaggtttaagttgtgttatgcaagagttgatgatatatagcttattcatcataatggatgaacactgaatttgttaatattgtggttaactgaaactctaggctctgaatcgatctggtggcaaagccggcaataagggagctgaaactgctttgacggcggtaagtatcattatgattcaatcctttattgttagaataagatgtagaaattcctgatcattccattgagcaactggtcatgttataaccattcgggttcttatgtctttttggtaaagtctttgaatatttcttcctcttgtttttcagctcgaaatggcgtcgttgtttgagcaccacctgaaatagctcggctcgttcgatggatgaacatgatcacgtatgagaacctcttgatgttgtcccatttggttacaatccagtctctgaaattgtttgtacctcaaagattgtcaaaatgttttacccttggttacaaaatcatttaaacgcttttgtaagcttctggccttgttttttttttttgaatcgtatgataataataattcctccgaattttgggggtctttctgtactaatcaaaaatgtgatcttctttgttgtaatatcttgaaattgaggtgtcgaaatggatgtcaattttaaaagccaataaggatcttacacgacgaaaattttgtcggcgagcgaagattacgcgtcacattgataatagttaatataaagttcaacggatcaaccaattccacaatctataatcattttgtgactcttggagcactctcttctctttgtctctgtgactcacattcatccaatccaggtaaaaatcaaatccactaagttttatttctcttcattgttgttcttgcgttgatccttcatgatttgatcggaatacatggaaaaaggtggtgtaattagatcgagctttttgtttctccgatctgtttgacatttaggttgatctagtgctatcatgtgtagatcgaacattcggatctgtatttcccacgaatcctcttgattcacgtgatatgatcattgtctcttagtacagagatgcattgtatgttctttggtttgggatattccactaggatcctagttgatgatatctaatgtgatgcgagttctctatggtctttggtgagaaactttgttttggtgattatagcctcttacaactactaaaaactgtgattacactttgtttgacttttacaaccattgtcctgctgtgattgatgaatctactctcggcgttgaatgcttgaagttttgtctattctttgatactctaagcttttgtttctgtggcactaattgacttttcttgctgcttaggaggcatgtcgacatctgaggataaaccggaaatcatcagtagagtagttcatcaggagggtgacgtggaaatcgtcgatagaagtcagaaggataaggacgaggaaaaagaagaagggaaaggtggattcctcgataaggtgaaagatttcattcatgacattggtgagaaactcgagggaaccattggctttgggaagccaactgctgatgtctctgcgattcatatccctaagatcaatcttgagagggcagatattgttgtggatgtgcttgtcaagaacccgaatccagttcctatccctctcatcgatgtcaactacctggtcgagagcgatgggaggaaactggtttctggtttgatcccggatgctggaacactcaaggctcatggagaagaaactgtgaagataccattgacgttgatctatgatgacatcaagagcacttacaacgatatcaaccccgggatgatcataccttacagaatcaaggttgatctgattgtggatgtgccagtattgggaagactgacattgccgctggagaaatgtggagagatcccaattccaaagaaacctgatgttgatatcgagaagattaagttccagaagttctctttggaggaaaccgtggcgattctccatgtgaggcttcagaacatgaatgatttcgacttggggctcaatgacttggactgtgaagtttggctgtgtgatgtaagcattgggaaagcagagatcgcggactcgatcaagcttgacaaaaacggaagcggattgattaatgtgccgatgacattccgaccaaaggactttggttctgcgctttgggatatgattcgtggtaaaggaacagggtacacaatcaaaggtaatattgatgttgatacaccatttggagctatgaagcttcctattatcaaggaaggtggagagacccgtctgaagaaggaagatgatgatgacgacgatgaggttatttacctatatattcttttcttttgcttatagcttgaacgttatgatcgtttttgctcactaatattaatttcattttcttacaggaataaggaaacaaagtgctgcagagacagaatggtcatagttactaaatctccgatcttgaaatgtctatttaaaattaaaaaaaaagaaagacttgttttgtgtgctttttgataactgatggatcagacttttgaatagagccgtctttttattggacttcttatatcattgtggtctctcgttagcttagttatgttttgtgtttcacattggcgtttatcaattacatgaatgaacctaaaacgcagttcacatcctcaacgatcatgtgttaattcatatttagaaaatttaatctcaagtgattctacaatggagacgtttattacatacgtgctctgttcttcctttctcgcgcctgcacatggtgtagaaaacactgatagaacgagctgggcctatctagtgggtttggtgtattgggcttgtattaatgaattgggcctgtcttctcgattttaattaaaacaattaggcatttaggctctctctcacacacccatagtcgtcttcctcgatcagtctctctctcaaattgcaaaggtttcttcgaggactttggcatactgcaggtttgtcccgatctcatgctacatcattatacgaagccattacttaacccagtagattgatagctcaaattatcattgcaagaaatgaccggatttagtgatattgtacagttttctgattcggaattttaaataaaaatcggtcgtgacgatttaggtatgtgggtagtgcgtagaagccctaatttcaaggatatgtacagttccagactgttaattatttgtgtttatttggataggttgttggagctgtagtgcttaaaaaccctacctttatactgtttagagcagcagtccctccatgtcaggtcttgtggcgttatgcagagctcgagcttctgcttcgtcttctttattcaacagcgttattcgtccagcatttcgcaatttctctacaggtaggtggtattactctttattctagatgtatgcttttgacagacttttcaagttttctcactctttgctttgaaccttgaatgaatttgttgaagaggtgatatatgggttgtgaaatggtgtaggaacatggttgcactgtgagttttataataatagttaaagccattttccttaggcagagtattgttacaaacaacaaaacattgagtaacgtctattgttatgttagcctcttctatttaagtggtcaagttgattttttttcctatgttgtgggttttatcaagctacaaacctcttctagatggattaggaactggatgaacgaacttacttacttctggattagatgatgagctagtgtgaaagtgcggttgcttctttttgttagatgataaaagaatgagcttgtatcacatcggctcttcttcataaattagtcttggattaaagattgagctgaaaactatgctacttcaagttaagatactatgtaactagaataagtttataactagggcctaagctgggatctctgcaactatggtgctatttgtatctaattcttctcctaagtctcttgctagctggattatattcttttcctataattaagattgagctctgtggagtatcattgattgatgcatgtagctactttgtgggacttgagtctgtctagtctataattaagattgatctgtgtggagtatatacatctcaaaagtgacttaacctgagggatttggagatccaaagtttcaatcaagctttttattttttgtcaaaatccatatcttctgttttgtgtgcgttttattttttgatagaaagcctctatctctgttggtgttttgcaggttttgctgatacacagaacaaatcattggtagcacaaatgaaagaagagatgctccacatggacatcaactcaatgataggaagttccatgccactaggtatgatgcgtatcggaacaatcatccacaacatcgagatgaacccagggcaaggcgcaaagatggtccgagctgcaggaaccaacgccaagatcctaaaggagcctgctaaagggaaatgcttgataaagcttccgtcaggggacaccaagtggatcaatgccaaatgtcgtgctacgattggcacagtgtcgaacccgtctcatggaacgaagaagctatataaagcaggacagagtaggtggttagggataaggcccaaagttagaggagtggcgatgaatccgtgtgatcatccacacggtggaggtgaaggaaaaagcaaaagtagtggaagcagaggaaggacatcggttagtccgtggggaaaaccgtgtaaaggcggttacaaatcagctagtgtcaagaagaagaagaagcgtttggcagaagcagcagccaaaatgtgatatgggtgaacaagtttcgattttcttcaaacgtttctttcttttaaaaagcctccaatgttatttggttacgttattgaatctgttttttgagagttttttaggcttcatgaaactagaagatctttgatcagttgagaataaatatggttacgtgtttacttttattaaaaaaaaaaaatcgaattcaaacgttttcatcataacaacgtttaaaacaatgcgaatttcttttttttatatatatattaaaatcgtcgaaatcaaatttgagagatttatatgcttatactagagaaaagggtctaaaaagaaaagaaaaggaaacaagagaaagagtcaaaaggttggaacaatatgatgcattgaatcaatccccacgataaaaaaaaaacattcagcaaaaaaaaacattcagcacaaatgtcttctttgactaattaattaccccaaaacattaatcaaaaaagtgaagaaatcaatttgacatcttccttggtctaaacaaacaaccaactattgaaaaagttccttatagtggtttttgaaaattgaaacaaaaaacgagaatggtattctatagggaaaatagtgaaagaagcccacagaattggaataaggaatgagaattagatgtaacaaacaacagaacagcaaccatgccttataatcttgggtcctactcctccatatcatttcatttttattcttacttctattttgagcatctaaataacaatctttgagctttgaagcaagtgttctttctgatattctcttacgatgacaggcacacttgtgggaggtacctgaaatataaaacatggtcagtgttcaatggtttgagattctgaatgagtggagaaactgtgttgcatgagttatgtttagggatgagatcacttgatcaccataatgctatgtttttaattaagagccgatatgattaatcttaccatgccataatctgtgattatcatggaaatgtaatctgaaggtgtagcatcatacctatcattagaaaaaaaatcacaaacgggtttagtggcaggcagagaagaatagtattaacagaacatatatagtttcacttgtacgattaacacaagctagcttacatcaagttcagaaacttcagctttgcattgttggtcaagccatttaagtagtttatgtcttctcttccatgaacttttgaaatagcatttggatcaccgagctcattggagcatattgaataatccaactgcaccttctcatggaacttataggcttcgcaacaaacaagcacaggaacacggaaagcattagccaccattgcaacacaagcagtgccaacccttgagtaaactgttccgttagaaaaaactgatgaggcgcccaaaaacactttggtgacttggtgcatgatatatgatatggcagttatatgagtgtatgtacagttaatgcctcgtttgatcaatctacgaagcagtagcttcccttgaagctttggtcgagaatccaccacaaagacacgaaactttttcccgagttcatgtgcatgcactaatatcatctcaatgacagtggaagatccgtaggtcagaaggacatcaccgtctcttattttagtgacagcatgttcgactatcactgtatctgcacctatgattttctcgttaatgaaacgttcaatatctgagtgaagagaagcttttgcttcagattcagaaagtgttataggcagctttgcaatcctgtttttcacaaatcggattgcgtttcccatgctaatcgaaagcggacggcattctatgaggaaagagacgtagctacttatttgagcagtcatgtctctattaagggtattctcaggcggcgtcgagtaatctttaacaacctcttggaatgcttggagcatcgcaatacatctggcattgccaccagaaatatcccaagaaagataatgaagaccaacctgataaccacaacaacgtcatactcattcactagacaagtaacattcatcttaatgagcaaccacttattaaaacaaagagattatataattgtatattacaagcactaaccataccttgtacacagcagaatgcatagggtcaagaagttacgattttctcaaatgcttcttcctttaaaaagcctcaaggtttggtgacgttattgaatctgtttttgagagttttaggcttcgtgaaattggaggatctttgatcagttaagaataaatatggttaggtgtttcctttatttaaatatcatcgatcgaaatcaaacgttttcgtcatgaccacgttttaaacaatgcgttttttcctttttttatatactaaaactgtcctaatcaaatttgagagatttttatatatatgcttatgtattactagagtagggctcaagtaaaaattcgaggaaagggtctaaaaagtataattcagaaaacgaataaaaaaggaaacacgagaaagagtcaaaaggttggaacaatgcattgaatcaatccccacgataaaaaaaaaaaaaaaaaagaaacattcaacacgaatgtcttctttgactattatctattaacccaaaacttttagttatatatacattttatctttttgatgaaactttgaatgctgtaggctgtagcagagaacaatatattcttcagcaatattagttttaagacgttcactgatagattagagttagaaattagtcggtattaaaccaaaaaaaaacacacactagtataatacacttgaccgcataattttgcttccacttgaaaagtgaagaaatctatttgacatcttccttggtctaaacaaacaagcaactattgaaaaagttccttatagtggtttttgaaaattgaaaaaaaaaaacaagaatggtattctatagggaaatagtgaaagaagcacatagaattggaattaagattgagaatgagatgtaacaaacaacagagcagccagccagccaccatccttgcaaacttgggtcctactcctccatatcaattcctcatttcatctttattcttactcttctctttaatcttctaattaacaatttttgaacttttcatgttttggtacataaccaacgaaaaaagaaacaagtgacgtacaaaacacaagaagaaaatgaaattatcttaattgattctgacctaaagaatttaacattttctctttcaaatcttttgtagcaagggaggtgaaacgaaaacgaatcattaagatacgtgcaatgaatccaataacctctatgactagcagatgcatgaattttatttttgtgtttctgttatgcatctttttagttgctttttaagtctggtcatatcttcgctcagacttcactgatgcaaagctggatacaaaatcgacaaaagtatatgtccccatatattcctatctttatactgaagaaaatatatactttagctttatctatcgcactactttagtctttagagttgatttatcaattagttcctaaatcaactaatgcacatgatttaatgtaattaattgtctcttaattgtacggattaggtgatgaagatccaccgtccaccatggctgtagtacctaattaataccgtgtaaactttaaaccacgggtattacttatgattgttattagaaaataacattagcttacctcaaaaaaaatgaggaatttgtttttgatttctagcaaaaaaaaaatgaaaccaaaaatgattagacgactcttttgtttgtagacacaataaataatatagaatttttgtaagaaattaatagtttagaacaatatgcgtgtattcaaaaagaatataattaagaatatttgaaatgattaaataccaatattattatattagtttatatttttaaatcaaattactcaattacaaaaataatacattagaaaatgattaattatatttttctaaagtgttataaagacaccatttcctaacggtattgattttagataatagaaaacaataatttgtgaggagaaagtatttaaaagaaaacagaaaaagaaaatgtataacgtagaagaaaggtggctttagattggagagttgtacgaggaatattaataagtcaagttggtcgagatatgcattgaatcgatgggaacgagccacgtgacaacgacatgtgccgtttcatccacattacataccttttgaaattattgcttatttaattcttctatcaacattttttttgcttatacttattttcttcaatatatctcataccactaacaattaataaaggctaatcttaatagagaaatagaatcattcgttttaataaactcaagtatatgtgatgaaactgtgggcatatcatataaacttgttattgagcataataattcatcttattatgtcctactatgcattatgcaatgtatataatatgaattttttgttgaatattgttgcaggtccactatgttccactagacatgcaatctaagggagggtttgcgatgttcaaggcaatcatgcatgggttgccatttctatatagctttccctttctacaatttttttctttctaattttctaaaaattaaatatacacacactatggatgatggattaaccaatagaatccaaggaattacgagtaaaaaaaacaccctcctatagttcacctatatcttatatctttcttggttttggctacgaattgaaatctttttctgatttggataagagattgcgctctctgtatacgttcttatatatatcactataatcaaatatgggttttctataaatctgtaaggcattataaacatatgtatcaatatattcttaactgacatttagattggtataagcaatgttatttacctacatattatctatttgtttacataggaactggtggcatcgatcctaaccataagatcatgaatacaaaaaatcaaagatatcgaatcaagtacatatccacaagataatttgaatatcttttaagatcgggaagatatcactatggtgtatatgctatttatataactgatcagttatatatagttgttaaactttgttctaacaatttaaaagtctgcatcatctttttattgacgttaattaagttttgtttttgtttaaagcgggaggtgaagttttgttgtaattatgtctacttgagccattataattgtagaatagtaatgtcatttccattgggagtttagctagtagttgacgaataaaaccatttctcctttgtaaaaaaaagtagaaaagacgtaatcaatagatgttatacatgcgattcattgaatttggataaataagtattttggattgaaaaaaaaataaaaaatgagtagtggattttggtaagctgtcaattggttaataccagaacggctgaaactaaactgcttgcgaaaattatcatgtccctcttaattaaacacccaacgaaaagtacttatgaatatatccattagatattttaattattacatttttaggctgttaaacaaataaattatatcggtttacctgaaagataatgaatgaaaaaaaaaaaatcttaatatattattttatgtgtttttaaaaataataagctgtcttgtatttttaacaaatagcatttttaatatagtacgatatttaatactatatcacttttttgtttaaatcatactaaacaacacctagccctttttaaaataaataataataataataataagaccacttatgtatcctttatgtatcatgtaaaatacaaaattccctaattatataaatttaagttggcatttcttctgactattaaaagcataaaacgaaagagaaataaatattggaccaactgtcccactaaaaacgataatatgatatagccaccacatgaaatgccgagaggaataacaatatgggtcatcatcggtcgataacacatagacaacattattattaggttggaaaatttaattaattcacacacatatacatatacatattatacagttctatgacaaaaaaaaagtgataaatgttgaatatatttgtcaaactaatttggtaattcaccgaattcaatctattgattattgctatcacttctcatattcaattttttgtgcgcgaggaattcgaatctttaattagtacgtttccccgtccatagtttcaatagattacaactctaaatgattatataaaacaaacaaaacattatcatatagaacaaagattatttgtgataacctaaaatatttatcttatctttaattatttgtttctagtattattaatgactgatactgctttatttatttcaaccaaacaactttgactatagtctacaataatacacgatcaacgttataaaagtttggattcgttttaattaaaaaccaccattgaatattccaaaagaaactgaaacctccatctcaaacagaggcttaccccaaataaattccatcccacgtcatcatcagagaaagtgtctaggggagaagaaccactgtgattgtggaaagagagagagaagtgtaaagtaatcaaatagagagatttcaattttgttcagaccttccagaataagcagcaacttgcctctcacacttgtcacccccaaaagagaaaaaaaacattaaaattaaaatcttatcattttagaaaaatctgtaaattcagtgaaccttcctctgtttcctgtttcttctctgattccacagtcttaaccccaaaaacattatatttatttctctcattatcttttaccatctatttttataccaattccttttatcaaaaccactcccactttatttcttcttctctggttttcttaccaaaagaaactttcttcgtcttcctctgtatttaagctttaacaccctgtttttggtttccaacgttcaatcttcatcttcttctcgctgaaggtgtgtttggctctaacggtttaaaggtacttactttcgattcttttgattcattctctgctcatgtttttgattgaatcacaacgatttactgatcaaaacttggacaaattttctcttgcagctttcttgaaacaccaattgaatcttttctctctaccggcaaaaaaaaaagattagtccttttaggtctggaaacgccaagatcactcgttctaaaccttagattttgtctgcatttcgggataatcatttcatcgtcagggttcttcaaccaaactacatttacagaagaagaagaagaagaaaagttcgttactttttatgcgtttggataaacaaactcaagtttcttcttcatacatcgatctgattttccagatcaaacttcgaaaagagaaaaagccttctttaaatgattcgtgagttctccagtctacaaaacgacatcataaacattcaagaacattattctctcaacaacaacatggacgtgagaggagatcataaccggaaaaacacgagttttcgtggttcagctccagctccgattatggggaagcaagaattgtttcggacattgtcgtcgcagaacagtccaaggaggctaatatcagcgagttacttcagtttagaatcaatggttgtgcttgttggtctcacagcatctctcttgatcttaccgttgattcttccaccattgcctcctcctccttttatgctgcttttgattcctattgggattatggttttgcttatggttcttgctttcatgccttcttctaattccaaacatgtttcttcttcttccacttttatgtaataaacgtttctttaattgaagaaagaaatccttaaacaaagggaggttttgtctattgtcattacataaggtttcagggtaagagattaatatttcatttgtaaaacttgttttcttgatgcagaattatacaactatttatataaataaagaatgattaatagtttcatgatttcatttttctcatggtctgaagcaaaaccaggatgagagattggtacaaaatgtaagaaattgaaaggctttcattacaggagaggagaccaataagagtctgagacagaagaagtgaaataatatgtagatgaaataatataaaaggctttgattatctctcccatggtttaggatgcataaaagacagatagagagacttttgacaaagacattctcatagcaagtttgtacaagtctacaagaaccctttttcatcatctcacaacctggatcagaatccataactatagtggaatggttgtttttcagttcttattttatcaactatttaaaacgagttgtgttaactcagatgctgaatccattgttgctcagtgtaaagaagctttgaccaaaaaaagaggaaggtgatgctccaagatggtcatgagctgatgatgacctttctttacttcttctgtgtctacatcgaagccttcaagctgtgttgcagcttccacgagctgtcctcttagcttttgtgagagcagccggccacccgcatccacacactctctgtacagtggcatgtaggcgattgccactctcaatggtgctgggagatcctttagacttattgcagactctccgagtttcaaaactctcatgaaattcatgtaattttcccggctttccttcaatccttggttgaatgcagcttctgaccactgttcttggagaaacgatttgaggtcggaaggaacagactcgtcttctgactttgcaatggtgtctgcaactgaatatgtggctgctggatccccgaggaaatctgatttaaggagaaactctactccgtggagggaaccaccacttctttcaccggctgctttgaggatttcaatgctgagagcagtaaggacgggtcttggaacatgaggaaggagataagcagcaacctcaacctggctgcttgaagtggcggctgtgagagctaagcatagctccatttcacgacagcctcgtttcacaaaccattgaacaacttgcatgcaacctctctccgctgctctcatcaagggacccaagaaagcaattgcatgaccttcttctacaaggcaatccatcgtttcgattttactataatgcgaggcaaaaccaagggctaagtcaacatccacgtctaagctattcctttgagcaatctgcaccaggaaaaagttcagttagattgcacaaagtaacttgcaagcagtcattaagaattagatttacctgcaacaagatgcgcacaagttctgtgctcccaaaacgagaagcttcaaggaagcactgatttacattatctgcgcctccttccaccagcataccgagcaatccatgtatgacagtagctgaaattccagaagcccagccaggattaaacgaggtagagaacagcgtaagcgggaagcaagctgcatcaaaggcttctgtgaaatcctttcctgatagatggtttcctgcaagatctaagaacatcttgaaagcagaaagctggagttggatctcagcagctgagtcttggttagctttatctctagggccctggcatcgggagtgaaaacctatacatttgagtgcccattcagtaaacttttgaactttagcaccagcttctgctttgaggacctcatcaccgttacactcttggagacgctcgtgcaacctggaaacgccgagatgggaaaaaatggatttatatagaaagggtatctcacccttcccagctaaccaaagataaaccaggaggaataagaacataagagatactatagatttaacaaaaagcgatttctaagaaaagttaacaacactaaaacacttgcagatgtaaccaaccaatgtaacatgtaagacacaatgtagtgatcatataaagcaaaaacaaggtatcataacagaaaccaacttctccaataatccaaaagtgttttaccataattatactgagaaaaaggggaaacatcttataagagaaagtatcaaatgtgtacctttgagccataacagttacagtatcagcaagactcacagtccggctatggcaagatgaaacacaagaagcaagaaaggaagtcctaagtgtagctctagtatagtcctgagcaccatgacatatgatcttagcaatcaattcagtgattccccgtaactcatgctctgtgctcaagaaccaaatagaatctaaactaatacacaacagatcattcaaagtttgtggatcagccagctgaataaatctctctgaaagttgccaatcctgtgagctaacagcaccttggaaaagccgtcccaattcgattctatcctgtctattaagcttcttctgttgctcaagacccctgcatttcagtatctttgcagtagatccagagcatttggtcggttgagtgatgatacctacaagaggtgactctcttgcaaaaacaacatcactctcttgaggttccaagtcagaacctacaggctcatcaggatacatgtcatcgttctccatccactcagatttccaaaatcaataatccaaaaacttgttttgacattcgaaaaacctttgcaataacaatactgtataccaacaaatcccttcctccttgtacaagcaaatgtcttgtaccaaaatcaaaatccagacttgcgcaatcaaccactccaagaaatcaaacccaggaagaaaagaaaaaagagactagagatttcgttcagaaaatgcggtagaatcgattcacgagagcgaaaagggtctgaattttagcaaaacgtagtcaacagaagcatccaaaccttaaaataaaataaaaacagaaactgatcccaatcagaatccatggccgagcacagcaattgtgaattcggccatgaaaattgcatcggaaagaagaagaaagatgtgaatttgcaaattaccaaagaagaacattcgtagaggagatgggaagatgagcgaacctggacgagattttcattgagaggtcaagagaacaatgagagaatttttttttatttttttattgtaaaaataataattgacaaaattaattaaataaatttgctttgcactcacagaacagaacagaagatgacattttctctattttcatatttgtctttttggtttaatcgactggttatttatttattaccctaaaaaaaaacggaattgttttagaaaatgctaattgaattattagattgcttcagacagcaaaaacattattgtaaatctatttattacacacacaaaattacttttaagttttacttggtaataatatttagatttatccaaatttcaatagccaaataagaaaaaaaaaagagaaaaagcatataagaaagaaagcatctttggacttgtctgattttctctatagacgcaatcaccgccgattctctctctctctctctcgagtctctcgacggtcgcatatcaaaagtccatttctttcttctctttggaggatcagcaactatggatgaagagtacgaagtcatagttctgggtactggtctcaaggagtgcatccttagtggtcttctctccgtcgatggtcttaaggtctctctctctctttttgaatccatgcttgatctggagattttcaatactcttaattcgttacttacatgatgaacaacggatctagttgagattattatctccgattgtgtgatttaaagctggttgctttgtgagcttcaacatgagaatcaattggcttcgcgattttgacaatgatctgaatttaatgcatttagttagttattgagattgcgtaaaaagactaaattttcatcatctccactcctatatcttctatgtgattgattagctgactttgtcgccaagtttacttctttttataagtaatctaatggtctactaatttcatctatattccaattaggtacttcacatggacaggaatgactactacggtggagagtcaacttctcttaatctcaatcaggtcaatatttttgttaaatatatatgaagactttttgtggtaagttataatcagcgagagttattgaatgttgctttgttttaaacagctgtggaagaagttcaggggagaagagaaggctcctgctcatttaggttctagcagagactacaatgttgacatgatgccaaaggttatcaatattagctactttccagcttatctagcttccttgttaccaatatgaattactaactgttctctgtcaatgtggcgcaccagtttatgatggctaacggaaagcttgttcgtgtccttattcatacggatgtgaccaagtacttgtcttttaaagctgttgatggaagctatgtttttgtccaaggcaaggtacattgattactcattttcatttttatcttgtgcctcattctcttttttttccatagatttcaagtctgtttgtgcatctttttttctcccatgtttgatcttggtcaaaagcttttcactgatcattctagctttgcagcttaagtaatttttttctagttatattaactgtttatatgctacaggtccaaaaagtgccagcaactcccatggaggccctcaaatctcctcttatgggtatttttgagaaacgtcgagctggaaagtttttcagctatgttcaagaatacgacgagaaggacccaaaaacacatgatggaatggatttgaggagagttacaactaaggatttgattgcgtaagctgatgttctcttgtcttttgcattatggtgttgtcaatatttgttttagactatctgctgctaactatcaatttaacactttggcaggaaattcggtcttaaagaagatactattgactttattggtcatgcagtggcacttcactgtaatgacaatcatctccatcaacctgcctatgatactgtaatgagaatgaaggtgaattgctctcatgggactttaaagtgtggatccccttgttttcgaagtcttcttttttgctctcagtatttcatgtttgactctgttgctttaaatgttttatcagctctacgcagagtcccttgcacgttttcaaggaggttcaccatatatctatcctctctatgggttgggagaattgcctcaggtttttttcttcttttgtacattgctttatttggttggtgcaactattctggcgttttggactatagtttctaaattctctcttatcttccttggctcaggcatttgcacgacttagtgctgtctatggtgggacgtatatgttgaacaaacctgagtgcaaggtgcgtctttgacttccttatctttgtggcttttttgtttcggtcgtttctgcaactttttctgtcgttaactatatggatgctagatctgataacctaatattgcttttataacaggtagagtttgacgaggagggtaaggtttctggtgttacatctgagggagagactgccaaatgcaagaaagttgtctgcgatccttcttacctaaccaacaaggtaatggctgtgaccggatatcctacagtaacattagctttgttgcatgcatatatctctcatctctgttttatggtctgttgttatgaatgtgagccttttaggcaattttaacaatgtgagcctgtatgttaacattattttaaaatgttttataatccaattcaaacaggtcaggaagattggcagggttgctcgggcgattgccattatgagccaccctattccaaacaccaatgattctcagtcggtgcaagtcattctaccccaaaaacaattgggccgcaaatcagacatgtgagttctcttattcatcctttggtttcacttatgtaaatgtgtttgaataatgtgttagctaatctttgtctgaattattctcttgagcttgctgagataccttccttgctacacactcttctcaactatattatttcttgattacaacacatacactctataaaacttggcagtgtgtaacattgagtcgattgatatatttgtttctcggctcatgattacatctttattgtaactgacaggtatgtcttctgttgttcatattcacacaacgttgctcccaagggaaagttcatagcatttgtgtcaacagacgctgaaactgataaccctcaaaccgagctccagcctggaatcgaccttcttggtcctgttgatgagctgttcttcgacatctatgatagatatgagcctgtcaacgaacccactttggacaactgcttcatatcaacggttagtttctctaccccttttttagtgagcatcttaaagttggctggtttctaataaccttttttgttcatgtcctgaacagagttatgatgctacaacacactttgacacaactgttgttgatgtgttgaacatgtataaattgatcaccggaaaggtaatgttctagaatcacaaatatatcggtttttattaattgacggcgacatattctgtaattggggagtgatcattgttttgtgttgcaggaactggatctaagtgtggatcttaacgcagctagtgctgcagaggaggaatgatggaaaatattgcaagctctgtctctctctgttagtcaccaaatgatgtaaccggttctctttctccctcttcttaaaagttgtctcaccaaatgttctgttaaaatactaaatcaaaccgatctcatcatgcgtacctattcccggttatcgcagtctgtttttttcttctcaaaaaactaaaatgttggatttcgtggtttttgtttggagtgtctaatatatcatcatgctcttccgtttgaacaattatcgtctcaatcgtttcgtagagagtcgttgcttaacaagttgaatagtaaatgcatagcaaaactaaactaagcatattaaatgactggtaatacacacaaaccattattttgttcttcaaaccgacatagattgtttttcttcacatgtcagtttaaaatcatataaacgaacacaaaattgagcattataaacggctctgtagaaatcacatatcttgtttgatcaaactggcagacagattcagcatctttgctgtgtttatttgttacaacgcctttcaatcagttatatataccaaacaaagtcgaacaagttcaaaaaatcaaaaatcacaacaacaaaaaaaatgtcagaacaagtttttgtttgttaatcatggtgagcaatctctgatttttccttggggttctgattttgttgagaggagccttttcctagcaaggagttcaactgaatagacggtcttggactagtagcatcatgactggtacctacttgtgttgcgcctttcttcactccccttttagccatttttgcccatccaacaagatgttcctgtgtctgctcgttgaatattgcacctttgaatgaacttcccatcttttcaccaaaaaattagaaggtttggttttgagtttgtgtcttggtctagtttgatataagaacacaagaaaattgactaagagatgtagaatctgtacctgagttacgagtgcatagagcggtaaggtactgtaactgcagagaagctgaattattaccctgcaaaaatatttcacatttcaagatcaagaagctcataacaagatcgatattaagtagctttggctattattacccgatgacgagtcttggaattacgaacttgacatgatccatgatgcatgaatcccaaccaaattgaaactgttgttacaattgcatgagttttcacttttctctgtacgtatcttgatatcttctagattattggtttagatcgattaatggtaaagagtacttacaaggataaagaagaagtaggcgatttcgaaggagttttggaaaagaatgaaatggatcaagaagagaactagccggggactttgaaaccagaacaaatcatctgatggtcggacaaccaaatctccttccacagcaatgtgtttctctgcaacttcatgagccaaatctgtgatgatatgctctaacttcgtccccacggcaagtaaaagctgaggagaaaaccgcgtaaaaagagttgatttagataggtttgaagcatagacatgctttgagaaggttttcagggacttacgatcaaaggaataaaagctagccagaagtaaacatgccatgctgcaagaaatatcgagtcgatgatcattcaaccgaaaaaagaaagaagagaagaaaactttgtattggatcaaagttaaaagatgtcatctcagtatctcaccaacaatgtttagaagcaagaagagaaccacaaatacccaaaggtaccaactgcaatttgatatatacattagaatagaatcaagaacactatgttgcattggtttttggaaaaactataaattatttacctgataccgacgactttcttgaaatcagaattaagggcacgcattaaatacttatggaaattgaattttgggttggtcttgcaatgagtcttataaagatcaaatagaaaaagttgtttttagacattatagtagagataaacacaaagcaaaggacgaatcaaaaatccaagatatataccgtgacaaagcctagcctcattgtgatgtaatctgattcattgactgacgcaagaaactgtttcataaacgattgctgcaaaggaaaagaacacatatcactcaaaaacttgcatatacacatacaaacatgtctttaattacaagtaagataagttgtgagaaaacaaaaacactcaccacccatcccaaggaagcatcagcttttccaaccccaagaaatcgtgacctgatgaattcgtgttcttgaacgtgtgtgaatttcttctggatcactgtgtagatatgtgtatatataagacttgttaacgttacaaatgactataattaatgaaaagttctcaagatcctgaaacaagattttgtactatactttggtctgtgtcgaagtccttctctaaaaccttatcctcccattttttccattgctttatctatgccataacattttgttataatcattagacacaataaaaaacttattctgcgaatagaagttgtccggttttagagtttaggattatcactagcttatatttgttcgtgatatctcgtaactaataaagattaaaaaaaagatttattgttaagtaaggtgtaattaagaaaataccttcatggtaccaaaaacaatggttaagaggcagaaaataatgtgggcaacagctaatacgaagatgaatatatgaagctcgtgcagagctgataatgacattattggtacttttccctgaatttaaaacaaacaaaaagattcaaaaaagatatcatattatagacaaatttatgttaattctacgcacgtcttcaaataaaacgtgtaagtcaaaaaaagatttgcaaagataagaatacctttagggagcagtagtcaccggcgggggcatctccggcgaggagatgacggccggtgaagctgaactggaaatgggaggagtctttaagggacttctcagcccctgcaggtttcgtacaagggagaaacttttcacttaactcctttgatatgcaaatctttgcgattttagactggccgaccgataatagcaacgatatgaaccctactagcatgagttctgtttccaaattttaagaatcctattagaacaaatgatatcatcacatgatggatctttttttttatcaacaaaaacatgaagtcaccttctttgatcttttgtaatgccccaaaaagctgcttctgatcgttgttcttaaagtgctatattcctcatgcatagatccataatagtcatttagtctacaacgtctaaatgaattatgcatacatataaaataaacacaaggagccaatatgtaatatataacctttccggcacggtgaatgagacgctcgacggcaaaagagatagagacaatgacggagcagacgagagcaaccacccaagttggtgtgtactctaaggtcgttcctcctcccgccatttttttgctccggtgattcgtgattttcttgatccccttcttgtttggtgcaattatataatgaatgcctaatgagtttaatccaaaatgatgaccaggtaattgttttaaaccggcgatcttattctttagaacgtgtctttaaatattaaaatttgtaggttatattcattttcatttctttactagaaagtgtaggttgtattcatgcacattatataatgtgtaatgtatgcggtgtcagtgtgtgtttgtcccctctatgttttgtaattttctttatttagagttttggatagttacaatgtacaacctaaatagaaattactaatgttatagagccaccaagagttgttaattgaggtctaattagactctttaagtccccatttttttcctttgtcaaaggtctaaacccaatattttttctttttcctttaacaagataaaattttgacttgatattgaattaatcaaatgtaactgatcaaacgttttattttaacgaattaaccgctacaatatttgatcggtcaatctataaaaacaaaatttggacaatttcgcacaaccgatataatctctttaaaaaaatggagaacagcttgtactcttgaagtcaacgattccggttaagagcattctatctttgatacagctcgaccggaattatttaatcaaccggtcaaaaccagatatttctaatggattggtgggcttcgaaggaacaatctaacagccaataaaaattcaagatcaatttaaaagcccgccattggaaaataacatgattagtcataaaaagcctatctcggataaaagatcacaagtctctgataacttgaacaaaaaaaaaaaaactcggtcccaaaatctttgaaatttgcaaagataaagaaggaagctttcatcaattcattctcctgacaagctcgttgatgaaattctccctgtttccagcatcaccaccttcgacgtagtggtttctcttcttcttaaggccaccgagtggtgccttcaattggaatggccacaggaagttgttggcttccttgaagtgaggtccaacagtcatgatctcgtggatgagatcctcaacgcagatgatcccatgctttccgagagcctgatccacaatggagttgtcagtaagtgctatcctctggtggttcagctttccataacctcttttgtagatcagttccttaacgctcttcaagtttgggtatctgcaccagatatatcattcggtttagagcagcatatagtttagtttacataatcctattgaaagagagagaatcagattgcatacccgtaagtcacgtatggttcaactcggcgcagcatgtttactgttgccttgttcaccttaagaaacacaccattgaagatctgcacaaatgtatacgaaagtaaacttcttgacaacgcaatagtcttctactctcttttaaaaatgatgaacaggcaactatcacatattagtttgaacatataacaaatattaatcaataatcatatgttaggctaatatagctggatgaaaataacaaactgtgaaacctacctgtctcaaacgcaggagctgcagaatcttcttggtttttgggtcaatggcattgatactgcaaatgacaaacaatcacgtaaataaaaaacagaatctatatgcaacaacttatgtaacacacaaataataggcacatacccacggatacgaatgataaagagcaacttagcctcagggtcaacgtagaaacctcctttcaacttagcctcccgcttcaatcggatcaactcgttatcctaaacaagcatgcaaataatatatcatgattcattacaacaaccatgaacagaacagtcatcttagtcagcaaagatgaacaaaagagtgttgctttattaccttctcagcgtattctttggcatactgctcagctctcttgaagataagcttgcgggcctcaacactcttcttcttagcagctacagcttcatctttcttggccaatgcccattcctcttgcctcttgatcttctttagcacagactctggaaccactaccttggattcagccatttctcctacatacatagcatgccataaacaaaccaaaaataagctatactaatcaaataaaaaagacacctttgagaaattgaacagattgttaatcacagagaagcaaggcaggaacatcaacgacaatgtttaaaaccaaacagcaaaatgaaaaggagcaattatagaagatcggaaaactcaatgcaacgattctaaatctaaaatcaaagtgaatttctctacaatagaactagaacaactgggtttatcgatctcacaaacatcagaacaaacaaattataatgaatcaaaagaaaacttacgattaaaaactaaactaaacgaagaagatcaaagagagaagcttacttgagatgaagaggaaatctcgtctgagagagaggaagagatagtgtgcggcgtagaaggaggacaaaacaaacaaagtcgaaactgggtttagggtttatttcgtaaccctaattttttagtcagcagtcatttttccaaagtgggcctatttatttaacttaaattgggcttggttttaaatgacatatacatactcaggccttgtccatctacatctacatgtcatcgattttgcccttctgaatactttcttccaccaatactgtttttcttttcataaaccaacaaattaaatctatactcttccaaatcttctagatcgaatataagtattgatatgtgacattgtgatcattcaaaacaatagagttttaaagcttcgtatgtcttattgtcttagactaacatcaaaagttaggtttatatttagtgctattactctagagatacaaaaaaaaatgtcaatatggtcttctagaagaaaagaaagagaaaaactttagtaaccgtaaagaagaagactaaagccaagaggataagtgcttgccagtttcggcccacttgtttcctcccccataaagatgacaaactccccaaaagggaaaacaaatatcaatgcctatcttctagaacccttatctctatttttcttcttttcatttagtaatagttgtattatatctttggtttcattttcaggaataattaattagaaaccaatccacttcatcgtagtcgtaaatcaatcaaccttcgttgaaaagaaaaaaaaaacaacaacttcagtttcgtgatgatttcaaattcgtcttgcgatagtcgtgaaattcatcaatagaatctgttaacagtactacatcatccattgatccataatccatttaagggaaataaaacaaaactaaatgacattatagttgcttttttcttgtcgagcaaaaagtttcaaaagatgtatccattgtttctttgactaacgcgacctattgatagccaatattaccatttaggaatgaaaatgaatcgaaagtactcgtttatatgcgaaactactactactattcaaagaaactctacgttactttttcttgacacacgacaataattggtgatgaataaagctagaaaagctgatagagagaaaatacataagtagagagtaatcaaagaaaggacaattgacgaaacaagaacagacaatgtggggaaaatgggatagagtgtaatggaccagccccctattaatgttcgaccccattcttattattttccttcttatccccgactttcatttttcttcttgtctatctatgttcatatcgtgcgctaacacccaaattaatcttcttcccttgaaacatgttttaaataacggcacaaatagtaagcgtagattcataaataaccccaaagtaaaacaacagaaagcatcattaattatccggtggagacgagatgacttgtgtgaggctggaagtccgcgagacatacctttacgtcggtgcatcgcagaatagacgtgtcaacgttttaatataatatgttgaataatcgaagagtaagacccaaggatagttaatgccaatgtatatccatgagaacttcttctagaagactataataaagtagaaacctttataaagttataatcaatcataatattattgatgaatcttatattcaaacgaaactgccctcgcaattttctacgtaaaataatacgtattacaaaattaaaaacacatgatgatatcttacaacttataacaactaagcacaaattttttggcaaaacataaagaatctatacatatggactattcgtgaaagaatttgtttgatagtgcgtgcacatgccaatatgaaatgaaaatgtccatcatacatattaatatacctgttttaaattgtagtaaattagggagaaacagttcacgagatgtttacttatcggttgacggttgcgtcagtgaatacgactcattccttattactccatattatttgtctttgcatagcttctagaagctttttgttatttcaaataaaaagtgatggtaaagactaaaaagctcactactggtcttcgtgaactttattatcaagatgtcatagattcggtttcaattgacactgaaatggaatagtaatctagatatctagttgataaactagtttaaaaagttattagttcaaactgtttttaaactatagacgctatacagtggtaaaagcgttaaacaaaaagtgcggcgcagtatactgtcaatttaatttgtgattataatatacaatattgttacctaacttcacttaaccaagtaaccactgacctaacttcaactatttgcctttacaatttacatcatgaaacaacatggacatttcttgaatttttggttgatattcaaataatcaaattcttatggagtatatgatttactccactgttagttgttcattttgtccttatgaaagtcttctagaagctttctacttttcctgttttatgaaaagattgttttaacaaaagcaccgtcttcatgaactaaaccagttgttatagattccatttcaaagttttattccttattaaggaaatcgcatcaaagtaacccatgtgttgactcttgcctgtttggtgagattgaaagggaatgattaagaaataaatttttagatacgtttgcgttttgcaacatacacgaatcttgatttttttcatacgctgctaaatcaagtttataggggtttttaaaaatttaaacgaaccgtcgcgttatttcaaccgcaagcaaactcatcctcctctttccctatttaaaggctctgccacctctttgtagcttcacactcactcaaatttaaatcgcaactttcgtcagtttttgtgtgttttcttctacacatagacactttgctcaatcaaacacactctctgttctgtttttctcaaacttgtttaagttcgatgactatggaagtgtcgaaaaagaaaggtggagattttcagcaatgtcacgaattgattcccggtttaccttccgaactagctttggagtgtttggtcagagttccgttccaattccaatccgccatgagatccgtttgccgttcttggcgtagcttactctccgactcttcttttatccaagaacggcggagatgcggcaaaacagagcttctcctctgcctcgttcaaccgctaacgccgccaattccagcgtctaaatcggttgacgagacattaatggttgacgagaaaaaatcagaggatgagtcacacccgcgcgttttctgcacgccgcgttttggattgagcgtttacaacgctgcgatgtccacgtggcatcgcgttgcgtttccagaggaggagcagatcccgcttttctgcgagtgcgtcgtgcttcaggacgccgggaagattctgctcatcggcggttgggatccggagacgttacagccgacgagagacgtttacgttctggaattcgccggaaggaagtggagacgaggtgcgccaatgaaggaatcacgatcattcttcgcctgcgcctccgtaagtccaacgaaggtatacgtcgccggaggtcacgacgatcagaaaaacgctttacgctcggcggaggtgtacgacgtcgagaaagacgagtggtcgtcggttactccgatgacggaaggaagagacgaatgtcaaggattcgccgttggtatgggtctaaggttttgcgtgctgagcggttacggaacggaatctcaaggaagattccgatctgacggagaaatttacgatccagcgacagattcatggtcgagaatcgacaacgtctggcgatttccagatactagcccgagaggtcgcaccgccggagactttagaagctcctctacgttatggtgtttcacagacactgatttacagagtgaacgtcgatgggaaactaacgatgattcgagaaatttgaaactggatcttcaatctatacagcttccgatgacaggaagctcagttttcgccggaagcttaggaggtgaatcggtggtaatgattggcggtaaaagagagagtgaaggtgaaggtgaaggaggagtgatgatgaagatgacgactgagaagaaaatgggaaaatggagtcatcatgttcatataccttgtgatttctctactcttccattttcgcatgcttcaatctatgtttgaaaatcccaaaagattttatagtacaacattgtgttctgatctgatgtaatatacaccaacacatataaaaaacaaagaactggttaacaaaaggaaaaaaagaattgtagcttgagattgttaaaatgtttgacgatgatcatgatcagagcatttgccagtcatcttcacgttcatcctcgctgtcgtcatccgcaaacccgtagttgctttggtttatcgctgtgtgggtttgagtcactgtgaacaatggagcaccgtttgattcctcagctagtttcaatgctcggagacagaaatcgtcgaaatcatctgttgaagattagggaaaggttttttcaagttacagaatttaaaaacttttggtttcagagaatgtagtaatacaatacctttgtcgcggcaatagaatcctagagctagagatgggtcgagtgattccaaaggaacataacgaaggacactgatgcagattcaagataaaattaagaaacaagataaaactgaaccaggcaaaagtcgtctgtgacatgataatttgaggagactcacttgcaatgataggaggatgtgtcaacatctggtgtttccttgttgactgtgaccacctaaatcaatcatcaaacgataagtctcaatcagtatccgacttatcatgtgaaatggcatcttatccgacttaggtactatggaccaccacaatgccagaccaagatttatggactctaaaaaaattcagaggcacgaaatgaaacctgttgaacttcatgcggatcaaggtagaaacctttgtcttcttgaacaccaactatgtaagttgaggcacctggtttgccacccaaaatccccacgctctgaggaaaagtgaatgtggctacgagagatggaatgtacctgtcatcagattatagcaatacgtcagaaaggtcaagtacaaatacgagtcgagcataacagagataatggaatcaatttcacagttgcaaacctgggattcacactgtcaagcccaagaaccagtggaaccaaaaggataatcggtgtccactcagactgtccttttgagaattctagacaagatttggtagcatcttctatacagagaattggagccccacctctctctccatcttcgctgccagaaacgatatgaacagccataggaagcgtctggtttttagaatcagtttgttttctcttcttgcacgctaatgactcccacgctcgacaaatggcatacggtcctacccatgacccagcagcgagaccataggacgctccagctattataagattgtggatggagaaagctgaaggctcggaatcaccaaaaggttccaaggtctctaagtattcctgttcaggaagctgcatttttaaatcaaacaagcatgaggtttccactatctcaatgcaagaaaccgggtttctgttcctagtgttgctacattgagcttacctcagatttcttagtccaagccctccccagcctatggaaaagcaacgcctgataatatttggtttgtcagaatatgttataaacttcaaaatctcatgccaaaagaaatactcttcctcacacctgagcaaaaagcatctggctacttcgaatcatgcaaccccagttcacatcgctggtataagttgtgtctctaaagggttcaaaacctgtaaaatacaattcgtaaatggtaaattttatgtaaaaaactttattttggctttaatctgtagttgagtttacaaacctttacgatatgtcatcagtattttggatgaaaaatctagttgcaatgcagccaatacagtgccagtatcggtttcccctgagttctcatccgcagatattttatagcagacacccaagagccatacgtcactagttgtgctcggaagaccggtcctattaggccctaaaacacgctcctggaatctcctaattgctccactagccatagagactctttttacaaatgctgtccaaccattacgagtggtgcaaacttgcttatgcccagaagttgaagactccctatacggttgagaaactgaggaagaagacgtaaacacgtttgaccataaggtaaacttggacttattatcactaggtccagaatctgaaactaaaggggatttatcatgcgtatcactcttgcttgatgaagaacattgttgaggaacaaatctatcacataaagccttcattacctagacatgaagcaccaactgcaacgtgtccttctcatagaagcaacctaaatcctgagaaccttatctgaaataataagcacaaaagacactgaattaacatccaacatacttttaagtagtatcagaaagccaagattgactaaaaacttccacaattaacttcaaacactacacaagattgggtgtgtgtgacttcaaggttcagaaaagtttaatcaattaactctctgagaccataactatagttttgtgaccactgaagttcagcttaacaccccaaaaacaagtaagcatgtaacacaataacgattctacaattacaaacactaagcagattttgatgagaaaataaacccaatccatagcttcttgacctcttgaaacatcacaacatagaattttccgcatgatattaggaaggtttagggagtcaacagagaaatataaaccaaaattttagagatcaaagcatttggattccacatgcatattctcttaattgaagaatgtttctagcaaatgacaaaatcaagaaacagacttgagcttgacgaaatttcaactcacggatctacagtaatcgaaaatgatcaattaatcaacttaaattttgacaactcctcttcgtgtagcagaatttcatcatccaatttagcccaggaattctcacaactccgaatttttctagcagagagaaaacaataggaaaagaaacagaaggatcacctgagagatcgatcaaatggtttcagcagacgacggagatggaaaacgcaagggggagatcgatttcgtgtcgtatcttgctcgcttcaacgtcccgtcgaagatacctcagagcaaagacaaacgtgtgtttcctttggaggttttgggacaatctcaatggcgattcttctttttaccttcttcaaatctttcgctttcaactaatgacaatctatatcgtttaattattaattaaacttcacataatcagggttatgaattatgattacacttgtttaccatttttttacgtggaaaaaaataaatactctccgatttacctgtttacttcggataaaacgttcgaatattatattaacaatgacattgatagtattttactttacttttctccaggttcctaatttttttgttaacacatccatcaacatgttaacagtacacaaaattaaaatgttgctgctgcttgctattaatgtgattagtgattacggctaaaaggctatgacatataaacgacataaagcaacaatattagtttgggttaattaagctcagctaatttgggctagttaaaaaaattggatcggataaaaaagcccatattgacactgggccaacatatcatatcgagtcaagttacggttttaccctgaagccatttatttctgaagcgtaattatcaaagagaaaaaaagattaaaaaaaaagcaactgccgctctttcttctttcttactgtctcagatccgccattgttacttcttcagttcttcttcttcaacaacaacaagaagtaataattagggttgagaaacttcgaattccgaaacaacagagagacgtactagttttagccatcttcttttcttagtttcatcgaacttggtgttacctcaataggtcgacgctcaaatcttgcttattctctggtttttagagcttcttttagattctttcgacatgccagccagcaaaaaggtctgttcaaaaacaatctccgcttcatggaaattttaactttattcttgatatctgaaatttccagatatttttctcagatttcggaccggaatcacttagggcaagtgttcgacaagctattgaatcagattggagaatctgaagaattcgagttaccggagtggttgaataaaggaaaacctactccttatatcttcatcaggcgcagtatccttttttgcaattgcagttttggttttgtttcattttgcagatttagctttgatcaagatttgttttggccttgacttgttaaagatatatacttgacgaagaaagtcaaaaggagggttgaagatgatggaatcttctgttcttgctcctcctcgtctcctggttcttcttcaactgtctgtgggagtaattgccattgtgggtatgcctctgtttttatttcacttttcttgatctatctatttcagcatttcattgatataagaccataattatctgcttgtttaagtacattgaactggaaaaaaccttatcttttgtgttaggatgctattctcaagctgttcctcaagttgcaagtgtgggagtgagtgtaacaataagccgttccaacaacgacatgtcaagaagatgaagttaattcaggtaatgtgtgattggttttggttggatagagtggatttttgttgttgtcggtttgttattttagttgtgtcttgtagacagaaaaatgcggatcagggattgtggcagaagaagaaatcgaagctggagagtttatcattgaatatgttggagaaggtgatgtgactatttgatattttgtctccctactgaatatactgcgaccatggtctaatttgttttcttttttcgtacctttgctcaatgtagttattgatgataagacttgtgaagagaggctttggaagatgaaacaccgtggcgagacaaacttttatttatgtgagataaccagagatatggttattgatgctactcataagggaaacaaatcaagatatattaatcatagctgcaaccctaatacgcagatgcagaaatggtttgttgttaactgtcaacccttagtgcttgtttcctagtttagaatacttgagagagaaaagtcatcatttggtttacttttgcttgcaattaggataattgacggcgagaccagaatcggcattttcgccacccgtggtatcaaaaagggagagcatttgacctatgattatcagtaagtttatatcctccttctccagtttactttgtaacatatctgtttttatgttgagttgtgacactaagaaatagagcaggtttgttcagtttggtgcagatcaagactgccattgtggggctgtaggttgcagaaggaagcttggtgtaaaacctagcaaacctaagatagcctcggatgaagcttttaatctagtggcacatgaattggcccagacactgcccaaggtattttcaaattttatctgaaaagaagaatcaaatatatatctcgtctttgccctggcatagtttcacagtcactgaaaaatttgtgtgatgaggtctaagtgactctttttctttccccacttttggttaggtgcatcaaaatggacttgtaaatagacacatagatgcaggtaagtttggattttttctgctcaatttgcgagagtagcttattgtgttttggttgtaagaaagtaatttggattcccatgtttctccaggaaaatcatggaacaatcttagtcaaagggatacatgttcgcgtaattgcattggtgtggtgatcaggttatctcgccccacgagtgataggtatttattgagttttgaactcgtggattagttttatgactcattctatgcttttctcatccaatgttttatcttttgagattttcaggtgttttggcctcgttagacattttgatgagtattcaagaaagcactcggtattacaattagccaatacttgttcctcaccatcgaacttggcaaaatcattctcaattaagacctctctgttaacatctttaaacttggtccaggtgatgttcgaggatggtgttaccgagtttgtcgacatgtcgagagaagactgggagattgtctaatattgttttcaggtgatttatactcttcactctcttaatgaaacattaaaactcccagaagcatagagtattaaattaccctggctgctatgtttctgcagattgctttgaagttgagaaaccaaaataacctgtcttggtaaactaaaggtatcccaaaaaacccgggtctgactgactgggattggtgcagtgacattgtttgttgcgtctaacttgtgacctgtgtttgtacaaccattataagagatatcatatatctacttgtgtaaccacatctgtactttcttctccttccttcttttttcatggggatctcaaatgatgatgtcttgcaagaaccttcgtggtgtgtaattgactttgtaagaaccggtaatctcatatccggtttagcttttaaaaatttgtatccaaagaccggtttgttcttgtttgcatgtgctgttcttattcgtgcatctgtgtgagtgtgactgtgtcggtgtcgccgacaaaagccggtgtttgcaaaatctgaccagttttgttttagcgattaacgtttcaaattccttcaaatgcaaaatgagttaaacaagtgaaaaattactaaaacaacataacagttttaaattggaaaaagttttgtaaagtttaaagatacactgtaagtgaaaaacggaaaattttaattagattttttttttttttttttttttttggtaaaagtagattatttttgttaaacaaaagtgatggatcattggttttttggtagtaggtgggtgatgtgggtgtgtggttctggttcaccaactcaaaaagcatagactgcaggggttggggattgataacgacaaatctaattgtggttggtaaatcttttactaatcacattcctttaaaataattatgtaactcatcttgtttactaatatcaactcgactatcttaatatcaaataactcggattcttcatttttttcactttagaatggtttggtaaatctcttgaataataaacactttaataaaaatgtttttttttgtcaagcataaaaatgtaactcatgttgtctaactacatggattttcgcacaaaacaatgattaaatgtaaattatgtaattatactttatttaaagtatgattttgtcttaaaaatgaaaataatataaggaagtggacgggtaaggtaaagtctaaaattcaccaaacattttggaatctctctgtttactataaagcagtgagtagaagaacctgaaagaactcgcctttgtctctcattcttcttctccatttcgaaaagaagatgaaggtgatagataagatccagtcattagccgacgaaggcaaaacagcgttttccttcgaattcttcccaccaaagacagaagatggagtcgacaatctctttgagagaatggatcgaatggttgcttatggtccaacgttttgcgatatcacttggggagctggtggatctaccgcagatctaacgcttgatatagcttcgaggatgcaaaacgttgtttgtgttgagagtatgatgcatcttacgtgtactaacatgcctgttgagaagattgatcatgctcttgagactattagatctaatgggattcagaatgtgcttgctcttagaggtgatcctcctcatggtcaagataagtttgttcaggttgaaggtggttttgattgtgctttggatcttgttaatcacattcgtagcaagtatggtgattactttggtatcactgtcgctggttatcctggtaatgtctcgaattcgaatttgatttctttgtttcgtgtgatttgtagctaaagattggatttttatgtgttttgatatttcagaggcgcatcctgatgttattggtgagaatggtcttgcgtctaatgaagcttatcagagtgatcttgagtatctgaagaaaaaggtttgttttgtttgtttttgttttgctttgttcttaaatgtctgcatcaatttttgaatttgggtttgtcttggaacagattgatgctggagctgatctgattgttactcagcttttctatgatactgatatattcctcaagtttgtgaatgattgtcggcaaattgggattagttgtcccattgttcctggaattatgcctattaataactacagaggctttttgcgtatgactggtttctgcaagactaaggtaagttttgatcgtttagtaaacaccagttcctgcaaatgaatcaccttttaggagatgaatgatattgcttgttgcctttccataaaggtgtttgtttgctagcttaggatatgtttttaaaaaagtgtatttaaggtttcgtgatcagctagatgaaattgagatacttgattatattattgttttcagagaaagtgtttgttggatagctattcaaagagaattctttatattaatgtagataccagctgtgctttttgtgaaaaaaagatagatgaatttacatatgattatattaatgtagataccagttgaggtgatggctgccttggagcctatcaaggataacgaagaagctgtgaaagcctatggtattcaccttggaacagagatgtgtaaaaagatgttggctcatggagtcaagtctcttcatctctacacattgaacatggagaaatctgctcttgcaatattgatggttggtcctcactttttctacttgatgtaaagcatgatactgatagtggagtagctttactattttgttgttgtttcagaatcttggtatgattgatgagtccaaaatttctcgttctttaccctggagacgccctgcaaatgttttccgtactaaggaagatgtgcgccccattttctggtaacagagcttagtttctctcgttctgattatacttagccacatattttactctgcagggaaaataagacttgttctttcttctaatcttttgaagggcaaaccgtccaaagagctacatttctagaaccaagggctgggaagatttcccacaaggccggtggggtgattcacgcagtgcttcatatggtgcactctcggatcatcaggtactacaatacatcatctgtaattgcacaactctctttcaagatttcataacaaaggggttttgaagggtatttcttcgattggtctttttgatttgctctagattgttaaatgtaacatcttcttgtgagcttgtttgctgaactaaatgcttttgttgtcagttctcacgtccgcgagcacgtgacaagaagcttcaacaagaatgggttgtcccactgaaaagtgttgaagatattcaggaggtagaacaattttttcactaccacacatttccctcactttcacctgtaaagatgcagacgcttacaataatcttgcaaaaaaactgtcacataacagaaattcaaggagctctgccttggaaaccttaaaagcagtccctggtctgaattagatggactccagccagagacaaggataataaacgagcaactgataaaagtcaactccaaaggcttcttgaccatcaatagccaaccatcagtcaacgccgagagatctgattccccaactgttggtgaggaatcagtcctgttatatctctgttctcatagcaaacagagttttgattcgtgattgatcgatacttgtgcttgtgtatgatttgcaggatggggaggtcctgttggatatgtataccaaaaggcttatctagagttcttctgctcaaaggagaaattagatgcagtggtggagaaatgcaaagctttgccatcgattacttacatggctgtgaacaaaggagaacagtgggtatcgaacactgcccaagctgatgtgaatgctgtaacttggggagttttcccggctaaggaaatcattcaaccaaccattgtcgatcccgctagcttcaacgtctggaaggatgaagcatttgagacttggtcaagaagctgggctaacttgtacccagaagccgacccttccagaaacttgctcgaggaggtaagttctatatttttcttgatctgatcatatttgttattgtttttgacaatggtttatttaaaatgactaatggacattttgatccaaaaatgcaggtgaagaacagctactatttggtaagcttggtggagaacgattacatcaatggtgacatattcgcggtgtttgctgatctttgagaaaatcaagagacaactacagtatatcggtttcctactgctttcaagatttgcttttgtactttctctaaaatattgggattttgttttttacatctgtctaccataacagtattgatgtgcaagtaatgttattgataaaaaggcatcagtttcactaccttaaagatccaaaaccaaacaattcttcggcaaattttgtttgtgttgatagttcagaggaaaactacaaaaagacacgcaaaaagataaaaaggctttaaacttttgtttataatacttgcaaatgatatccaggaagaggaatcttaggctacacattggtttaatgatcatagtttgttcacattggggagcgggaacagtggttttaacaaaactaaagaataagcccaagttctgatggcttcaatgcatttctcaaacggtaattgtagagatagtagtgcgactgtcgacatagtggataaaacctcaactctttcaagaaactctcattctgcatcacatccgaggcataaaacacatcgaaacctttttgcttagagactattagggcatcattcaccagctgggataacgaggtcagtgtcgctacattgcagcaagcataagcacattccagggtcgtgtatttccggttaccggggatagttatagaggaattgcagaagctgcagaagtcagtgacatcatgagtttcagggcttactactacgtaactgtagacaatattttcccttgggagaagccagtgcttgacatcgttgtcatcaaagtcagtcgcaactgcaaactggctaaggtagttcctgagcaacgctgtaacagcagggacatcacgtcgctccatttccctaaatccaggagtgatcggtgcatctggtaacttgtagagtttgacggtcctgctcattgtcattctgtcacgaagccttgttaacccaacatcgattagcttcttcgggttcaacattctgacccagtctcgactggtggtaactggtctagaaagtatatgacttgaggtataagccgcttgccatatattctgcaacttaacccttctagtcaactccttgatcatgagaggagcaagtcccttagacctgagcttcttgtgaacacacaaggaattgaccttcgccattttaacaacctcatcacgcaccctgattcttgttggcctgccacagatgaaagcaatgagtttcttggaggtcttgacgcggactccaatatgccagctctggtaataaccaggtggacacagtgcccaccttagatactctttggagtactcatacttgatctgttgtcatcaggactgttttccttgagaaagttgtacatctctaaacacatatcgtcagagttcatatcgcatatggtccattcgaattgaccaagaaggttgtacggctcttgcttgacctcagacaccaaagttgcgggctcaattgggccttcaggcaaactcgtgtcctggatatctttaaactgctcaacaggttgagtctcccagaacttatgggtctttgaatactggcactgcagtaaccttccaactatggttccacctgaagtatcatccttggctaattgaatttgtgagctcttggcaacagtaactagtgcatcctccactggcttcagttttggatctgacattgttgatcgtctgcacaaaaaaattgattgctcaatcatgaatacacagcaagcaacagccatgaaacaaaactgaaaacgaataagaaagccgagctagcttacagtatgaagcattatcaagatttttaaccctagacatagcgatcccaaaatttctagcaacaacacacaaatactttccgattttgtagcaaaatcgctatgaagaatccgatacaaggtcatgaatcgaaacaaaaacccaagaaaactgagcgacactatagtatcaacaatggcgaagtactaaccaaaagcttcgggttgaagtgcgacagcaagaatcggaagaagatcgccggaaaatagttgagctacgatcggaaaaaacgaatcgggacaaaaatcgcaaacaaagtttcgccaagtcaatacaaagccattaatcgaaacaaataccaagaaaactaagcgatagtatcaacaatcacgaattacttaccaaaagctccgggttgaagaatcggaagaagatcgccggaaaatagctgagctacgatcggagaaaagtgagagaaaacataaattcgaaatttctggagacacagagacgaatccagaccctgagatttcttcaaaagttaccgtcagattgaggcgaatccacgtgtcatcatctgcttttcagatatttggcgccataatattcagttcgtacaatcggagacgtcatcgtcgcaatctgttaaaacaaatctgacggaccgttataattgacggacgaaaacaaactgcaagtggcccaacacaactttcatatttacattactaagccccttccctcacgttcacaaatatataccttattgggcctattatttaaggcccaacagcattaatcatgcaatctgatttacataatcaataaaacctctataaattaatactcaaaaaattaataataaattaatagattttttcggtccgaattgtgactactattaaaattgatacaaatcgataaattaataagataatattttttttgaaaactttatataaatatatggttccatcaatagtacttcatctattttttttgtttgatattttaggaaaaacacaaatattaagaaaaatatattaaattttgcttttaaatttattgttcgttgtgatttacaattttcaataactttaaaccaataatattcaataatttgtattgaagtttacaatttatcaattataactaataactattgcattgaaaacctaaaaaatcaatttttttgaaacaattttttttcttctaaaaaatcaaacaaaaaggaacagagggagtatacattaataattatatatatttaccaatatatattataaatatcttatataaaaatatgactctagttatgtttttcttcaatttttattaattctttgtagtattcaattctaatattttacaacatggaaaaaaattatattgttttttaaacttaataactaatttctacttgtaattggtttcagaaatactattgattttaaagaacaaactaaattttatatcgaatttttgtatacaaaatttgtacaattttattagtttatcaataaattaatatctctctaaattaataaatttcttggtcctaatattattaatttatagaggttttgttgtggccgacatgaattcttcgacgcagaagaagcccaaatgatttattagcaacaaaaacaatataatggacccagtatggagctaaagttatattgttcatatgtgacattgtgttgggggttttagcaccttgatacaacgaggaatatgttgcttcactcatcagtttttggagttatttaaagatgacgaaaaagagaggatagtagacaaacaaaaacaatggacgtcatccattatgcctctttgtttcttggggatgaagccgtctgatgtcaatgcctatgatagagctgaggacggcgaaagctcaaaaatccagtctcaaaaagagaaaacagatcaaatcgtcaaagcaaaggcccataaggatgtcggaaacactagtttgcctgaaagtccagttgagccggcaaatccgttatctgagatcaagcaagaaccagaaaaacttccttgtggttatgaatggatcacatgcgacttgaacactgatgatatgtgttcagaggtgtgcaaatttctcaaggaacaatatcttgttgacggacaaaagttcaaggatgctcttcaacaacttgcgctagatgatacattcgtttggttttattattattttgcttcttctctatatgaactacttttcccatgcgatttttttacttttgaattattaggaagtgtgattttgttacttgtgttgtgtcatatataaaaaaatcaaaattctataacagaataaaaaataagctaacatgtagctataattgatgaaggatcccctaagctcttatacttagaatcatcttcgaagaacatacaaatatttgagcacaagacttaaaaagccttccaaaactattatacaaactcaagaagaacaactgcttcaagttctgtgaaaatcactatttcaataatcgtctcctttggaaataatctctttgcaagttggtcgcaacaggattgtatgctcaaactgagaaatatagcttcctttgacatcacacactggaggacatggctacaaaagttaacccaaagaaacttactttcatcaaaatgttcttgaacataagtcatcagagtatatatatagttttaaggagtttacctcaattatgccagaatcacaaagattctttaaagccatcaagtattttgtttcaccaaggcggtccaaataacgtctgcagaaggctagcgtggagaagttcttgttaatagtggcaaggagttgttttgcccttggtaacctcaaaggtacatgacccacatcatagtttttcatgtaatggctacattctaagtcttctcttacatatcctttccctgcaaaatgacacaagtgaaaaaccaattttactctgaattcgtaaaaatccacatttcttgtatagtttcatgtgagaaatgttgttgttacctgttgatccaaaagtttcaatggcatataattcaccctcttccattttcgtctgctcgcctcctctaacattaggaactgatttttcagcgtgtatctgatagcgtccaatgctgtgcccattcaggtttctgatacttttgactgcccccaaaagacacaacattgttttagttttctaataatccaaatagaaaccaccaaaaaatgctgccacaaacgtaatcaattaccttggtagacttttccattgatttcaacctcataagactccatgacctcctgaactgcagcaccaacatcacagagccggacatctaccccggcttcctaaaccaacaaaattaataacacaatggacttattcagttggattgaacgataaagatccaaaaaagaagctcaatatggttataagaaaacaatgcaaacttcaaagaagaagtcactacagaatgaatggctgcattcaccatatccaagaacagaagaatcccacaagtagcaacagaaacagaatgagcaccttgataccagtatatgttgcgtcacgcgaggctgctaaaagaggatcaaacataggattgaacgcaactgtaaaagcagaatcaacaatgtgccctgccaaaacaacataataattgttcttatgagacatctacgttgagaaaatacaacaaacagatgataagtttttgtttttaccataccatcaatatgtgttccaaaatccagcttcatcacatcatcatactgaaggacagtcttatctccagagtttggtgtccaatgagcagcaacactgaaggttcaagtaaatttgagacgcattgatagagccaaagatcaaagaaatgcagaaagaatgaaaaaggttgaactaacttattcagtgaacatcctgtaggaaaggcgataccagcttgaagaccattctctgatatcaacttacgaacagtgttctctaaagtctcacagagatcaatcatcaacattccaggcttcaatatacttctcatatacttcctaacttgacgatgaacttccgctgcttggcgaagagagttatatatcggcttttgcagcctctccatctctctcttctcttcagatgttgttctccacaaattactacatcacaacatagacttagctagcaaaacaaaatgtccttatagaaaatctagtctagacttactcatcattgtactgttggatttcaccttgaggaaaatctccagaagggaagagctcaagaacaggaattgaaggaggatcagtctgttgaagagaactcttcttcttcctaaaaacaatcatcagatttttgagcaagatcatcaaagcaaacactgaagattaacagaaaaaagaaacaacttctcacttgcttttacttttcttcttcttcttcttcgttgaagcctcagctaaaatgaaaagactaaaagtctcaacaacaataaagctagagaaactctaaaccaacttcacatacactagttcctagaaagttacaatctctgatgacataaccagattgattaatctaaactagtaataaacaagaacacacgaaagagaccaaagttccatctttttcccgtcataattacatacttcaactacaagatctatcaaaaacacgaaatgatttacctttcagtccatcttcttcttcttggttattatccttttcgtcttccttcacttcagccagatcaagactcttcgttaagtcagaacttaactgagactcgtttccattagaggactcggcttcagtgttctccttccccatagttgctacttctgggtttcctatcgccatctcaaattattttaacaaggaggcttaatgagaagaagtgcagaagaaagttcatcagaagaagtcaaagtctcctcttttcacctctttttcactcccaacttttttcttcagtctatccaggaaaatgtcggaaggttaaaacaattgcaaaatgatccaacaaaactttcatttatacatttataacccattactttaaagaacacaaacgctccttattgggcccaatattaataggcccaccaacattaatcctgcttatcttttttttcaaaacattaatcttgcttatcttatctgattaatttaatttaatcgagaaagcaagacaaaaaaaaaacctatcgtttcacggacaagaagagaaccgttgcgctttgtgaagcatttactcaacggctagtttccttcttcttccccttttctcttcctcttcgcctagggtttcgaaaatttcaatccgatttgaataatttctgttttcttatcggaacaaaaaaatctccggcatctggaatctccggtgattttgtcaatttcgaagaaatttgattgaaatggaggcgagaatcggccgatccatggaacacccatctacacctgcgattaatgctccggcgccggttcctcctccttctacgaggcggccgagagtaagagaagtgagctcgagattcatgtctcccatttcttcttcgtcatcgtcgtcttcctcttcttccgccggagatctccatcaattgacttcaaattctcctagacatcatcaccaacatcagaatcagagatcgacttcggctcagaggatgagacggcaattgaaaatgcaagagggagacgagaatcgtccttccgagacggcgcgtagcttagactcgccttttcctcttcaacaagtcgacggaggtaaaaaccctaagcagcatattcgatctaagccgttgaaagagaacggtcaccgtctcgacacaccaacgacggctatgttgccgccaccgtctagatcgcggctgaaccaacagcgtttactcactgcctccgctgcgactaggcttctccgatcaagcgggatctcgttatcatcttctacagacggtgaagaagataacaacaatagagagattttcaaatccaacggcccagatctgttgccaacaattagaacccaagcaaaggcctttaacactcccaccgcctcaccactttctcgatccctgagttccgatgatgcgtcgatgtttcgagatgttagagcttcattgtcgcttaaaaatggtgttggtttgtcattgcctccggtggctcctaattcgaagattcaagccgatacaaagaagcagaagaaagctttaggacaacaagcggatgtgcattctctgaaactgctccataaccgttacttgcaatggcgatttgcaaatgcaaatgctgaggtcaaaacacaatctcagaaagcacaagctgaggtcagtttctatagctctgagaatcagaaatttgatagcttttacatatagatcaatgtttgacacataacttcagtattagtgatgaatgttgtttaggttagattctgtttgatgatggtgatcttatggatgctgtaaattgtttttcttgcagagaatgttttattcacttggtttgaaaatgtcggagttgtctgattctgtacagaggaaacgcatagaactccaacatttacagagagttaaagctgttacggagattgtagagtcacaagtaagtaaagatcttaaatatcgtagatttcacactatttttacatttatgaacgtttagagcaattgtgtagtttccttgtaaaaattggtgttaaactacttttaactctatgcagactccttctttggagcaatgggctgttcttgaagatgaattctcaacttcactattggaaacaactgaagctttgttgaatgcttcattgcggttgcctctcgattcaaaaatcaaggtatatgttgtgttggtcgaatcaactaggaaaaattctgctcctttataccttttgtactaaaacatttagattttgcttctcaaaaccaggttgagactaaagagttagcagaagcacttgttgtcgcttcaaaatctatggaaggcattgtgcaaaacattggaaatcttgtgcctaaggttagcaaaatacagtcaatgtgcttcacattaaacatgaacaaaaacaaagttcctacacacgcctatgttgaaactgaaacatcttccttggttccttttgcagacacaagagatggagactttgatgtcggaattagctagagtaagcggcatagagaaagcatcagtagaagattgcagagttgcactgcttaagacacattcatcacaggtattaaaacttgtactgtttgggggacataaccatttgtttcttttcagtttctgaaatcctaaagtgttttttcttctattctgcagatggaagaatgctatcttagaagtcagcttattcaacaccagaagaagtgccatcagcaagagtgcacaacttctgtttgatgattttttaaggttactttaccacacagtaaaaacagccagccatacatggcatactcgctagtgcagcaacactgaagctcttcggtttggcataatctatcttcttacatacctcaaataacaaaagaatttgtaaatactatcagttgtcttgtaatatctgagtctattcaatgatccattagcttttgtctgagcattgtattaccgtatcttttagtaagagaacaaagaagactccttttcaagtgttggatgttgaattcatcgaccacttcactgggttaaaccaaagtaaaccgggactctaccgcgagatatccaaaacaggcccgttaatggccattattaagcccagatgtccattaaggcggcgctgagattataagaaggtgaaactttcttattataaaaacccttgacgagtttttgaacgaagaggaggaaagcagaaactctaagaagaaagaatggcgttgaagtttctgaacaagaaggggtggcatacgggaagtatccgcaacgttgagaaagtatggaaagctgaacagaagcacgaagccgagcaggaaaagattgaggagcgttctgaatttcgcgctatccaagaacaggccggtcttgttccgtaagttttctaattctatacctatagccctctcctaaattagattttgattggtacatatatttgaaattagggttagcaacagagtttgatgattggaagtatattctaatggcggcgttagttaattagttttaaaacctttgaagtgaatcatgaatgatgattgcaattgagctaatgatcaaaactcgaatattttatcgaaatagcgtctgtggtaagatgagtggttttaaccttagttttgttgtttcttcttgtaggaggaggccagagagattggagttcttgtatgatccagaactagcagtagcgaaacagaatgttagtagttcaagacatggtgttttgtttcagaatcaagatcagcgagcgagagctacgattcctggtgcgttgtttgatgatgatgataagagacactctgccaatgattcttggcgcaaattccactccgaccctttgcttctcatcaggcagaaagagcaggaaatctggaagttcctttctttatttctttactccattcatgtgtcctgcttgtgtttcttctgtaaacggttacggttttagattgtattggatttcgtttctgctgctaacctgttgtggattgtgtttcttctttaacagttgaaaagaaaagcgagaggatagagatggagtgttgaacgaggacaagatacaacatcggcgtagattgtttaaatacatcgcaagttatcttcttcaggtgttttttttttgagtaggattaggaatcttcttcaggagttgaatgtatagaaaacacagttttttttctttttaatacaaagacaatctttaattgctctctacttcataaagttgtgatgatttttaggtggtatacaagcattactctctggtgaaacacacaagctttttggtttaaaataataattgaatttgtcaattgtctacaacgtctcgaaaatcaataaatctttgccattgtttgatccggaagaaacgaatgtctttgacttctgagtatttgggagtttcacagacaaatttcaacaagcagtcagaatttcattggacttaaagccaatctaaaccggatccaattagcttagatttgcggtttagcacaaccattgacaacaagcccatgaggcccaaatataacatctaaatcacacgttttaaacacggacggctctgattccatctcacattatttcgcttatacgacggcgacggagcaaaataatttagaaccctcgacgagttttcgattgaacgaaacaaaaaagaaggtaaccagattttgaagcgagaggaggagaaacaaaaagaagagcaatcatggggatgaaatttctgaacaagaagggttggcatacggggagtctccgtaacatcgagactgtatggaaggctgagcagaaacaagaggctgagcagaaaaagcttgaagagcttcgtctccagatcttgcaggagagggagcgttctgagtttcgtgctctccaggaacaagccggtctcatcccgtaagttcctctgttttccttacccacgatcccaattgatttgggtgataacgaatttgggaattagggttagcggtttgagtttttagcgtagaatatataacatgcatctgctggtagttagttggttttattaatgattggcgatggaatcggtgatttgaagttgtgggtcgttctaaagtagtaaagttgtatacttttatgatttggagtcattagaatctataagatgcatctgctggtagtttgattagtttttaatgattgatgatggattcggtgattggaagttgtgggtcgttctaaagtcttatactttttgttatcttattgtaggagacaagagagattagagtttctgtatgattctggattagctgtagggaagggaagtgcgagtggttcaggtgtttcgtttcagaaagaagagcagcctttagccaaatctgaagctggtagtagtgccagtgagaagccagatcagtcagctcctggtgcgctgtttgaggagaaggcacaatctgctaatgattcgtggaggaaacttcactctgatcctttgcttctcatcaggcagcgtgaacaggaagctcttgccaaaatcaagaataatcctgtcaaaatggctcttattcgtaaatcggtaagttcttttgttcttctacatggagggtttgggaattgggattacattggatatatgttattggctttcttttccttatacatttactgaccctgttggagagtttcttttacaggtagaagaaaaaggaaagggtaaagatggagacacaaaggagcacaagaagaagcataagcgtaaaagtggaaagcatcagaagcaatcttcatccagacagcggtctgattcggaagaagattctggtgaagagaataacggaagaaaatctcaccatcagaaaacgtcagggactcatgacagacactatgaaagaccaaggtcagatttagaagatgagtcaaaaggaagagagagtcgtgataggcactatgagaaacgaaggtcagaactagatgatgggcacaaaagaagagagagacatgatacgcactatgagagacgaaggtcagaaatggatgatgagtcaaaaagaagagaaagtagggataatcactatgagagacgaaggtcagatttggatgatgagtccaaaagaagagaaagtcatgataagcactttgagagacaaaggtcagatttggatgatgagtacaaaagaagagaaagtcaagataagagacgaaggtcagatattgatgatgaaccaaaaagaagagatgctcgaccgaatgagaaatatcgaaatcgctcccctaaaggcggtgtggaaagggaaaatcttaagagttatggtcaagaggataaaaagaggaaagcagaggatttagacagtggaaaaccgaatgaataccagaatagacgccggaaaggtggctctaagctatcagaagaagaaagagctgctagattgaagcaaatgcaaatggatgcagaggtgcacgaggagcaaagatggacaagattgaagaaagccgatgagaccgatgcagtggaagctgataagaacaaagtatccacgggcaagagctttttggacgatgctaataagagtgtgtatggagttgagaaaggcggaagctcaacaattgaagaaagcgtgcgtcgcagaagctattattcacaacgtggaactgcagctgaaggcaatgcgtttcgacgctgatgatgtaaaaatattgttacaacaaaacacaatgtatactaaggtttgtgtcttttttgatattttttttcagtttttgacattgtatttctgattccagaatattgttgagcatcaagctctttaggtcttttgatatatgaagacaacgaggctgaggcccattgtcataagcccattatggggtggtccagtgttttatcccggatcgagcgtgggatttgaatagttagtgtgtaatcttattcagtgagtgggacgttgaaatgaggtgtatgagtcagtcaatgaatacccgtgacatgtagttaagccataatactccaagattcccctttggcaccttttaaataaaccacgagatgaagccactctctcttttgtctttttttaatatgttttattttctttctttttcttgtccatctttttaaaaataattgaaatttgacctagggtcgttggtgtgttataattttgattcaatttcgaagttcgcatgttgataagaaaaatataaacatttgattcgaaaatgtttaaaggaaaaaagagagatggatttgtaatggaaacattttgacgtgtgagattttaacctctcctattttcaaagattgggcaatatggggttagaagcttgcaagggggggttcacgtgtagcgtaaatgtacaatgatgtcacttcctacactttatcacgtccttgaatttataggaataaagcaaatgttctaatcaataataccaatcttgcatgtttatttaattattatatagaagtttgattttataacgaattgtgtaatatagtacttttgtgatgccgccgttcctgaatatgttgactttgcaattgcaagccagacctagaactgaagaaaaaaatgtacgaattagtcatttatttattcgaagcataattcatttggaaaatcaggaagaccattatagtacggagccaaaatatttgaacatcacctaacatgttttgtaagcttctttgatatttattcttgttaataaaattttactttcttacggacaatagatgcaaccaatttgcattaccttctaaaaatatctactgtagttgtagcggtgcacatcaattattataatttttgaaaaaatggtgtacccaaaaaaacataaatattgttatagcaatgaatacaaatcaaagaaatatatgtatttaaaaacttaaaaatagaagagttgtacgaattc

SEQ ID NO: 374 - DNA, 118327 bp, Arabidopsis thaliana
gaattcatcgaccacttcactgggttaaaccaaagtaaaccgggactctaccgcgagatatccaaaacaggcccgttaatggccattattaagcccagatgtccattaaggcggcgctgagattataagaaggtgaaactttcttattataaaaacccttgacgagtttttgaacgaagaggaggaaagcagaaactctaagaagaaagaatggcgttgaagtttctgaacaagaaggggtggcatacgggaagtatccgcaacgttgagaaagtatggaaagctgaacagaagcacgaagccgagcaggaaaagattgaggagcgttctgaatttcgcgctatccaagaacaggccggtcttgttccgtaagttttctaattctatacctatagccctctcctaaattagattttgattggtacatatatttgaaattagggttagcaacagagtttgatgattggaagtatattctaatggcggcgttagttaattagttttaaaacctttgaagtgaatcatgaatgatgattgcaattgagctaatgatcaaaactcgaatattttatcgaaatagcgtctgtggtaagatgagtggttttaaccttagttttgttgtttcttcttgtaggaggaggccagagagattggagttcttgtatgatccagaactagcagtagcgaaacagaatgttagtagttcaagacatggtgttttgtttcagaatcaagatcagcgagcgagagctacgattcctggtgcgttgtttgatgatgatgataagagacactctgccaatgattcttggcgcaaattccactccgaccctttgcttctcatcaggcagaaagagcaggaaatctggaagttcctttctttatttctttactccattcatgtgtcctgcttgtgtttcttctgtaaacggttacggttttagattgtattggatttcgtttctgctgctaacctgttgtggattgtgtttcttctttaacagttgaaaagaaaagcgagaggatagagatggagtgttgaacgaggacaagatacaacatcggcgtagattgtttaaatacatcgcaagttatcttcttcaggtgttttttttttgagtaggattaggaatcttcttcaggagttgaatgtatagaaaacacagttttttttctttttaatacaaagacaatctttaattgctctctacttcataaagttgtgatgatttttaggtggtatacaagcattactctctggtgaaacacacaagctttttggtttaaaataataattgaatttgtcaattgtctacaacgtctcgaaaatcaataaatctttgccattgtttgatccggaagaaacgaatgtctttgacttctgagtatttgggagtttcacagacaaatttcaacaagcagtcagaatttcattggacttaaagccaatctaaaccggatccaattagcttagatttgcggtttagcacaaccattgacaacaagcccatgaggcccaaatataacatctaaatcacacgttttaaacacggacggctctgattccatctcacattatttcgcttatacgacggcgacggagcaaaataatttagaaccctcgacgagttttcgattgaacgaaacaaaaaagaaggtaaccagattttgaagcgagaggaggagaaacaaaaagaagagcaatcatggggatgaaatttctgaacaagaagggttggcatacggggagtctccgtaacatcgagactgtatggaaggctgagcagaaacaagaggctgagcagaaaaagcttgaagagcttcgtctccagatcttgcaggagagggagcgttctgagtttcgtgctctccaggaacaagccggtctcatcccgtaagttcctctgttttccttacccacgatcccaattgatttgggtgataacgaatttgggaattagggttagcggtttgagtttttagcgtagaatatataacatgcatctgctggtagttagttggttttattaatgattggcgatggaatcggtgatttgaagttgtgggtcgttctaaagtagtaaagttgtatacttttatgatttggagtcattagaatctataagatgcatctgctggtagtttgattagtttttaatgattgatgatggattcggtgattggaagttgtgggtcgttctaaagtcttatactttttgttatcttattgtaggagacaagagagattagagtttctgtatgattctggattagctgtagggaagggaagtgcgagtggttcaggtgtttcgtttcagaaagaagagcagcctttagccaaatctgaagctggtagtagtgccagtgagaagccagatcagtcagctcctggtgcgctgtttgaggagaaggcacaatctgctaatgattcgtggaggaaacttcactctgatcctttgcttctcatcaggcagcgtgaacaggaagctcttgccaaaatcaagaataatcctgtcaaaatggctcttattcgtaaatcggtaagttcttttgttcttctacatggagggtttgggaattgggattacattggatatatgttattggctttcttttccttatacatttactgaccctgttggagagtttcttttacaggtagaagaaaaaggaaagggtaaagatggagacacaaaggagcacaagaagaagcataagcgtaaaagtggaaagcatcagaagcaatcttcatccagacagcggtctgattcggaagaagattctggtgaagagaataacggaagaaaatctcaccatcagaaaacgtcagggactcatgacagacactatgaaagaccaaggtcagatttagaagatgagtcaaaaggaagagagagtcgtgataggcactatgagaaacgaaggtcagaactagatgatgggcacaaaagaagagagagacatgatacgcactatgagagacgaaggtcagaaatggatgatgagtcaaaaagaagagaaagtagggataatcactatgagagacgaaggtcagatttggatgatgagtccaaaagaagagaaagtcatgataagcactttgagagacaaaggtcagatttggatgatgagtacaaaagaagagaaagtcaagataagagacgaaggtcagatattgatgatgaaccaaaaagaagagatgctcgaccgaatgagaaatatcgaaatcgctcccctaaaggcggtgtggaaagggaaaatcttaagagttatggtcaagaggataaaaagaggaaagcagaggatttagacagtggaaaaccgaatgaataccagaatagacgccggaaaggtggctctaagctatcagaagaagaaagagctgctagattgaagcaaatgcaaatggatgcagaggtgcacgaggagcaaagatggacaagattgaagaaagccgatgagaccgatgcagtggaagctgataagaacaaagtatccacgggcaagagctttttggacgatgctaataagagtgtgtatggagttgagaaaggcggaagctcaacaattgaagaaagcgtgcgtcgcagaagctattattcacaacgtggaactgcagctgaaggcaatgcgtttcgacgctgatgatgtaaaaatattgttacaacaaaacacaatgtatactaaggtttgtgtcttttttgatattttttttcagtttttgacattgtatttctgattccagaatattgttgagcatcaagctctttaggtcttttgatatatgaagacaacgaggctgaggcccattgtcataagcccattatggggtggtccagtgttttatcccggatcgagcgtgggatttgaatagttagtgtgtaatcttattcagtgagtgggacgttgaaatgaggtgtatgagtcagtcaatgaatacccgtgacatgtagttaagccataatactccaagattcccctttggcaccttttaaataaaccacgagatgaagccactctctcttttgtctttttttaatatgttttattttctttctttttcttgtccatctttttaaaaataattgaaatttgacctagggtcgttggtgtgttataattttgattcaatttcgaagttcgcatgttgataagaaaaatataaacatttgattcgaaaatgtttaaaggaaaaaagagagatggatttgtaatggaaacattttgacgtgtgagattttaacctctcctattttcaaagattgggcaatatggggttagaagcttgcaagggggggttcacgtgtagcgtaaatgtacaatgatgtcacttcctacactttatcacgtccttgaatttataggaataaagcaaatgttctaatcaataataccaatcttgcatgtttatttaattattatatagaagtttgattttataacgaattgtgtaatatagtacttttgtgatgccgccgttcctgaatatgttgactttgcaattgcaagccagacctagaactgaagaaaaaaatgtacgaattagtcatttatttattcgaagcataattcatttggaaaatcaggaagaccattatagtacggagccaaaatatttgaacatcacctaacatgttttgtaagcttctttgatatttattcttgttaataaaattttactttcttacggacaatagatgcaaccaatttgcattaccttctaaaaatatctactgtagttgtagcggtgcacatcaattattataatttttgaaaaaatggtgtacccaaaaaaacataaatattgttatagcaatgaatacaaatcaaagaaatatatgtatttaaaaacttaaaaatagaagagttgtacgaattcactaccgaaatagacaagatttattttggccaataccaaaattaatggtatataggacatgagtgagtcggcttaaagagaagaaaataaaaagaaataagaaataggaggagatgtaacagaatggaaaacgaaaggtgtggaaattgatttgagaagatgtcgcctaataatattaaccgacaattagtggcctcttctctgacttttgacttatacactgttttttcacatttgttggtgctctctcactcccacccaatcacggcccttcttttctaatcttactactctataaaattaaatattttttaaaaacttatagtgatcatagtgtggaacatttgcttcaatagttgacctagtaatttaatagtatctatatgatgtatacaatgttctttttgttgccaatatcgatagaaaaaaagttttaacttattcgaaaaaagaagacaaaaattattatagagtaggttcttgtggatttgaatcgatttgtgatttgtgaatactacttaaatagaattatgtaagattctacaattagtgttttatgtggttagagatgataaaaattacagttagatgattaaataatatttccgttgatacggatttggattctctaccataaatacttccaattgtttatgttgatgagaagtgtgatcagttaataaagaattaagacgttaattaagaaattgatatgtgcaaaaattgatagggcatcattaggcaatttaaaaagaataatagagaatggcatttaatcctatcaatcatatttagtttgcctatttagttttgaacctttcgattttaaatttaactttattgtcactataccagaaaagaattgtagtcatttctccaaatgaaaaagatttgaacttgggaacaaaaaaaatttgaaatcccaagaaaccttttaaagtagtaacaaaggagtagaatgttccagttcagtaaaatttcactttttctataaaggtgacagtaataaaataagatactcttttttattttaaaaaaaaaccttcgaatttttccagaaaagaatctgacaaaaataaaatgaacagagaaaagaaagcaaccaatcttatgcaatagaatccaaaaattcacttgtctctattttttaaaaatgggtcctttttatgaaggttttgccaaagtgtcattagtgcccagaattaaacgcaatccacttcaatccaaaatcccatactaaattaaaaccaacacacaggaagaaagaagaaacctctcatcttcccctctcttctgttgaagaaagcttaaacctttctgggtttcttttaactatggcgacaagggttagtttcttcttagctctggtaatgacggtggtgattcttgctccttctgtcgtctctggagaaaatgggttttccgatcttaaaatccgtactcacttgaaacgactcaacaagccagctctcaaatcgattaaggtgaattccacagtgatattagagagaaaactccataaaagtttcattcttttgctgttttctgggaataattttgagtttcttaaacagagcccagatggagatatgattgactgtgttccaatcactgaccaaccagcttttgctcatcctctgctcattaatcacactgtccaggttctgtttactcttctttcttttgtttgattctctgttgtttttcttctgtatagttctgacattgttgttgtttatgggtgtattatagatgtggccaagtttgaacccagaaagtgtatttagtgagagtaaagtttcatcaaaaaccaagaatcagcagtctaatgctatacatcagctttggcatgtgaatgggaaatgtccaaagaacacaattcccatcagaagaacgagaagacaagatctttacagagcgagttccgttgagaattacggtatgaagaatcagaagagtatccctaaacctaaatcttctgagccacctaatgtccttacacaaaatggtcatcaggtaattatttttcttcacatatgaattagttttggccaatttttgttgtgtctattaacctcttcctttaccttttgttgttgatttagcacgcgataatgtatgtcgaagatggggttttctacggggctaaagcgaagataaatgtatggaagccggatgttgaaatgcctaatgagtttagcttagctcagatttgggttttaggtggaaatttcaactctgatcttaatagtattgaagctggctggcaggtatttttcttctttcggtttttgatagttctttcctgaaaaagaaactgtttttgattcaaagatttgtgttttcaggtcagcccacaattgtatggtgataataggaccagactcttcacttattggactgtaagtttcagactattcaatctagatttttgtttttgtgtgttttggctttcttgatgaatcattcttttgtctctcacttgtgaaaacagagtgatgcataccaaggcacaggctgctataatcttctatgctcaggatttgttcaaatcaatagagaaatcgcaatgggtggatcaatctctcctttatcaaactatggaaactctcaatatgacatcaccatactcatctggaaggtaaaccaacaacaaatatccatgttgttaccatctatttagtggtttagctatggtttgagaaatttcagttttgtttttttgttttttctcaggatccaaaagaaggacattggtggttacagtttggagagaaatacataataggatactggccagcttcactcttctcttacttatcagaaagtgcatcgatgatcgaatggggaggcgaagtggttaactcgcagtccgaggaaggacaacacacaaccactcagatgggaagtgggaggtttgcagaggaaggttggggaaaagcgagttacttcaagaacgttcaagtagttgatggatcgaatgaactgagaaacccggagaatcttcaagtgtttactgatcaagagaactgttacaatgtgaaaagtgggaatggaggttcttggggaagttacttctactatggtggtcctggtcgaaaccctaattgcccttaaagatttggtcgacttactcacattgcagatcattccaaatcaattgtataaaaaacatataatatatatatatacacattcttaagtatattattaatttcaggtttgaagagtggtatatggtatattcaaattcatctgcagaatttgtttgtttgtgtgtttgagagtgttttctctgtttccatggagtgaagagaagataaatttcttttaaagaacatggtcccatgtgtatactgaaatcaaatgatcccattattaatttatttgtatttttttttttgtatatgagtggtactttgttttcaatgacctgtgttaatagctttgtctgtatgtaccaaaacatggagatgggacttttggctttggatcttcattaatcactcatgtttaacagtatctatcagaattattggccaatcttcattacactaatactattatgtataaatctattaactatttttgtgatacttcatttaagactaacataaactttgttttttttttaattatcagcaagcttccattgtattggaactatgtttttgtgattgatcaacaaaacagaagcaagttaaaatttacaacttgaaatttttttcttataattatctcaaattaaacttataattacatctatgtgaatgacagatctatcttctcatgtccactgttatagtcaacgaaatgtttggggccataagccacaagagagttgactttgatcacgttgacgagttctcaatcataaaagcataatcaatttaacatagtatgagacttataattaatttaacaaagtattcaatggtgccaaaagaaagttcaataaagtaccgaccatattaaaattcatgtagagatttaatttaaaagtgaacatggtgcaatttacaagttcgtgacctctacgcggaatggttcatgcagagtaacaaacaaatgataatttaatttaatagaatgataattgatttatatttgcttcaaagagaaaaaagtttaaaactgaattatatccttcttgtcaatgtcacagatagtttaatactttatatagataacgtcgaagacgaggttacaaaaaaaaaagaaaaaagaattctggttagagttgagaaaaaatagtaagttatgtagcattccacttctataaattccaatgaatactgtctaaaagttttgctaagaactgtatagccatgatgagaatgaccggtttcatagtagctatgatgatagcagcggcgatattcactacttgcgttgatggaaacaagttcttttatcaccgggaaattaaagtacttcgacatttgaaacggttcaacaagcctgctcttaaatccattaaggtacatatcttatataaatttcatgacaaaaattaaagaaacctttttagagatgaattctaatacgctttcattaatctttcttgcagagtgaagatggagatgtaatagattgtgttcctatcactaatcaaccagcttttgatcatcatttacttaaaaaccataccatccaggtttggtttcacttccaagtctatctattgttttaaaacattatgatttttgaatcaattgtgacgtaaagtttacacatgcagatgagaccgagtttctacccggtaagtgattctacgtacaccaagagggaggcaaaggctgtaactcaggtttggcacaaggctggagagtgtcccaaaaacactgttccaatcagaagaacaaagaaagaagatctcttgagaccaaaatccatcaggagttttgggagaaagtctcatcaaagcattccaagaactacaacctttgatccaacattaggtcatcaggtacaagtcaactacatgcacacacacacacaaacacatgtgtatcattgttaatgtcttgtggcttacgcttttcatttcttttggagtgcctttagtacgcgctaatgggtgtgagaaatggaaaattttatgggacagaagttgcaataaatctgtggaaaccatatgtccaaattcctaaagagtttagcttggctcagacttgggttgtgtccggaaatggctctagtctaaacaccattgaagctggttggcaggtttggttccttcttgactacatcctctttgcttttatgcaaaacacttaacttgctctaatattttttgtcttaatttataggtttatccagaactatatgatgataataatcctagattctttgtttattggacggtatgttctccttttcagcagatttaggcgtacttatctcttctactatacactaatcatttgaaaaacataaagattgactagttttctgatccggaatagaactatagaagtctataattcaagttaagtctctagatttatgtatttaaggatttaattaaccattatgaaatcgttttttttttttgggaaatagcgtgatgggtaccgaaaaacgggatgctacaaccttctctgctcaggttttgttcaaacgagtaatcgatacaccgtaggtggatcaatcaccaccatgtcacgctaccgtggaactcaatatgatctctccgtacttatatggaaggtaataacgtaattatatttcacctcaacaacatcagattcaaatattcaacgtaacttcagtggcaagttacataccttttcgctcaagttacctctccatctatcttgaaatggatatcaggaccaaaaaacaggaaactggtggcttagagtcaatgaaaaagacgttattgggtactggccaggctcgttgttcaattctctaggaagagaagctacgagagttgaatggggaggtgaaatcattaactcaaagaccggtgggagacacactaccacagatatgggaagtgggcattttgcagatgaaggttttaagaaagcaagctatttcaggaatcttaagatagttgatggaaccaatactcttagagaaccacaaggactttacttctttgctgataaacataactgttacaatgttaagacaggaaatggtggaacttcttggggggctcatttcttctatggtggtcctggtcgaaacgttaaatgtccttgattaggatctgtgtgttcaaaagcttttataatctcacatacacatgtctatatttgaataagaacatttgcgaaaaccacgtcatcagagatgtttatatctgtcatttttcttaatttattaatgaacagtctgttgacagtgaaattgaaatatcgagaataataaatacgtacatattgataggtaactaaaatacagctggtttaaatcaaattgcaaaaatataaaacattgcacgtttaacaaatgtaaattaaaccgtgttcgttattcgttattctttgaccagttgaggaatcgtttggacggtagaatccgtcactatgcctctggaatatatataacgcatgaatccgttaaaacaaaactagaatgataaagaattatgtattgttttcaggtaaggcaaattatatagatgtgaatatgtgatatatataattgcagagctttaatgtgtattatatatacacaatgttttgccatgatgttatattattcataccaaacaatccacaagggaagtaacatgcgaaatggttagacgtgcaaaacattgcaaaaaatctataacaaattaactatgttgatcgaatcaaaggccacacaacataacagtgatttgcgatgacttttcgtttcacaataaataccaaacatgtgctgagtttctctttagataagaccaaatccttgaaattttgtgtatgtggttggttgatctaactcgaccaactatattgattctgtccccatttccctttaattctgtctttaccacaccacaacactaatcataaaacgtcactgtttgtctttgattttgaattcgtcaatatcaaaatgggtaacaattcctctgctcaaagctcaacaccttctttgccgattgattctaccttcaatcttccttctccattaccatcttggccttcaggttcttgttttgactttaactttgttttcctctgtttcagctctgcttttgctctgtttatgaagttttggttcgattacaggagaaggatttgcgaaagggagaatcgatttgggaggtcttgaagttagccaagtagatacatttaacaaagtatggactgtatacgaaggaggacaagataatctcggagccactttctttgagccgtcttcagtacctgaaggcttttcgattctcgggttctacgctcaacctaataaccgcaagcttttcggatggacacttgtgggaaaagacctctcaggcgactctttaagaccgccggtggattatcttctcctttggagcggcaaatctacaaaggtagagaacaacaaggttgaaacaggatacttttggcagcctgtaccacctgatggttacaatgcagtgggtctaatcgtgacaacctcggatgagaaacctcctctagacaagatccgttgtgtccgttccgacctgaccgatcaatccgagcctgacgctctgatatgggaaactaatgggtttagcgtttcgagttctaaacctgttaacagaggaacacaagcctctggagtcagcgttggcacgttcttctcaaactctccaaatccggccttaccttgtctgaaaaacaacaacttcgatttttcttgtatgccaagcaagccccagatcgacgctctgtttcaaacttacgccccttggatctatttccacaaagatgagaagtatctcccatcatctgtcaactggttcttcagcaacggtgccttgctttacaagaaaggtgatgaatcaaacccagttccagttgaaccaaacggtttaaaccttccccaaggtgaattcaacgacggtctgtattggttagacctacctgttgcttctgacgcaagaaaacgagtccagtgtggtgatttgcagagcatggaagtgtatctgcacataaaacctgttttcggtggaacattcacagacatagccgtgtggatgttttatccgttcaacggcccgtcaagagccaagctcaaagccgcttcaatcccgttggggagaatcggcgaacacattggagactgggaacatttcactcttcgaataagtaacttcagcggcaagctacatcggatgtatctgtcgcaacacagcggaggaagctgggctgatgcttccgagatcgagtttcaaggcggaggaaacaaaccagtggcttacgcttctttgaatggacacgcaatgtactcaaaaccgggacttgtgttgcaaggcaaagacaatgtggggatcaggaacgatactggaaagagtgaaaaagtgattgatacggcggttaggttcagggttgttgcagcagagtatatgagaggagaattggaggagccggcttggttgaattatatgagacattggggaccaaagattgattatggtcatgaaaatgagattagaggtgtggagaagattatggttggggagagtcttaagactacgtttaggagtgcgattaaaggattgcctaacgaagtttttggagaggaaggacctactggtccgaagttgaagcggaattggttaggtgatgaagtttgaatctctgtcatttaattattttactgtttttgaatctctttgtttgtaacaggaattaatcttcgttgtcacttgacccatatttacaaatttataattcctgttatccctcgttatttgttgtgacaagaaaataaaaggttcaaaacagcatcttagatagtctagtcgtttgggcaagaaaattgttcgagtgactcgagtcaaaagcgggcattaatattgtttttgcaccttttattctcacatgcccctctttaagaaaataaaaccttttttcgttttgtgatgtttcgtaaccttaggtttcctttatatctcttcctgcctaaaatgatttcgttgaaaatgtattttcttttgtattgtcaattaatattttcagaatattgttttgttaaacaaaaagaaaaaaatcttttatctcaaataatgacgttgtatcttcacataaaaatcatatttccacgataacgttcttttgaattttcatgataggtaattaagtccttgtaaataacgcgtttcatcacaagatcaagatgtggtgatgtttaaagtcatgagtcaattttattaattttttatggtgtatttattgtaatcactgaaaatctaccttaaaatgatataaagtttcttaatttttagaatataaatgataaagtcatgagtcaactttttggtttatgatttcaaaagagttttagtatcataaaatgttatgtagaatttgttgttattcaatcaaaaatttttaaaagtatgttaaggttttgtgttattcatttaaaatttgtaaaaagtaatataaaatcttcataaatttggggttattagatttatgcacttataaagtcagtaaaagttttgtgttatttaattagaacaaaaaaatctctgattattaatcatttaaattattatgttattggttcatgacttataattaagtccttgtaaacaacgcgtttcatcacaagatcaagatgtggtgatgtttaaagtcatgagtcaattttattgttttttcatggtgtatttattgtaatcactgaaaatctaccttaaaatgatataaagtttcttaatttttagaatataaatgataaagtcatgagtcaactttttggtttatgatttcaaaagagttttagtatcttaaaatgttatgtagaattggttgttattcaatcaaaaaattttaaaagtatgttaaggttttgtgttattcatttaaaatttgtaaatagtaatataaaatcttcataaatttggggttattagatttatgctcttataaagtcagtaaaaattttgtgttatttaattagaacaaaaaaatctctgattattaatcatttaaattattatgttattggttcatgactttctatatttttcttcacaaaataaaattataggaagttatgaaaagtattataaaaatatagagatttgtttgtaaaactttacaaaattatgaaaaactaatcaacaagattataaaatacatctctaacaatagtttagaatctttcatttatttactttctaggatttgaataaagtcatcaaaattctttgtaaattaggaaccaataacaccctcttaaactacatctataaatttcaaagagtagttgataaaattttatagaattccaaagagtgctgtctaaaagagttcttaatctacattgttaaataatttacatgatgggagtggccggttttgcggtagctctgatggtaacttcactgttaatcgctacttgcgctgatggaaaagagttttttcatcaccgggaaattaaagtacaaagatttttgaagcagcttaacaagccagctcttaaatccattaaggtatcttacacaaatttcatatgcatatactccatgcgttgaatattcgctcacaaatttcttttgagactaataattgttttgctttaatctttcttacagagtgaagacggagatataattgattgtgttctaataactagccaaccagcttttgatcatcctttgcttaaaaatcacaccattcaggtttgctatcatttgcaatacctctggtttgtttacacatgcatgatcgtgttgttttctcacgtaggtaaaaccaagttttatcccggaaggggaaggtgactctacgtacaccaagaaggagacaaaagctactcaagtgtggcagaaatatggagagtgcccagaaaacactatcccgataagaagaacaaaaaaagaagaaatcttacgagcaaaatcccttgaaagtttcgggaaaaagaatcatcaatacattcctgaagatacatctagtccaaattatcaccatgaggtacacaccctatacagtacaatttctataggcatatctatgttagcatactcacatgtatatattcagagtggagcaatattttcatttaaatggtagtacaatgatatttacttttgtctctaattaatatgatttggagtaatttttttttttcttattttcttttttccttttgtgatctggaatttttggatcaagtccaatataaattaaccgaaacggctattacatagacattatatattacatggtgaatcctaatcacacgaatttccctggtttagtacgcgttcatgggtgtgagaaacggaaagttttacgggacaaaagcctcgataaatgtctggaaaccagatgtagcaactcccagcgagttcagcttgtcacagacttggatcgtatctggagatggcactagtcgtaatactattgaagctggttggcaggtttgatcttccgtcctaaatataaggatatcttgcaggacatcataattaacacaaccttaatttgtttgccttgatttataggtttatccaggaatgtacggtaataatgatcctagattatttgtttattggaccgtaagttctcatttttccaccctaattaaacacacacatatatatatacttcaaaatagaaaaatttgtttctatttgacgtgttgagaatccgaaaccatgcaaacatatttttcaattcaaaatatgttttatcttgtaaattaagattttcctccgttactaatgaaagttcatgcatgcttatatatattagagcgatggataccaaaagacaggatgctataatctcgtctgcggtggttttgttcagacgaccaaccaatacactgtaggtggatcctacgttaccgcgtcacaatacgacggagctcaactagttctcaacctacttatatggaaggtaataataccgttattcttttttccaccttaacaataccaactatcttatcgtatagtttatatctactttatgaatctattataattttcaatttttctatctgtattttgctcaattaaaactgtaaataaagctcctccactaactccaatttaaattagcaaaacagatcacaaatccttttgttatgtactaaaggaaaagtcaggccagtgaaaataaccttagttaatatattagaggcaatcttgttttctaactcttcattaatttattggaattgcgatcatcaggacccaaaaacaggaaactggtggctaaagattaatgacaacgatgttatagggtactggcctggctcgttgttcaattctctaggagatggagctataaaagttgaatggggtggcgaaatcttcgcgccaaccagtgatagacacacaaccaccgatatgggaagtggacattttgcagaggaagggattaagaaagcgagctatgtaaaaaatattatgatagttgatgggacaaatgctctgagagaaccacaaggactttactcctatgctgataatcgtaattgttacagcgttgtaccaggaaatgctggaacttcctttggtactcatttcttctatggtggtcctggtcagaacgttaaatgcccgtgatctgatctgtgtgttcaagcttttgatattacgcatctatgtttcaatgtttgatcctatctatctttaattatagttaagtgctctttgtctatgtgtaaggcttcatagtttataataaagaacttttacgtttgttccaatcctctgtttataaatcaagttttaaggaatgaattaaaaaaaaaacttaaatgaaaaaacaaagggataataggatatccgatgatatttcttatttctttcgtttttataagatgatttaaatgaaagcacaaatattaagaaattatgatttaatgcataacaaaaattaagccagtcaatgaaaacatatagtacttaatttgaatagtcagaaactattaaataaataaatattttctctagacaatagagaaaatcaaataatataaaacaaataaaaactactacaacattttatataagggaacagaagaattattattactccatatataagatgttttagactttttcttttgttccattttattagatgttgtgtagatttctatgcaaaacttaaatacatttagtattttcaaatcatttttgttagtcagtattttatatgattggttgaattgttttaatatacgtgtttttaaccaaaacatcttataaaatgggacagagagagtaatacatttggttaatatacgtgtttttaaccaaaacatcttataaaatgggacagagagagtagtatttactgcatttagttaaaattaggtttactagttaaataatttataaagtagacttaaattgaatattatatttctaaatagattatttctgtaaaaataaaccctaaaatatatttatcaaatcttttaagattttaaactttcttatattttctatttgatcatttcatattaacgcgattaattaaaatatgttttgtgacttcaaatattttggttttatttaaattcttgctttgtatttatgtgattaacttagtagtctctttaaatagataaaataatcctcagaactataatatttaaaatctagtgacaaaagttttctttattaatactatacttttccaatttttagatttttaaagatatttttaaaaaatttgaaagaaaaaaggttgaatgttctatttcttacaagttacaaattaaatatacacaacacaatatataccaatgtcccagttatcttcccaacaattatttcaaaagtataacgttatacactaatactaacaatgatgcttaatcagacagtgatcttcttccttctttgggtgatcatagcacttgtagtcgaaattactttggccggaaagatcacagtttctgatatccatgagcagaaaatcgaacaacggttgaaccaactcaacaaacccgccgttaaatctatccatgtattcgcaacgacttttaattacccgtggtttgctattcccactattttcttggctaaatgcttttatgttttcctttaatatttatattgaatagagtccagatggagatataatcgattgtgtatggatctatcaccaaccagcttttgatcatcctttactcaaaaaccacaccattcaggtttttttgtaatacttttttttattcactcttcaaaatcatattacctctacgttttgccctaacgcttcttgtttttttcgaggaagatgaggccgaaaagtgactcgacaagggacaaaactggaggtaacaagacagacattatccatcaattgtggcgcacgaaaggtgaatgtcctaagaacactattcccatcagaagaagaacaagagatgatcttctaagatcagattccatcaaaactcatggaagaaagaacccaccaaccatttctccaactacttatcacctccccgatgatcagacagaagttcatgaggtatctatatccccggctcaaagttttttttttaaaagtgattaaatatttttgacgctttaatttttataattttgagttaaactattaagagctacccttaactattataccttactttaattgtagcatgcgagtgtgtacctggactatggtgaataccatggcagcaagagccgtataagtatatggagaccagacgttaatatgaccgagtttagtttggctcaaacatgggtcgtcggtggagattgggacactgttttgaacactgtggagtctggttggcaggtcagtgctatttttttttttttaggctaacacttctctttttgtgtgtggggcttttttttgtaaaaaaaaatggatctcaattaggatatatgtgttgcattgttgcaaaatttactgattttataaactcaatttgaatcgataataattggatactcagatataccacattatgcattcagaagttctactatttctaacttcagtttttttttaactctttatgatagatcctacattctatgtacggtgacaataatacaagacttttcgccttttggacggcaagtttcccttttttattaatcttaactaagattgtcatgcattgactaagggttaattactaatattttctgacaaaacatatagagcgattcatatggagacaacagctgctacaatcttgactgtccaggctttgttcaagtgaataaagatattgcccttggtgcagccctcaacactatctcgacctacaatggtaaccaatatgatttccttctaactattgagaaggtataatttatctacaagtactgaacaaacacaacttatagcagtttcaaaaagagtgtcatcactaaattgagctactatacctattttaggaacaagataccggactttggtggcttaagtttgatactcatctagtcggatactggccaagctttctagtcccgaagctagcagactcagcacggatgatcgcttggggaggtgaaattgtgtatgatgctagtggccaaaatgaacatacgcttacgcaaatggggagtggccatttcgcggaagaagggtttaagaaggcggcttatatcaataacatagagtacatcgataaatctaatcatccgatcaaaccctttcctcaaaatcttgaagcttctgttactcggcctgaatgctataacctcaaggttggctctagccgaagatggggaacttacattttctatggtggacctggacgtaaccctcaatgcctatgaaaagtgacatgatttttcgaaatttatttagaaaatgtttgggacaacccttgtgattgaactgaatagcgttctaaagatgtaaactttttaagactaataaatggttttgcatttgagataaaacaaaaaagatcatatcaatattttaataagcaacacatttttcttgttaggtcataaaacgtaacaagtcggtgtcactaatttacttatcaagtgataccttgcacgatttgtaacttgcagaaaaaaagaagatagaaggatatgataaaattttatgcatatgtagaaaaaaaccttgcacgacaccttccgttagatcgatcagctttgacttatacgtttaaatttgcgtttttgtcattcacagagaagaatatgctttacacttatcctctctttcttatttctatattcttgatgagtaaagtaattgacaccaagatactgcatttctatataacccatgactacaagtttcctctgttttaacaaaaaacgaaaaaaacaaacaagtttcctctgtttaaatatcaatcttcctgtttatgttccgctatcccaaaaatgggaaactgcctttcaacctctgatccatctcatgaagatgtatcaaagaagcttcccaaagcacttcccgtcgatgctgcattcaagtttccttcaccgttacctacttttactcgaggtttgtattatcatcggttcttactgatctctctctctctctctgtctcccaattagttttgataatcttgatttcacttgcatcatcaggtgatggttttgcgaaaggaaccattgacttaggaggtggtctcgaagttagtcaagtttcgacattcaacaaagtttggtccacttatgaaggaggaccagacaatctcggagctacattctttgaaccatcctcaatcccttccggtttctccatccttggctactacgctcaaccaaacaaccgtaatcttttcggttgggtactcacagctagagatctctcaagcaacaccttaaaaccaccagtagattacaccctcgtaggaaacaccgagtcactcaaaattaaacaagacggaaccggatacttctggcaacccgttcctcctgatggatatcaagccgttggcctaatagtcacaaactactcacaaaaaccacctctagacaaactacgctgcatccgatcagatttaaccgaacaatgtgaagctgatacatggatatggggcacaaacggagtcaacatctcaaatctaaaaccaaccacaagaggaacacaagctacaggagtctatgtaggtacatttacatggcaaacccaaaactcctcgcctccatcattatcttgcttaaagaacacgaaactcgacttctctacaatgccaaatgggtcccaaatcgaagaattgttccaaactttttctccatgtatctatttccatccagacgaagaatatctaccttcctctgtcacttggtacttcaacaacggagcattactatacaagaaaggcgaagaatcgaaaccaatccctatcgaatcaaacggttctaatcttccacaaggaggatcaaacgatggatcatactggctagatcttcctatagacaaaaatggtaaagagagagtcaaaaaaggagacttacaaagcacaaaagtgtaccttcatatcaaaccaatgctcggagcaacattcacagatatatcaatctggatattttaccctttcaatggaccagcaaaagccaaggtcaaattcgtaaatctaccgttgggtagaatcggagaacacattggagattgggaacacacgacgctacggatcagtaatttcaccggagagctttggagagtgttcttatcgcagcatagtggtggaatttggatcgatgcttgcgatttggagttccaagacggaggaaataacaagtttgtggcgtacgcatcgctacatggacacgcgatgtatccgaaacctgggttggtgttgcaaggagacgatggggttgggattaggaatgatacggggaaaggtaagaaggtgcttgatacggggttagggtatgaggtgattgcggcggagtatgacggcggaggagtggtggagccgccgtgggttaagtatttcaggaagtgggggccgaagattgattataatgttgatgatgaagttaagagtgtggagaggatattgcctgggcttttgaaaaaggcttttgttaaatttgtgaagaagattcctgatgaagtttatggtgaagatgggcctactgggcctaaactcaagagtaattgggctggtgatgaaagttgatgaaatgttggtttttcttttagattgtttgtttggtttgattctttgtatataaaattcttcatagaccttaatgtaaaactattatgttttatatgtaaataaataaacattgtgtggctaagtacaaaaatttttattggaaacttatgaacagatttgtttcataaattcataattaaacccttcagatacaatcataagccaaaaaagaaaaccaaaagtacaattaagttctacaagaagtttatgaaaggaaaaaaaaaatcttttctttttctatataatcaaatcattcactatgactcatacgattttgtagcttttttctcaaaattttagaaatccagagatccacattgtttgctctctatagattttgctacagatccaggcttctttgtttccttattatgatcaccatttacgcctcgaggtcttccaatacccatcttaggcaaaccacggttcagtccttccagcaaaacacaagctttacaccatttctgcatatcatttgtaatccaaacaatcaaacactatatactaactctaattatggaaaacaatttacttgatgtgataaaagagaggtctcacctggctagaaatatacccgcatcgctcacacgtcccttgctcaggcatctttgtggttgttgcaattctaaaatcttcaccagactttatgatgtccagaatcgcccttggcctgcactttgtgtaagttagagatctctagttttcttatttcattctagcggatactaaacaaaagggttgagaaagaaccttattctttccaaatctttgatgaactcacgggcaaacccacgatatgcattaggagagtaaatgcctgcaaactcaaaaaaaaaaaataagccataaaaataactagagattggctgaaactataacttaggaacagataaaacctacaaaaaatcgatgattgtacacttacattcagtggagaagtaatccagcttcttgaaataagcatacgtaaagctacgttaaggtatcacaatatcttttgttgacaagtataagcgatatatacaaaagcattatgtagtgaaggatatatgacaatctccttttcgtatgtatacttgaaaggtttacatcttggaatgggaccatcttcaccagtagtaatcgatgtgcacctacttaatctacagttaccaatgttacaaatatcaattagttgaggaacgagacagatttttcattttccatcaaatcatcaacaaatacttacctagcaatatcccctcgcaatatgttcaagagaacggtttctgctatatcatctgcattatgtccagtgactagcttctctactttcaataacgcagctcctcggtcaagtgccttgagatgaattaaacacaagagtgttggtggtatgcagagttattgacaaactgaaagttgaacaacaaaaagaaaacggcactgctccctacctgtcgacggaatacaccacaaaaggtgcaattgttcttcaaaccaatcattttcacaatctcatccattgtccatccatacagatctttatatgaaacaatcttaagaggcaaaccatactggaagagaaaaataaagaacccatcaaactaaaaaccgccataaaacaatcacttaacacacatagaattcaaaaagaagcttacttggacttcgttccgtttaacagtctcaagagaatcatcacgataacccgtaatcccttcatctatggacaagagaaagaggtctagcccataattgtggcgtctgtttagttctgataacacatatgccagaacagtagaatctgcacaaaacaatcttaaaaagttacagtatgttaaagaaaaagatcaatcagaatctaagcaatcaccttttccaccagaggcacctatagcaacacgttcaccagatttgaataaacgattctgaacaatgacttgatgaatctcctcctcaaaaacctcataaaagcactctctgcatatctttaaaacacacatactcaatcacttctcatacataacacaaaaataagagactctggaaactagcaatagactgaaaaactaatgattgtcgttactttcactattgatccaactccgacgaactacattgattattttgatttgattccacatagagatcataatccaaaccaatgcaattcataaagagtcaaacctaacactaacagtatagaaatgtgttccaagcttctgcttaatatgttagctaaaacccaacgagattctacgagaaaagagaaataaaaaaaattgaaaagttacctgttgaagggttttaggtcttttgaggacgggacgtctcaggttgcataagcagcagagacgggaggctactgctttcttgttcttggcctccatttttcaccggagctcatgcggagaagatttccgggattactagtcggaggtggaaaacgacctaaacctaagtgtcggcgtgaaacggcatcgtcttgtgtgtgggccataaatgggctttgacggaactcgcactttagatttaaacggcatcgtttaagcggaggtatattcagagtgactcagtgttgcagagtttgactttgtcccatcgattaagctaaagagtaaagacagtgacgcagttattttgtattaaagtctctactttgtaaatttactgccaaaaacttgccttccatagttccatgtccatcgcaaaagtttcagcggtggtagttattccaacaagaatctgaacaaaatgtttggacttgagatctttagatagatgttttgatgtttactcagctgtgttttatttgcaaggatgaaagaatcagccgagacaaacaattcttggtgatccaggctcattttattccttgtcctctgttttttttgtgtcctatgtctttacttgctctgtttatctgattgctctgttcgagtgttctgttttcttttcattgctagctctgttttctgtgctctgctatctttttgctctgtttctctaggtgctccgtttttcaccggctctgtttctctacttgttatgtgctactctgcttgacccttaaaaatggatcagatgtttctctctgaccctgagagcatcatcattgctagatctagtcggcgaaaaaaaaaactgaaacctttcctccatttatcaaccagtataagctggaagatcacaaaacaggtttgcatgagtaactgcttaaaaagacataattctgattgttctccattatattttcctatgtttatgtgaataaccaaatgaaagaacttaacattacaccacaccaaaaaataaaagataaacattgatcaattgctttgtgaatcaaaaaatttcctttctcagactctgtagaatagagaaactatttaatggattggattaagttttgattctcacgtggatatgttcatcgatcatctatgttctaaatttctaatgaaaacaaaaacaaagggtaagaatcagaaatattcatgattctttctgcaaggatatcacaaagagtcaatctttattcatcttcagagtctcagacaaggaagattcaatgaaggaagcgattaaagagtagacaacataaaataaaaatcaacttgcattaatttttaatgactttcagtaattcttgtacaaatgttttgcctgtcgcagtgtgatataaacctattcttatgaacaaaaaattagcagactgaaacatttactgtcaaacagtaaccaagttttgagctatatgtgtttaccagatcataagcattgtgtttcttctttctgttcattctagtagtagcggttgacacagaggctttagaatcgtgctatcgagttccataaaatatgttacaacaactccaacaagcgagcatacagctggaacaagtcctaacccatatcttgtcaccgagaagtaaaaatattctttgatgtttacgtcaacctttggtgaagtgcctgcaccattttccaaattagacttccatcaattttaagataatattagaaagaaagacaaaaacttaccttgatgtgactgaagaacatataaagcaagcccacatgacattttgtctaagaagcttaatgacccacaaacgaaagcacatcccccgagtttcgaaccaatcaagacactctgcatactaattgatgtcacctgtacatattgtgattatcaaaagaaagatcttctagttatatgtaaacacatgaagacttctgtaacaaaggagtgtcttaccaacattactgcatttgcgatgccgataaagacagagatcgcatacatgtaagagttaatgcttctgggcaataagagtattgatataccgcagaatatccaaataataccaccagcacaataatatgccttgaggcgttttccattccaaggaatctcctacattgaatggaatatgtagttacataacagatagaaaacaaaacaaaaagtttagaaacgaagaagaatgcgtttaagcttattgcaacctgaagcataactgatacaacgaagctgcatacgtagattattgcaggaatctgaaaattaaacattgatcagaaaaagtttgatgttcatagagatgaaagctaagtgcagtggttctctttcttttaccagagctttagcagattgagccatttgcaaatcatcaataacaaagaatgcaagatatgcctgcaaatattaaagtcatcctgaaacgtaaataaagatggaatacaaatgaagcaaagcatgacagatacagaaactaactaacctgtgaaacattcaatactagtcgagtgaggagataaaccatagcaacttgatagtatagaattttacggaaccaataagaccatggtattcttgctcgactagtttctcttagatttatcctcagcctttgaaaattatataaaagcaactcattctcaatagatatctcatctattatggcataaaacttcggtaaaaactgatataagcatttcagagaaaagtgtgcattaccttggttcctttgtccccataagaaatatgaccacaaagcagcagccaacggtgatggatgaataagcaatccaacgatactgtagacttaggcagacttagaatcatatatcaaaaggcattaccataaacaagtcaatagaagcacaaacctgagattcggtattttcttttgtcacggcctcgctaacaccaaatacaactaaagcaatagcgtataagcctaaattagcaacctgaataaacagtcgatggaaatgttacatataaacctaaagaggcattttaaagagcctaaataacactaaagggaaagaactaaccatgctaaacgcattacgggagcttgttagtgctactctgcttgttgaattcaatgtaatgcaattaaccatagccctaaagaacataaagattatgcaaaaaatgaacatctcactgattaaactttgagattaatctaaagggaagatcaaatgaaagaagaaagattgttttacatgtgagaaacctgagtagcagcccatccaatattgaagatagctgcaaacatactgtacgataatgtttcgatagttgaagagttattatggaggagtgaacaaggcaaacaaccgccaaaaacagaggaaaatgagatagcaactaataaggatcctgcagcatgccaaattttgaaatgcccaaatctatcaatctgtcatatgaagtagaacaaaaaatcattttacatcaactcagatttaccttaaattacacaagactacaaattttgtgtgattgaaaactcaaaagttccaaaagaagttaccaattcaccgatgaagattgtagcaaaaccatcagcaacttgaccagagagcatgacaattgcagcatcccttgagaacaaatctcgattaatctcactaatccacagattaaaagtgaagaactttttacaaaaactgaggagaagattttaccttggggagaggccaatttgggttaaaaacaagagaaggtaagtgaaccaacaagaagcagtaatgtcattaagcatatgtccaactccataatagaacacagacaatcttccaagtggttttgtcgatggatcttcttcttcttcttccattccgacaataaccgatgacgtcatcaactaatcgttttcaaaagagacaaaatttgtttttgttttcttcaacaattcgaacctgcaaagacgtgcatgcaaaacccgtcaagaatttggaattcccaacacctggaatagactaaattgcatctaaagattcgaacttttttatcagagaaattgaggaagagaagagagatttcgaaacgagcaaggaacaaactttcgtatctgcctgtagggtcgaaaggaagaaactttcgatctgaaaaatcgaatttgagtcaacaaagcctttttattagaattgtcccaaagtacgggaattagaaaaagaaaagaaaagaaaaaagtaacggtgaatgagaaagtttgtgtgagctctgcttaacgagaaacttgcatcattgtatttgtattaataatacgttacactaattttattattgtctgcgtaaacacgttattcttttcgaatttagtattcttgaccacaaaaggaaaagaataatcgaaaattcattcacacgatcgtgaagagaagagacagatagagaagataatatgggaaactgtgcggtcatgtgattgctctatggatttgggcatgggaagtttttggatggtataataaaaacgtttgcaacagattcttcgaaatctagttgtagttgaatatattttggttctctatgtgctgttacttgtctgcctgaaacgaatatatttttgcaaaacatttatgtaataagagaataatttagcaattttgtacaaataaaattagttaggctaaattcggcgggttgccgaaatgttcaactacgttttgttaaattatattgaattgttcctgacttcatgtaatccttactcttggatgaatcataaagttgaagttcagtagtccggttttgattgtttacatagaaacttattaaagacttgccatttgtcaagtgcaccaattaatatcagttgatatgtaaacatattacaacttggatactgaatctacagcttaatttgtgcccttcaattcaatgatcatcatgttctatttttgctttgtggtttacctcttttatttttcttgtggattcgatccctcactcttctctttgctttttctgatttttttattggtgcataaaattttttaataaaatctttatttatttcaaatagccacaataataattccaattaatctgtcgatcaatagactaacgtaaatgaaattacgtttgtatgcatgaaattaagagaaaccaaaccattagactcaacgaactcaagtaaaagattttaaataaaattgataaaagcaaacgagccatagaataactattgctcgtgtcttatgttgcgccatacaaaaaataaaaagctgagaagagttgtcacgaagtgaaactacattcatcagtcaaaagactcaaaactcaaaatcaacgtcaccgcaaatgtccacagttgcacaaaaccaacgtcacatccttttcacttatctaaacgaggatgaaaatataaaaaattacgaagaaatgggcaacaacttcgagccctagccattgtttggagaagctttgagcgtggttcgtgcctggcacagaggtcgtccgaccactgttgttaccagcactggatcctggggtcgaagacatactagtgggctcagaggccgagccagtgggagcagaggctgagactgtttcgttcagacctttagctagctgatagaacacttgggcatccggagaatttgggtccaaatgaagcaaagctgaaacagaacacccatcccaaaaatattactagtctgctaatattagtctataataaattttcacttgtttgtttaaaatgtctatacatactctgttttaatcaaaccgcacgtaacaaagaatatatcgtaaaatgcaagagaggtaaaaccaagctacgaaccagggcacttagtgatgtcagcagtggcgtggcaaacagaaggaagagcgagagcgagagagacgttgacctggagacccaaatcaggatcattcctctcttggatgatcatacaaagacacttcatgtcggaattaataacttgtttgaggccggagcaacagtctggcgtcggagattttgcctttccttgcacgtaaggaagacatgtggccataccgaccagctgcgccgtacactcttccttgtctttccctttatcagctccggcggcatccaccaccatagccaccattattaaagctattgctgtcgccattactttaatcttccgtgactccattttgtttgttctgatttaagttttcactaccatttgtttcctaactcatctagcattatttatctttttctaaaatattattgtatatgtaagtttctgtgaaattgcatgcattgccgtgtagacaagttcatggatttattttttatttggtaatgaaaaattgtgagaacaggtgattctcgaatgtcaacatcattatctccattcgcccaatcggttaattaataattaataagagtatattttatcgagactattaattttttttaaaaaaatttcggtacgtaagtcattttttaactagctagaacaatcctccatgattgttgattccattcttcttttttctgatttgattttttaaagaaaatgtgagataataaatctcaaatatcaaaaaaaaaaaaatcagttatctccagacgcgcaatctgtttatagtagattttttttataacaaggcaaaagtttatcaactttataaagactttggtaagtcaattttcaaccctttttgttttgtttgaccgatcctttttttgttttttttgttaaattcaattttcaagctcttaaaaaattcaatttttaaaataaaaatgcgaaccatttactcatattgattattggactcgactgttttttggtaaaacttttctttttgcaattataataaatttaaatgaaaagaaaaacattaattcttgctactatttcattccatttgttttagttatagtgaatggtgatgttatggtgtatagaatttagagaaaaatattcttgctttcggtgatgagttgagaccaaagggtaattcttctaaaaggcactacaattctacaagatattttactagaagcatctcttttttgaacttcaatccctaaaccgacgctaaaaccaaacgaaaaaaatgtaacttggcgtccacatactcgatgaaagaaagaaaaattgatacctgacgtaccgtacgtacgtaagtgaaaatatgtatgtatacaactaaggctagcacaaccacataataaaatttagtgtttgttttttgtaagtgattatagtatttcagataaaactgataaaaacatacgagacatagaaaaactgtagctcgtattgcgtcacacaaaatatcaagaagagttctcgaactagaattaaatacaccaatcaaaacagtaactgcaaaaatcagcgtcaccgcaatttcactaatcaacatcacatgcttttcagttttcgttatcattatttatctatacgaggatgaaaatataaaaaattacgaagaaatggaacacaacttcgagccccagccattgtttatagaagctttgagcgtggttcctgcctggcacagaggtcgttcgaccactgttgttaccatcatcggatcctgaagtcggagaaatgcttataggtccaggggacgagccagtgggagcagaggctgggccggttttgtttaaacctttagctagctggtagaagacttgggcatctggagaattcggatccaagtgaagcaaagctgaaaaacacccattccaaaacaattatgattgtgctaatatttaataaataattaattttgaaaacttgtttactaaaatattttcatacatatacactctgttttcattcttaattaatgtgctatattcataactacaaaaaataattacttcacagaacattgtataggtagatttttaacagtgaaaaagctacgaaccagggcatttagtgacgtcagcagcggcgtgacaaacagaaggaagtgcgagagctagagagacgttgatctggagacccaaatcaggatcattcctgtcttgaatgatcacacaaagacacttcttgtttgaattaagaacttgtttgagaccggagcaacagtctggcgtcggagattttgcttgtccttgcacgtaaggaagacacgtggccataccgaccagctgctccgtacactcctccttgtctttcgtcttatcatcagcagctgccaccaccatagccaccactattaaagctattgctgtcgccattaggttaatcttccgtgactccattttgttttgttatgctgaatttatctttcactgttgtttgttgttgtgatttccactaccacttgcttcctaacgctcttaccatttatatagcaatttttagtatctttcaaaagtatatgaaaaatggtttattgtttatgtaagtttatgtgatgattgcatgcgttgtggtgtcgagaagttcatggatattattgaatcaattgtattttgttctgaattttgtttttatgaatgaaaaattaataaataagattgatatatagtacaaatgttacattcgttaatttatttactgccatcgttaatgaggtttaaaatatactatcacttttggcatatacaattcatacatgtaagttattagattgtaatacggcgacatactaattaccatccatcctacaagccgtggttggtgatacttcaaagctatttctcaatattattcccaaaaagtattaaagtatgtgcgaagctaaaaaaaaatttgtgggagtggaaaagagaaaagggagtgtcttaccactctacaccaacccaccgagagaaagtgtccactcaatgattgactatagatttgtgtgcattgtgacagttggcgcaggctatgaagctctttgaaaaagctacgagaccatggcgtcatctatgacgtagttggcttgcctaacattacagttgcattcttattataaaatcaaaacgtaaatatacaaccaaattttctacaatcatagattcaatttcagcgtctactgccagccagtcttaactcatgcaaatcaacccaataattttttgttattcattcatggaccattagtatattttcaaaggcccaataaaattaaaaccttggtttctgacgggcccaatatttagagattcttatcttcaccgactgaaacttgtttatgcggttcccgatttatcaatgcggcaaatctatctttctttattttaataaacggaaaaacgaaaagtgaagaaaaatgggagtagtactgatcgatggatcaacggtacgatcttttgtagacgacgaagagcaattcaaaaaaagcgtcgacgagaggttcgcagctctggatctgaacaaagacggcgttttatcgcgatcggagctacgaaaagcgtttgaatcgatgaggctacttgaatcgcactttggcgttgatgtggtgactcctcaggacgagctgacgaacctctacgattcgatcttcgagaaattcgatacggatcaaagcggttctgtggatctggaggagtttagatcggagatgaagaagatcgtgcttgcgattgctgatgggcttggatcttgtccgattacgatggtgttagatgatgatgatgataatttcttgaaaaaagctgcggatttggaagcttccaagcttgagaaagcttcttcgtaatggtgatggatggttttgggatctttttgaaactgttttcgttttgttgttgttcatgttttgatgtaagtgagagtttgaataaataaaactttgtgagatttttgtgctttaatttggggaaaatgagagactttggagaaattgtgatgcaattttgggaaaactgaatcgggagatttatgaataagacttgggattgaagaaatcggaagatgataattttctggacgataatggaagtaatttggaaaaaaataagtcgtcgcctgagagattcgaactctcgcggggaaaccccatgtacttagcaggcacacgccttaaccactcggccaaagcgacttcttgctgtagttttgaaacttaactattagaattcaaaatcctgagatggcaccacaactttttggtgacatcaaatctacatattttgtatttttttttaaaactaagttattaattctctattttttatttaagaaatgtaaaactgagaattctaatagaaataaattagtgatttttttaagaaaaaaaatctctattaacattttttaccaagatcagtttaccaatatttagatttttgtttctattcataataaattcatgtttttggaattttaatcaagtttgacagctgcttattagcaaatactagtatcaatataaagggaaatcagatacattttggtaaaaataaataaaatcaatacaatttgaccaatgctatatgaacaaaataacactcataatttttttaatctttgaatagaaaagaataccaaaactttgaagatacgcagccatctttcctattacacacgttcccattagattataagaatcttaagggatctcatttgtttcttctaaatttcctcaaccaccaaccaccttctcaatgtcgtcctcctctacccaaaaccaattggagatgcgggattacacgtgtccggaatgtaacataggtcttagggttctctcattgccttccgcttctcctccatactgtcctctatgcaatgtcgcttcttacttcacttcttcgaccccttttgaagtaggtcctaatcctttcgaagacgatgaggaatctcagtttctcgatcccatggaatctcttccgaccattaagatctcatcttcaatgttgtcttccgcttcctcagacgattctgctttaccatgtgccatttgcagagaagatttcgtggttggagaatctgctaggagattgccatgcaaccatttataccataatgattgcattattccttggctcacaagtcataactcgtgccctctctgtcgagttgagctcccggttgcatctagtgaagacgatagtggtctggacatgtggtttgatgctttgaacctagaggacgacttggaggaagaagcgggagtcacgctcgatttggagcaaagtttagacggctaaaattctagctatagggtccatcgatgtacgttttataacgttttcacatctatatatatagatctaccttgatactaatatatgatttcaaatctatatggacttatcttatcatcaataaatctaccttgatactttcaatgcatgtgtcgtttatttagtcgtgtccatgtagtcgaggtatcgcaagaaatgacgaaggtctggtcgtgtttcatgctagagcttcattcacccgactagagtctctggtgacgtaccggtacactacgatgtgtcttatcgactcttgaaggtctacgcaacttgcacattaatcgagtgaaaatagtatctgacaatgttgcggcgatgaaggcaatcaataatcccaaataatggccaaatattgcattctcttgtgcaaagtttatagcatattagctgggctcaattcatgggagtgccaccgagtagcggtatattctaataaagttactagagctattgtgagaagcattatgcgagatgggagacttcaatcatatttggcgcttggagagttttcttgtattcaagatcaagtgctttctaataaagcgtaattttattctaggttttcaaaattgatcttatcgtttacgttgtgtttcaaactttttgttctaactccgatacgtttaattaggaaacaaaatccgtcttattagctaagatgaccttttaattagatttgggcctgctttcgaacaattaataaaaagacaattgtgaaatatagagtaaacaacaactagtgttatagtggaggaaggcaaaattcttaaaggaataaaaaaaaaaattcttcatacatcacattggacatgtatattgaatgaaaaaaaaaaagaatcactgaactccagttgacggtttttttttttttttttaatgaactccactctctaaatatctaaattgatggatgatatgatttctaatttatggcctttgcatatatatatttgttttaagcagttcgcatatgtagaacaagtctcccagtccgcgtaatggcatttaataatgactacatagatttttttcccccaaatttatgttattcacctgatttaaaacaaacaaacatacagctattttttttttttggtggaacaaacatacagctatttatgtaaccatacagctatttatatcgaatctctgagatttatgtaaccaaatgcgccaattatatcaaatagtatggtttacatttatagatttaaataagtttgacttctaaatggattgacgttaatataaacagaataattatcaatactgaaagtctgcaactaatatgacctctccctatgatcataggctattgtttgcaagaattaattaatcaaggtcaaaaccaccaaatagtggtttcgtacaagaattcaccaaaaagagtgatattgtataagtaaaaccaaaattatcacacttaggccaaagcaacatcgaaaggtggactacataggcggtaggcttcaagaattcaccaaaaagagtggtgttgtatacttgtataagtacatatattatattctgcttatttcaaattaaatgtaattttgtagaaatgatcattattgcaaatatgttgtaacgactagaaaataaaacacagttccgtgtgtaagttttctaagacctctcgataatactcgaattctaattcgactctccaattatctaaatatgtttttttgcaatataaataacgacaaattacgtaatgtcaacggaggttaaatccaccctgtcgctcttgtttgcttctttggcaaaacaaaagtcaactattattttatttctttgcaactttcaaattctttattgtaggtttgtatgtcatttttgtataaaatatttctttcgtacaaaataattacttaaataaaaaccaacgagtacacattttttctttgtttttaagcacacaaaggcatatctatccgtgtcgacacctcaaacatgtgtagatgaatgatctcatgcatatgtaagtgtctaaacatagagatgaaaattgatgagatagacattacaaacctatttaagtggggatagtttagaaggtaacttttggttttattaaaactaaattcaaacaaaattagcttatacgaaaattaatgatctgcgtcaagtgggatcttcatgtttattaccttggtatagttatatatatatatatataaattataagaaatatgacttaaagagcatcatcaaaccaaagaaagtgaaataaaacttatgatttgaattaggtcggttttcaagtgaccgtttcctgagtcagattttgaccccacaaatcgatataaaattgcatgccattttagtttccatctactaatattgttataagttatgataaagtaaaattccacacacgacgtcattagccaaaacaatataacgggactatcaatcatttgatcatgtagagacgcccaaaccgtagattcattattacggcttagacaaaaaatgaaactagtaaaagaagtgttttcaaatagaattagcatcatatttaattatttttctacagaaactatagggaagccaaaaacagaacagaacagacatgccgacaaattaaaactttcacacacacagacacatttgcgaccaaattaaagacatatatatggctcacgctatctgtttagatattctaactatatgatgtttgtataatattatagtttagatttatcgtcagttgattaatcacaaatcataaacacattattttattccgactgtaaattaaaaattaaactaaaatgtactagtgtaaaataatagtgatacacacataaaactttatttaaatcaagttgttgttgtgtgtcatggaggcaggtccatagctgtttcgttatacaccttctttgttatttcaatattcaagtttgttgttaatttaatgttattgactaaccaacaatccaatatatttataattatctatatataaataacccgccgcagtattattccacggcatacgaattattttggttcaaattacagatatctaaaaaaggatcaaatcttttctcaatcgtttatagtttcttcaatggagattactcaatatcaaagttttcatgaaggttcgagttctagggtttccatgaacaggaattcacaagtaatatccaagatcaaacccaagattcgcataatccatatatttgcaccggaggtcatcaagaccgacgtcaagaactttcgttcactcgtccagagtctaaccgggaaaccggcaccgggagaagccaaaaccggtaaaaagagagccaaatcaagaattacgactccccaagaaccggtttgcgatgatcatcagccggtcaacaggctttcgggtttcaccggtttactagcaaacggaggaaaccaccaggtgaaagaagagtggggatcaggtgatcagagtacttcgaacacaaacacgtactttgatctagaaggtttaattcaagatgtcggagaagattacttctcttcgtttcccatgagatcctcttcttcttcacaagtcgaaggtttcatcttcaacaacaacaacaacaacaacaacaacaacaacaacaacaacaacaacaacaccaacttcgatacaaaggctcataattcgtcttaattaataacagattaatttctagggttttcaatcttattgattctgcaaatcgcatttggtgagatgagatctaatcgcaacgataaggtcatattttgtgggagaaaaaaggcatagaagttgtatatagatataacaaatgggtatgatgagagacataaacttttggcgggactgactttgccaaggttgagagttgtgatgaagagagtttaatctacgtgcagcccttctaggagaagtggctgtatctaattaagatgtggtcggtcaaaaaagccctagttttattatgtaacttcattgatgtgctattattggatgtgtattaattctttggtgtgcagataaatgtgatgattgctgtactttaattttggggaaaaagtttgtatggaattagaacaaggatcgacttgttttcgatatagatactctgattgattgtgtatattgaatatcgatacttacataacggttattcggttaaagtacagttacactaattaaattaaactgtaagttaacaagaatattctggctcaagctaaattattttttttattattattgtttactaatcttttgttacaaatgttgaaaatgatatttattatacatgtagtacttcaactaaaataaataacgtgttttcatatttgatgtacgtgtataatatatcattttcaacagtgagtaatattaacccttttatcaaaataaagtaaaacaaaatgatataacctatcaacaaaatgcaaagaaaattgatccgaaccgaatatagccgtaacggtacaccaaaattgttttgagattttagtgtccgttgaccttttcatataaagccaaattattcggtctggtttccaaaagaacgaaaaggtatatgattacggtttactcccttgcttctgtgttttggtttagtttggtttaccttctcaaagttctcgaacgtcaacatttattttatcttattttgtaaggttctgcacatgttatacttattaattagtctactttttcaggcattgggattatttgttttagtctaaatcggttttggttgcataatattggatgaaaacattgtaaaggacaatttcaaacctgacttttctagatttggaaacgttccggctgcttgaaaagctcacataaatattagtatgatttcttaaaccaaaaataaatgatgattatcaacaataccgtaaataaggcaaaggaaataaatgatgattatcaacaattgccgaaaataaccacaccggtacaccgaaattgtttttgagattcataaaaccggaataatacgcctaaaggttattttctccaataccggtttagtttggtttgccttctcaaagtactcgaaggtcaaaattggaatttagtaataaacctgctccagctatatacaaatgtcatttgctcacctttcgccgattgattttgtacatcacacgcagacgcagcttttagtatttttttcaacaatcgcttttttttttctcgatctccgtgaagctctcgaatctctggtatgtttcttcgcttcttcatagtgtttctcatttccttttggtcttccataattttcggagaatctagtcctgtttttctcttcttctggaatctgaattcgccggtgaattccgctgatcgaatctctgagttttgttgaattatttgattcggcgataaaactttttttgtttgtttctgattttggtgagtgttgattgcttgagttttttcacggatcgatttgttttgagaattgggtggatactgtctgtcacaggttttgagttttggagaatggtgtttttccgcagcgtatcggcctttactaggctgaggtctcgcgtcgtaagtatttgaaaattttgtttccagttttgtgtttgttctcgtttgatctcgctggttcatgctaatcgattgattggtgatcgaatctatgtaagcagggccaacaatcttcactcagcaattctgtcagatggattcagatgcagagctctaccgacctggtaaatcatctccgttgcttcgtactttcgtgtgtgatcgtgatcatgtagttttcatgatcatgatcatatgtaagtttaatattggtttgggatctgctgcttgtggggtctttgttcattttgtttaaatggtggcaatgcaggacctgaagtcgcagctgcaagagttaattccggaacagcaggttagattagactctgtttgctttaaatgaaaatttgtgttgttgacttttttttttcattgaatgtgtgtattatttgttatgttagctgagattgttaagttaagaaggcaggctagttgtagtgaatctctttgcttttctagtttcctcttttctcacaagaattttccaatttcaggaccgtctgaagaaactgaagtcagaacatgggaaggtccaactgggaaacatcactgttgatatggtagaaacaatcatgattttcacgtttttggtttgtttatatgattttcaccttccattgcataactcatcataatcccctttgaaataaaggttattggtggaatgagagggatgactggattgctttgggaaacctcattgcttgacccggaagaggtactgtataactctctgtatatagttacaatagcttggttagatcctagatatagaatatatcaaatgctcctccttcctgttctaaggctgttgatgcaattatcttatcattatttcagggtattcgctttaggggattgtcgattcctgagtgccagaaagtattacctactgcccagtctggagctgaaccattaccggagggtcttttgtggcttctcttaactggaaaggtgtggctcttctgtacattattataagttggttctggatatgtccagtcgattagttttcctcaatagattatcttatgatatccttttttaccctttttcgtataggtacctagcaaagagcaagttgaagcactgtcgaaagacttggcgaaccgtgctgctgtgccaggtttggatattacctttttcgctctggctgttgcaaataaaggagtctgtttattggctcattcaaacttgtttgacatcaatgcttacaagaaattgcttaacagaaatgaaataaatttgtgggttttgtgttatactttcattcattcttaacttgtatccaatttttatacagattatgtgtacaatgccatcgatgctctgccttccacagctcatccaatgactcaatttgctagcggtgttatggccctccaggtgtggttctctaaactcgtattgttgtttctgttcttcttgtgataagcgttggaaacttattgttttttttggctataagtaaacaattttcagcagaatgataattttctttacctaatatccaggtgcaaagtgagtttcaaaaggcatatgagaatggaattcataagtcaaagtatgcttttggggttctgatttagttcatgatagcgtttcatattagctggcatcataacaaagattttttcttccaggttctgggagccaacatatgaggattgcctcaacctgattgctcgtgttcctgttgtagctgcatatgtttatcgaaggttagtgaagactctttttgtactctttttcatgtttcttgtagcttctggattttcggcaatgattttttttttattggaaaatttgccatctcttgtttttgctttgtattgactgttgaccttttccatgcatcattgcaggatgtataagaatggtgattccattccctcagataaatctttggattatggtgcaaatttttcccacatgttgggatttgatgatgaaaaggtgaaagagctcatgaggctttacatcaccatccacaggtctgtattaattttcgtcacccatgcatgtctccttaaataagcttaattatcttgtaaatttgtttgttctttttaagactttaaatagacctttgtataacattttgcttttctactattttttgctctagtgatcatgaaggtggaaatgttagtgctcacactggtcacctggtatgtatatactctccatgtgtcaattttaaaggattgacctacctgaagtttctaatggttcttttgctaaaaattcttgttcatgtaggttggtagtgcactttcagacccatatctgtcatttgcagctgcattaaatggtttagctgggccactccatggtttggctaatcaggtatcctcccttgtctatatcttgaataagtcttaaatcttcaatctacaatagagcttcgtaagtggctttttgtattttatctaggtaggttgtgatagtttgatgatacaaccataaattggagaaaacaaattcttagtctttttttattattgtttcaacaggaagttttgctttggatcaaatcagtcgtagaggaatgtggagaagatatatcaaaagaacagttgaaagaatatgtttggaaaacattaaacagtggcaaggtaaaaacaggaaattcctctgccttgacattctttactttctggtcttgtacctgaatcccacttttgaagccagccaacaagactgatggagcatgcgaaaatgaattaacatcttgtctactagtcatcataataggctaatatttcaatttattgtgtgatactgttatgggtcctcttatttacgacctcatagtttggtcagttgctctaactgctcctagtaagtaatactgccataagagctttggatcctgtttttccctatcctagtttaccttgtggatgtaatgttacaaggatagtctaatgatgatctattgacgagtcttgttttgtctctaggttattccgggatatggtcacggtgttctgcgcaatactgatccaagatatgtatgccaaagagaatttgccttgaagcatctacctgacgaccctcttttccagctggtactttttttctttctcttttctcttttctgttcggttctcaaaattctatcaatgttcagtagctaacaaaatccttccaactctgtaggtgtcaaagctttatgaagttgtgcctcctgttctcactgagcttggaaaggtagtatctctatccttcgtttaccatggtgatccttcaatattccaccaacaactccacaacaccttacctacatgctaggggcttatgaatctcttgcgaatcaattttttatttacttgcgaatccgatgatggcttgttacaggtgaagaacccgtggccaaatgttgatgctcacagtggggtcttgctgaaccactatggtctaaccgaagcaaggtaagaagtagacacctccttcaagtatcattgagccttaggatagcactcaaatataatatctgtgcgttttataggtactacaccgtgctctttggtgtttcaaggagtcttggcatctgctctcaggtaacatatatatatttacacattacgcctttgttactacataacatttaaaacagaactcatatgctctccattctcatttgtgtttaattcacagcttatatgggaccgagctcttggacttgcacttgagaggccaaagagtgttaccatggactggcttgaagcccattgtaagaaagcttcatctgcttaagtcaccaccgagtcctgagttgtcgcactctctcgtgtttcaacaaaagtcattctcttccacactggatagctttttttgtttttaccttctattgacagaagaaacatttgttcatgtagaaattgttcctgagaaacacatgcttggtgcaaatttgcatttccgggaaactcgtgataataaataaacagttgtattcagtttgcgtaaaaatcaaacatcaatatcactcatgaattaaagcttatcttggttttgatatacataaaagaaacaagactgcaaaatagaaaacttcgacatgagtttatcaaaaagaaaatgggattaagagctgctggtattgtcggtagtagtctccttgttagaaaggtcatcatcatcagcaagagaggctgtgaagttgagtctctcttcggcgccggcagtgataaccggcatccaaacatcagctgtgccgctaagaagcgtctgaacctgtggatcagaagctatagctgatgatatcatctcatccacatcatctaactttgctgataacttgtccaattccttagctatctccacctgaaaacacaaacaatcacacacaaagcctcagatttacattacaatgtgtaccagatatatgagtgaacacaggatacagacctcattgaggtgttgagcagactttgatggcactttagtgacttctaaaccaagagcttcaatcttagaacgtagctcaacctcttctgtatttgtcaatgattctacctaagaaacaaaaatcatcagtaggcaacaaaatcatctgtatttgtcaatgttgtagtaacaattagtgtccattaacaacaatatcaaaaagctcttgcccttttatttttttgacgaattagacagaaaaagggaaatttgacgaatagaagcggctcgtaattgaaacgaaaatcaaaatcaagaggaaacgaatttcaacagatcgttaacgaattaaaaagaaaagcgaaacctgttgaagaagacccgaaagaagctgaaagagctgctcgtcgggtttaccctccgccatatctctctgtgatctctcttgagttattttataatcaaaataatcaattttaattactgctcctgaattctgaatttctgatgatgatgatgattccttcgtgtgatcgtgtgatttaaatctgatactactagtttgggtaaacagacgacgaatcaacgaagcggcgcgtgtgaatctcacgcgatagtgtttttttaattgtttgttttgtatctctgacgtggtttttgactttttgctattcggcggatcaacaattaaataatgatacaaatctttttttggttctgtttgggtttctgaaggtcaatgtttatcatcgattagtggtaattttcaactttatgtaatgattagaacaaataaagtcaaaaggctttttattcaaaaggaaaataattaacaaacatgaaagcttgcaacaacaattcaatgaaaaaagaacgtccaaacaacaaaagagtttcaaagcattaagaatccgagataacttgatagaaacgtaaacaagtttttagatcaacttgagacaagcctttctcgctttcttagcaatcttagctctttgcatctccatatgtaactctatctgcatcttctccatctctctttgagcttccaacattgcagctaactccgatgccgctgagccccttcctcctttattcccaccactctttgtgtttcctcttgcacttcctcctcctctttttggctcttcttcttctgcttcttcttcctctaccgcgcaagaatgtaaatgcgtgccataatcacattccttgcaataatacgaccagagattatctggaacagtctcttggcaaacatcacagttaaagatcaaaccgttctggtaaggagaacggtagagcaatgtgagtggatgtgcgtgtccttcacgctccacggactcaggcatggacacacatccaacatgaacatcgtactggcagatagagcagttgtaagtgaatccggatccatactcaccgcacgcatcacacgtgtaagttgactcgtaaggtggggaatacagcagtatcaaagggtgatccgggtgagccttgtgacgagtctcacgtggaagctcaaaacatgacttgtgcaagaagtaatcgcattctgactttgtgcatttgaaagctgcacctatcaggtcgaggtcgcaaccagagcaaatgatctcttcttcaacttgggccttgtgactgcgcaatggatggttgtggctcggatgcctcaccgacggttttcttgcggccatgatggctaatatcttcttcttctttcttcttctttttgtgtgtttgttattgttttcgtgattcttattaagctaagggatttgagagtatatatttatagtaaaaatagtaagacgacttttgataatgagtcttctttagggtgaagtagtgatgtgttttggtttgactattttaccaagttgtgtagcttatatactaactatattgggacaaaaatgtcagtacgcgctttgatgatggtgagatatatacaagattgattctcatttggaattcaaagtcaagtggtggaattattcttcatgatcccatccatcacgccgtctagttttattgtaacctataaattataaactgattcaatagctaattgtaattaaatagtattataaacttttgaattatcatatatatgaacaatagagttgacataatgaaggatatgaggtcaattacgctgggtctctagttaatgcataatattgtcttcaagtaatctaaagaaacaaactcgaaattacgattttattatgtggaaaatgtatataacgtcatctataattaacttctatattagggtacagagattgacttggatagttgagaaaaatacttacaacatatcacacgagaaaacaaaattttcaaaagaaagaacaatcacaagcttcattattattattcaaaataaaataaaatcattgtatcaaattgatcactcgtttattcgatcaataataatatctccgctttggactatcccataaatcgagtatagcattattagtgtcgtttctaatacgtgcctcgagctgtaacgccgccatctcatcttgagccttcatcaacgatttcatccttgaaaccgcagagctcgcttctccttcttccctacctcctcctcttttctctgactcatgatcttcatagaccgcgcaagaatgcacatgcgtcccataatcacactctttgcagtaataaacccaaagattttccgacattttttcttcacaaacatcacatatgaacttagcaccgtcctcacgacctttgcatggtgtgttgtagagaagcgtgagtgggtgttcgtgatcttcgcgctccacggtctcagggataaaagcacatccgacatgaacatcatattgacattcagaacaattgtaagtgaaaccagatccgtactcaccgcatgcgtcgcatgtgtaagactgaccgtacggtggggaatgaagcagggtcaaagagtggtttgggtgagacttgtgattggtttcacgaggtaggtcgaaacatgacttgtgcaagaagtaatcacaatctgacttcatacacttgaaagcttgtccggttagctcgagctcgcatccagagcaaacgacctcatcttcgtctcgagctttaaagacacgcagcggatggttgtgactcgcgtgcctcacggatgggcgattaacaggttttcttgaagccattgtgtataggattggttgtttcagtgtaagaaacgtttagaaaatatatatagcaaaatatgtggatgatttgtcatttccattttccgctaaacaattctcagtttggttttgattattcaccaagttgtagtttaatatatggaagacggttgacattagagttgcataatcttggacacgtacgaaacaatcaccagagataagatttaaaaatctccaattttggtgattgttaggaaatagtgacaaaactagaattcatcaataattgagcttcccatatataattcaagtggataaggacttgatcaaagaatataaccattgactttcgaagtcgtcgactgaaaatgtagatcccactgttaacattcacacggtagaataaatgactaccacaaaacaaagtctgccaacaaatcaatccaagccattaatttatattcacatataccaaattacaaatagcattttagaacttgcaaaatctctctaatgaaccagtaatttgtgcagcaaaaacaaaaacaacacaatgggaaggccaaaaccggaggactcaattcgacatttcagtcatcctcatattttgttccacttatctgtcaatcctgaagaccaatctttttcatctttttgttttgtggtttgcaagctaaaactcctaaatcttccttcatactcatgcaaaccttgcaaattctacatccacagaaaatgttccgagttacctcaaaaaatcagacaccctaaccatctctatctaatcccttctcccaaataccaagaagggcgattccgctgcgacgcttgcgggaaagacggtgatggattcgtttactgtggagatttcggaatcgatcttcacacggtttgtgccaacatgctttctcgagtcacccaccaatctcaccctcaccaccaactttctttaacaatttccgtgccacccggatccgctactacatattttcggagacatttttaataataacattagcaggaattagtataaatccaaaaaaaaaaaaagatagaagagatgctacggattaaggaataaccaataatgcaatgaaagtatggtaaagagaagcaatgaagagtaaggacaaatcacaacattatatgcacgattcaatgaaaatttgtatattatttccatagcattgcgaaaaagtcgtagagtggaaagtgttggatcgacatctcacgttagaaattgcatagcacataacaaagtttttcagccatccatattgttgatcatcactgttccttacatatgtaaatggttaaataggccagtatataaccactcagcttgttattataccatacatttgtatagcaattaaaatagaaaagtatatgaataacacttacaaattaaataactcacacgaaaaggaaaaaaaaaaaagtgaaaaacaatcacaagcgttttcattaaattgatcattcgttcattcaatcaccaataatatctccgctttggttcagcatataaaccgagtatagcattattagcgtctcgcttcatacgtgcctcgagctgtaccgccgccaactcatcctcagccttcatcaacgacttcatcctcgaaaccgccgagctcatcgcttctccttcttctcctcctctattatttggctcatcgtcttcataaaccgcgcaagaatgcacatgcgtcccataatcacattctttgcaataataaacccatagattctccgacatatcttcttcacaaacattacatatgaacatcgcaccgtcctcacagcctttgcatggtgtattgtagagaagagtgagtgggtgttcgtgatcttcccgctccacggtctccgggataaacgcacatccgacatgaagatcatattgacattcagaacaattgtaagtgaatccggatccgtactcaccgcatgcatcacacgtgtaagtctcactatatggtggggaatgaagcaaggttaaagggtggtcagggtgagacttgtgactggtttcacggggtagctagaaacatgacttgtgtaagaagtaatcgcagtctgactttatacacttgaaagcttgtcccgttagatcgagctcacatccagagcagacgacctcatcttcgtctcgagctttaaagacacgcagcggatggttatgactcgcatgcctcacggatgggcgattaacaggtttttttgaagccattgtgtctgaatttggttaacaagcgtttagaaactataaatatatagcaaaatatgtagatgacttgtgatttctattttcattaacataatacatagtttggttttgattattcaccaagttgttgcttaatatacataacctttacagaatattgataaaacaataaaattcgccagtaattgtgcttcccatgtataattcatgtgggtaacgactaataatcattgactttcgaagtcatcgcctaaatagtcctcgaaaacaaagtcacacggtaacaaatgactaccacaaaacaaagtcttccaacatatcaaatccaagcgactgaattatttttataccaaattactaatagcattttaaaacttacaaaaattatctaaactagtatagtaagaagatatttgtgcagcaaacaaaaacaaaacagtgggaaggccaaaaccagaggactcaattcgacagttgagtcatccaacatccattgttccactcatctttcaatcctcaagaccaatcttcttcatttttttgttgcatgatttgcaagctaaaactcctaagtcttccttcatactcatccaaaccttgcaatttctacatccacctaaaatgttccgaattacctcaaaaaatcagacaccctttcgacagaaaccatctcctctcactaatctcttctcccaaataccaagaagggcgattccgctgcaacgcttgcggaaaagacggtgatagattggcttaccactgtggagattgcggcattgatcttcacacggtttgtgccaacatgccttctcgagtcacccaccaatctcaccctcaccaccaactttctttaaccttttccatgccacctggcggaccgggatctgctgcggcgtctagcttccaatgttgcgtgtgccgtggtctagggtctaactcgtggctctacagctgcggagagtgtagtggatttgatgctcatttgtaatgtgctagaagaaaattagctacttcaacaaatttggtccatcatgttgaaaaccggaagcaaccacagtttgttggtacgacgccgtctgttaacgttccggttattaataatccgtatcctttgatgttgccgacgattacgagtcctatgattagaccgatgattaatgagatgattaataatcttgtaaccaataggccacaacccacaagatccaagccaagtctctcaacttcatgaattgctaggaccattttaggaatgggcagtggcggactggttgatggatccgtcggttttcttgggtttgatacgtcggttttcacatcagttttttttttttttttttactttttttttttttttaagaatgttattaatttttcatcatccattttcatagttttgacgagtcaattgaatgccatacgataatactaaacaagtgacttttattaatttgatcgtcatatagggttaaaaaaaattaacgatactactaaattaccgactttattaatttaattcgtcaaagatgtaaaacaaataaatgatagtacttctgaactagtgataaactgataacatagggatttgattgtttttatgaattcgagtgtgtttgcgtttaatagtcaagatatgttaattaattttgtttaatttaaataaatatataatggttggtcaagcatgccaagaaaaatatatattttctaattaatattctttataatttattttcttacaacataaatcaaacaatttaactgacgcaaccacaaaccttaaacatttggaagacaatcatgtcctaagccagagattaaaaaaagtttttggtttaaatatccaaagacctacttcttctatcggtgtctctctctctctctctcgccaccgatcatcatggtctgcaccgccattgaaatctacgtcatcctttgatctctagctctctccaaaggtctcttctttctcgtcaaacttcatatatgtctctgttttgtccgatcaattatctgtttcctgaaatcgtttagttgaattccgttaggcaaattagttcaaagttgattcctttttgtgatttgtgttgttgactctatacagatgcatgcgttgcttactttcggaatctggggaagttccaattcaatcaattgaagaaaaaagctgagcctttattggttttggaagaattggtggtggtgggatctatcatctatggatcggaaacgtagaggttgacagagagacgtttctaggtttgattgatctgttcaaataagaacacaatctctttgttaattttggtgttctttgagctctcatgtcaactagtgttcaaggagagacaatggatcttgatttgaatcaagagccgtcttctgattcggagtctccgggtggtttgatgacggcgctttctccaatgttagaagagcttgaatctgctcaagagcggattcaagaacgcataagacagcttgaagtgatagtttcgagaatcagggaacgagaaataacaacaacaacaacaccggctttggtgtcgcctaacgaacatagagattcaactgctggagttatacatgagcgttctcgagagagacttgtcgaaaatggcgaaaacaagacttatttgatagccaaggcattgaacatggagaaaacaagctctgttcctggtggcttctttgactgcaacatatgtttagagaaagctgaagatccgattttgacttgttgtggtcatttgttctgttggggttgcttctatcagttgcctttaatttacttaaacataaaggaatgtccggtttgcgatggggaagtgactgacgccgaggtgattccgatatatggtaatggagatgattgtgatggtactaaaccaaagttagaagattgtggtattagtctacctccaaggcctaatgctaaaagagtggaaagtgttcgtcaaaagatcataaaccgagggaaccctttcttccctgggcacgaaaacgaagcaatcgaacatattagaagaactattgattccataggactacaagctttagctcaaggcgatgagtttggtttgacaaacataataaacaatggaggagacaatggtggacaacaacaacaacaacaacatcatcatcatcatcatccgccttttggacctttgaggttattgccaccatatgctactttcccaggtcttctagttgatacctcagacataccagcaccctttgatgatgatgcttttgatgttgatagttttgttgacacaactagtttgagaagaaaccgtagaagaccttcaccagccgtacgagcttcttatcagagaaaccgaagtaacaatgcttctcaaacgatttcgttcaggctcggttcttcagcttcatcagcacctagagagtttgctgttccaagctcctccattatgacgagaagccaaactgtaaaccctactgaagtggttacttcgagtacttcagcttcatcgtctaggagaagaacagaagatgtaaacaatggacctcggaccaggtctagaaggaggctgaggtaaaaaggaaaaacggtcgccggaatcttgacaccatccattctcaaccattgctccatcattactaaaacctcatcataactctgttcttgtctgaatactgaatgtatatgtacattctatgtctacttgtaatttctgctagcctctgaaactttggatatcatatctttgttttttttttgggaaaataatttaacttgatatcctgaagtgtttgatttcaacaagtatatttcttatacatcttaaacttatggggttagtttattagaaggaaaaaatactaggggtaaattcgcaatttaaaataagattctcgtcttatggaaaaacgtcacgctgttttaccctagaaactgaaacggaacgtaattatttacgtgacttatgaaaagtcatcggcgattgtttctaatttgtcatcgccgccgttgaactatctcgccggcgataatgatctacgttggtggagtgcaatttctagacgagagtagctctttttcattgtcttcttcatcgcaggtagatttctttttcttcgtctctcacgaatctctatctagttgcttaactaggatttgtctttatatgttaagtgatgtggttctagatctttaaacctggaattgattttgctcaatatgatgttcttatgttatctcatgataagtaatcattggtctatttcacagtttgtttgactttgaatggctacatcatttggtgaacagggaagtagcttgcttgttgatgtaatgagtcatcctgtgataacgttagcttctgattcctttaagaatcttgaggaaaagaatgtttctttcgatgaaagtgattcagagagctcaacaaaagacagatatgtttacatattccaaagagaatttgctgttgtgaatccagctcttgttgatgttagttgttgttacctcactagccccatcttaaaatggttacactctagtgtttccttgttgtctaatgattttgctcaatttttttattgcatgagaattagtttgttggcaccgatgaagcaacaacttgtgtaggccttgttatccgcaacagaaaatctggaatgtaagcatttgatccttttatatgcttattaagaggatgagttgcaaaagtttatgaccatctgaaattgcaggacgtctgttgcacacatggattcgccagagattgtggatttggggataagccagatgttgttattggttttacaggatgacgtagatgccgagttagatgtattatcactctcctttttacattaccaagtgtcttcgagtttatgttaatgattcagtattttattctgagtgcttttgaatatctccacggctttgtatgcaggtacatatggttggtggttatgaagatgtcgacataaaagtttgtctctagattttctatttctcagtctacttagttctaagctgtagagaggtctttagctgaatgtcttgaccgttatgtgcagaatgctgatggtgttggtgactatgccaaaccagagggttattcatttccgttgtgttgcaaattagtagaaactttgcagaagagaagagaaaactttcacattcaaaccctctttattcttgggcacaataccaagttggattcacaagcaaacacgtgccccatttttaatggatgcctggttagtagtctaatatgtctgcttcttctctactatgctaattagaagatgtactaagtcattctttacaaatagagaaatggaaattgaccctcattcatctaaacttgataggtgacatgtactaagtacacttttgtaattggttttcattgtcaaaatactgtctttcttccttagggactaactagacaatagaattgcttgaaatttgttcatatgaatcagtaatcagcgtaaccatgtttctttataacctttttatcaggtgaataccagcaccggtgcaatcttgccagccagtttcaacagaacatctagatgtccggatgagatcgttagaagaattcgagtttcatcatcgtttgaagattctagctggaagggaaagttacttgacacatatgacacaaaaactgatagattcatcatcgcaccatgccgctggtaaaaacaaaacgctacttctgtcacattacatataattgcatctaccattatatattgtctttctcaccagatttaatgtaattactctatccactactcctcattacagtttcataaatcgtgtttatgtttgtaatataggacaatgcgcttgattgaatatgtttgggaacttaatcagcttactgatgaagaaatcctcactaactgttccacctcaccttctgctgaaggtccagacttcgtaaacagtttaagaaggttagtcattttggaagcttccactggatcattatctagaacacaaacaggacataggaaaatttgcattctctttctttttgtgtgttttaggaattggggatatttactgaaatatccagaatggagcaaaacattcccaaggaggcaaccacgtgtgtttgaaagaactgtcgatggacactggaaaaaatgctgactttctcatctaatcatcatgacattatccagaaatctggctaaaaacaacggttagtgtatctaacattttgagatttatgtaaatggtcaagaacacatgtgattgattcttggacacagaaaatgtttgatttatctttttgactttttgtatcaaacgttgcaagtttggttcctatgaaaatatgggccggatcaggcccggtagacctatatgttgcccatggtagacattccaatctcaaatccaaaccagagacattccaatcgaaacaataatacacttaggccttagcatgatttcgtaaacgtagtccgacctaactttcaccaacaaaacgacggatataaggcattctgtttctagaaagtagaataaaccaaagagggccattcttgtaataccttatttccgaaagatgttgaactaagcctaaccgggctggatataataaggcatcgttatgggttttaaatttacaatttaactaacgaaaaggaaaaagggaataggtcaaaggataaaaagcagcggttaaaactagggttacttaatccacttttcggttttaattacttatttatttccccttgaattggtgtagtcgtatgctagtattactattagatctcattacttatagggaacaaatataaactcgatagtttgatttgatttgaatttatttagattagattataccgtaatgaaaaaacacagtagtatttaaataagaaaaaaaagcacaaaaataacaagcgagcgagttagacaagaagaaagcaacaatacaaatttaaatacaaaataaattatataaaaagagaataaaaatccctaaaactgcgagcgtttttgtttgtgagagagaagaagagagagacgagtctgtatggcaaaaggatgaggaaggaagaagaagaagaagcaggatcttataacatgaacgtcgacgatactaacaacaacaacaactatatctgcactgataatgattacatcgaagaagatgaagataatagcaacactaagaagagccaaacacaagcatggggcacgtgggaagagctgttattagcatgcgccgttaaacgacacggatttggtgattgggattccgtcgctacggaggttcgatcccggagctctctctctcacctcctcgcttccgctaatgattgtaggcacaagtatcgagatctcaagcgtcgatttcacgaacaagaaaaaacagatgtgacggcgacggtggaagaagaagaagaagaagaagagagagttggtaataatatcccgtggcttgaacagctacgtaaccttcgtgtagctgagctccgtcgtgaagttgagcgttatgattgttcgatactgtacggaatcaatgaatctcctctgcttcttctctttctctccgtcggatctgagatttttcttccgattttgaatttgtttgattttttttgttcttagatcgcttcaattgaaagttaagaaattagaggaggagagagaagtcggagaagagaaaccagatctggaaaacgagaggaaagaagagagatcggagaacgatggttctgaatctgagcaccgtgaaaaggcggtttcagcggcggaggaatctgatcgggaaaataggtcgatgaacgagtccaactcgacagcaaccgccggagaagaagagagagtttgcggagacgaaccgagtcaaactcgagaagatgattccggtaatgataagaatccggatcctgatccggttaacaaggatgcgacggctgcggaggaggaggaaggatcggttagtagaggatcggaagcgagtcactcagacgagttaggcgagtcagggacatcggaaagtaaatggaaacggaaacgaaggaaacagggtggtgccggcgagatcagatcggctgagagtaaatcacagccgttgattagtcttcttgatctgattcggtcccatccgcgtggatctttgttcgaacgccggcttcggagccaggtatgctaatatcttttttcccttaacttcttatatttttatatttaattataatcttaaatcttaatcaatttattattacgcgtttcttttctcttttacgtttctttgttcattcctaaatcccaaaattataatttaacaaaattccttctaactaaaaattcataaaataagatagtcattgtaatttgtattctagaaatcttacaagtatattctgaagatatattctgtattatttatggaagcttcattttggaaattttattcgagaatttatgggaatgtttaaatatggagagagaaggtgaagagggaaaaaataattaatttaacgaacccacttttttcgtggtcaccgttgtcgttttggtcactcaatccagtccacgtggcagagtcttggtgtagcatggctttatcgtgtcttcccgctaactttttatttattttgggcttttagttggtactaatgggcctatatttgtaacttacgtttataaatccattaaaacgcaggaggctaaggattacaagagcatggttaagcaacatttggacattgagacaatacagagaaagttgaagcaaggatcttatgattcttcaagcctcattttttacagagatctacagcttctcttcacaaacgcaattgtcttctttcctttatcttcctcagaatcgatggcagctcacgaactacgagctgttgtttctcaagaaatgagaaaagagaccggaaaagctggccccaggttaataaaacaggaagcatccggtatgcgtagtggcaaagcggatgctgaaacatcagactcgtctctctctaggcagaaatcttcaggtcctcttgtcgtttgtaagaagaggcgttctgtttccgctaaggcttctccttcgtcatcaagctttagccaaaaagatgatacgaaagaagagacattatcagaggaaaaagacaacattgcgactggtgtaagaagctcgagaagggcaaacaaagtggctgcggttgtcgctaataataccaagacgggcaaaggcaggaacaaacagaaacagacagagtcgaaaacaaattcgtcgaatgataatagtagtaaacaagacacaggtaaaacagagaagaaaacggtttcagcagataaaaagaagagtgtggctgatttcttgaagagattaaagaagaactctccgcaaaaagaagctaaagatcagaataagagcggtggaaatgttaagaaagatagtaaaacaaaaccaagagaacttagaagtagcagtgtgggtaaaaagaaggccgaggtagagaatactccggtgaaaagagcccccgggagaccgcagaagaaaacagcagaggcaactgcatctgcctcaggaaaacggggtagggatacaggaagcacggggaaggacaataaacagccaaagaaaagaatcagaaaatgacaattcaaaacatgtttgcccctttagtggcatttcttaagagctcaagttattgtatatgctttggagttttttttttaatcttaattctaacattagaagtcctattctcatagttatggattagagaaagtgtattttggcttgctgtcatcagtaatattcattccttcttttctgttatattttgctcatttccaccattttcgagtccctgcaaaagctagagctacagtgacaatatacccaaactattccattgaacatatatatccaacaaaacggagatccaggttgagctaatctctagtgtcagcaaaaattacagtcagatacccaagaaaagggtaacatcaaagaagttgagactctgaccttcgatctcttcttcactgactcctcatggaccacacattgcactgtgccttggcaaaattgcttgattcaaacataagctaccgacgaaatgcaccttctgcacaaagaacagagaacgagaattttagtgaatgtatttgatttgaaattataagcatttcgtctttgtttgctcaaatggaggaatatcactgaggatatagggcctcggatatggtaaatgcttgatatatcagactaaaaacttgccgttttctccatcggaaatatctccaagctttgcaattgcgcccacaagtgcatgctcgtgctcctggattaaaggtaataatagagcatctaagacttctgtatatataaatcaaaactatgtacaaaaggatctttgttgttgaagagatcaatcaaacctccaaaactctcttagccctttcaacttcgtaaggatctggattgtgtgaacgaagaactctctccacctatcagataccatcatcattttgagatatatcgtgctgcaaaactaaccttgtaaataattgataccaacctctctgattaggacatctgtttggcggattcgtatatcgagatgtttcttttttccagttccattctgtgatgttctgaaaccctttctgatagtgttcttctccaaaccgcttcctcgttgtggaacacagttgggtccggtagttctattcagtccatgaccttgtccattatatcgattaccaagcccaggatcctctcctatccactctatatccccaggagatatctgttaaagaatttgagatcttgattaaaaacgaacaaagaatcgttgaccaaagtttagaacattctccccacaagtttcagcagacttctgatcaaaaagtaattacctctgagagtctaacccattcccatgtctcagaaggtgttgcaatgtcataaactaaagcatgacgaccctaaaattcaagattaaacgatatttaagtaagttcaagaatcttcttattttataagaaaaactgaaactgaatgccaactaacgaagccacacacctcaactggattatactgggtaatgatagcgtcgtaaaatgtattgtcctcaggccactttgttctaactcttcttcctaaaaaagattcaggatcgattccgtttgtgggttcacttgaactggcaggaacagatggtaatctgttcatgacttgtcctcgtggaggttgatctgaaggatggtatggggcatgttttgtggaagacgagccaggaaaaacctagaaacagaagtaacttgtaagaagatgatttatgactaaaaaacattccaatattctgagtttttgactcactggtttgtgttttttgcccttgacaataggaacaggtcctcgtttagctgtcgatgaagcaaacgggtgagtgggatcagcttgaggatgaaaagaaggtgaagaactagcgaatggttgagaaggaattggctggtttggtttgtgcgtcttcatagaagctgaaacagaagggcttggcaatgtatcgtgaaccacttgagcagcattgcgcatacttggctgcattcctccagattgtctccattccctaataaccgaaaaagcatttgttattgataggaaaagagaagaagcttttcacttgctcatcggataaatgctcagatttaagatcttgccttatccttcgtattgtatcatctgagttaacacggcctagaagctctctatgctcctcattcgataaactcaactctttacgtaattcagttatgacactttctttttcctgaacataaaatacatgttattccacctaaccagacactaacacaacaagagaaatcaaagtagatcaaaaaatacccatgaaatagcatctccttgggctttaaaggctcttaaaacagagatatatgcttccttctcaatctggtgaatctgagcttccatatccgcagcaagatcatcatacatctttgggtaagatggcggaagattcaaaggtcttccattaccagccacgcgtcctcctcttcctcctcctcctcctcgtggaactctatgcgacggtggcagatcatcatcagttcctgaatacaccaccggtaaaatcaatcaatgttgcattctcaataatcaaacctttgtgaatcaatcattaccacacattacattcaaaaggtttcagcttaaatcaagaaacagcaagatccaaaatttcaactaaaaacaccaatccaccaaaataacacaatgtataacagtaatcgcacggagaaatcccaaaagttgtgaaaaccctaattttcagtgactgatagagaaggcgagagaaattctacacagttttcgggaactaaccactgctatcagacgatttgcagtccatgacgaagcttaaatcaagagacgaatctcgaagatgaaaattggagaagctagacgaagaatcaagcacaatttgccaaggttgatttcaatttgacttagaagaggactcgatttttggttttgagctcaattttgtactttgtcgagctgctataagaaagaagcgacggatcaatttcttgctccggtaacaaatctgagcttcactataagtgattcagcttaaaagattacagattttgcctaaagctcattatttgccaaaattagaagaactcagacgaaatttaattttataagaacaaaagtaaacaaatttgttgagaaaataaattttcgtagattcattctcattaaaattatcaaaatagttacgagggaaataaaacaccgtcgtttcgtccccagccacgtgttcacgtagagatttaaaaataaaaaataaactgaaaattagatatatcacaaaaccccgaagctgtgtaaagccttacccaagcccattagttttataagtaggcccaactatttgtatgttaaattgataaacaaacgtatgttattgcttcgatgtgttcaagtaagtaaaatacaacaacgtacgttagtacggtaaagaaagagttcaattttgatggatcctctaattctttttttatattatttgttattcttcaaatttgttgaagtgcaatagctcaccaaagatactacgagtctacgataaagaaagagttcaattttgatggatcctctatttttttttttttcttccaatgattctatgtcacattgtaattctacctaagcctgcatgcttatgtaaattgtaatcacgaggaaaatcagttttagaaacgagcaaaacctcactcgtatacttttagtttacgcggtgtctccgaagacgatcgattctaattataatcggcattacattgttgatatatggaaggttcttcaatgaacagtgtgagtttcctaagaaacagctaaacagttatcggtgatcgctaaaacctttcacagtttgataaagttttctcctgctctagtttaatttcatcaattttggaataaattttatttaaattatttttggcttacaaataaatttgtattggactgttcttgtaaaaattaaaacttttgtaatgaatagttgttaaatataaatattttgatagttaaattattactaactattaagaatttagtccatatttaatttaatatgaactaaattctttgtttttgatcaaaaaacttataaaattaaacgtggaaaaagatccgatcctctcaaaccaaaacaatgacttggttcgtcacattgaaaatcaaagagagtgttaattaatttattaaatatatcatgttaggtttgataaataaaattgttattctgaccgacagtccaaatcccaaacgcgttccagactacaccaacctgtgaaaataaacgtttaaaaaagaaagaaagactcaaagaagtaaaacaaaagtaattaattaaaatttgaaatagtagccgttacaagaaacttgtcgatatttgtatcaaaagacgtttttacacaaaatgacgaaaactggacttatcaataaaactaacacgtcttcacgtttccttgagaaattagcacatctaagtaaatgtctacacgacgtgcaatgatgcttttctttctctaattttttctttttaataatgactcagctactttagatttatttttgaaaaaattcactcacgttttatcattcttttcctattttgatataacttgataaggtcatttttgaattttccgtttactaattaagaaaattagaatattttatcatactctctttctctttccctctatcagatcatctttctcaaatagctctatttagatattcacatacatatccagttgtgattctcttccttatataaacctccacttaactcatcttcttaaaaacaaaactaagattgaataatcataaagaagaaaactaagaatgagaggtaattatctttctttgctagtagtgctcattgtcttggcctccaatgatgttcttgccaacaacaactcttcaacacctaaattaagaagaagtgattttcctgaagatttcatttttggatctgcaacatctgcttaccaggtactttttagttagttttcttacaaaaaaaaaggtccgatcactggttagagaatttatgggtttttttaaaaatacttggtaggtcgaaggaggtgctcatgaagatggtagaggacctagtatctgggataccttctctgagaaatatccaggtttttatttctaatctcattgttttttaatgatctaaatatgagtgtttaaattcaagatccgtgaatttagtctagacgtatatttgtgaatctgttcatatgaaaaatggattgatcactggagaaaggatgagatttggaaaaataagtaaaatgttagtttttgattgctctgtttttgattcttcaatgagattatagttaataaagctggaattaatgctttattttaattttccagagaagataaaggatggtagcaatgggtctgttgcagataactcttaccatctttacaaggttattttccattatttccattggctacataaccagtcacattctttgattatcattattaagaagaaaaaaaaaacgttgcaggaagatgtggcgttattgcatcaaattgggtttaatgcatacagattctcaatctcatggtcgaggatcttgcctcgtaagttatctaaacgttttatcttcttcttctttgaagattattcacacatgaaaattgtgtttctcacttagtgccaaaatttacgagttttttcttgtttaggtgggaatctaaaaggaggaatcaaccaggctggtattgactattacaacaacttgatcaatgaacttttgtccaaaggtaaaagacataatctaatacaagctaaagtaacgctctctgtttcatatgactttaaattaagcttttagtattaaaaaaaagggacgaaaacattctaaaaagtaagcttaacacaaattcgatctgatttatactaaatcatttttcttccacccttcaaattaggatacatgcactacagtaattcttatgtaattgtttacaggaattaagccttttgcaaccatgttccattgggacacaccacaagcccttgaagatgcttatggtggattccgtggtgccgagattgtgtaagtcctcaaccttagtagccattacaattaacaggacagatcagactaattttattttgttgtgtaatgaaataggaacgatttccgcgattatgcggatatttgcttcaagaattttggagatagagtgaagcattggatgacattgaacgagccattgacagtggtgcaacaagggtatgttgcaggtgtaatggctccaggaagatgctccaaattcacaaaccctaattgcacagatggaaatggagccaccgagccttatatcgttggtcacaacctcatcctttctcacggagccgccgtccaagtctacagagaaaaatacaaggttagaaaagaaaaagatgatgtttcttaagcatcaagttactgaaatagacaacgttactgaaaaatatatatatgcaatcttaaatgttatttgataggcttctcaacaaggtcaagttggtattgctttgaacgcgggttggaacttgccatatacagaatcaccgaaggatagattagctgcggcacgagccatggccttcacatttgactactttatggagccgcttgtgacgggtaaatacccggttgatatggtcaacaacgtaaaaggccgcttacctatattcactgcacaacaatctaagatgttgaaaggctcatatgatttcattggcatcaactattactcttctacttatgcaaaggatgttccctgctccaccaaagatgttactatgttctctgatccttgtgccagtgtcacaggtttgttttcttctcatccaatttttttatattcttttaatactttaaactaaattaacgagtccaaaatctgtgtttgtcaaatcaggtgaaagagatggagttcccattggtccaaaggtacttgttttagacacaaacaacttgcaatggttatcaatatttgcgaacttattcaaactcaagcgctaagctatgtgtggggttttattttataggctgcatcagattggcttttaatatatccaaagggaattcgtgatcttgtgctctatgcaaaatacaagtttaaggaccctgtcatgtacataactgaaaacggtaactcacacaaacaattgcttcagttcttgatacatatattcctttagtatcctaatgacgtatataacaatctttgtagggagagatgaatttagtaccaataaaatcttccttaaagacggtgacaggatcgattactacgctcgacatctcgaaatggttcaagacgctatctcgtaagcatctttttatatctagtgttaagactcccaattcgaaataaactatcattcatatttatgtaattatgttgcaaatgtagtgttggagccaatgtgaagggatttttcgcatggtcgttgctagacaatttcgaatgggcaatgggatacacggtccggtttggactggtttatgtggatttcaaagacggatgtaagagatatcccaagaaatcagctgaatggttcagaaagttattgaatgaaaagaaaaacgattgatgatgatgagatatgtatatttcattatattagtttctctgttactcttgagagatttatatattttttcccccctttggaaataatgagaaatggttttagctattttcacaacgaaacccgattgatgtatagctgatggaaatcatctttcgatgtaattacgtacgttttataaggaaacttaatattaaacttgttgaaaaagttaaaaaaaaaatagaatgtgaaaacgatataggcaaagagtatgtaacatctacaactttcagcatatatcaatttgaaaaaaaatgttcaatctttaaatttttgaagaatctcatggttttcaaagatcatcatttatggtattatgagttggattattgatatttttttaaagattgtgatggtcccattattgattatagcatgtgagatgttgacagaactgctataatgtgtaacaattattcgcttcgatgtgagaatattctattaatacgcattcaaatagaaaagcccagtgaatatgaaaccaccaaatataaaagcctcacaatttatttatttattttaggctctgaatttttttattttcttattatggtaaatcgtctttttttgttaactttgtctcacattcccttagatggcaaattagcatcttactttacctgaatcatttaacttgaactgaaatgttaacgttaatgtgttccaaactttcaatctcaaaaaccaatttagtaatcgttcaagcagaatttgtatcaaacttttcttgtgtatcaaacaaagaaaaaaaagaaaaaaaaagaaaactgacgttatttcttttttcgttttgaaaaagtaaacttacgatgacgtcatttcaggaggtttaagcttcaacttttccactaatttcgaatcattcgaaggtttaaccgtttaaatacatctttttctcacactaatttctaagttactactacaatattattctctacgaccccaccactaaccactattatccgaacttccgaaggaaaagttcgtcacgccgtctgactttagaaaagcacaaagagtaagatctcaactagtctctcatgcgtgcatagcaacaacgtaacaagaagtcagtaaaggcggactctatatgcgaacttagtacctgaatctgatccaaagacttatgcacggtttgatgtaaaatcagtagtctagtcgattatttttagtgagttttaattagtaatagctacataaatcctaagttcaagttacgactattggtttacgctttcgcatatattatattaaaactgatagaggaatatcaagatcgagaaaagtttgttagagaacaaaagcaacaaactcattctcattcattctcttaatcaaaatgattacatttccctctcttatatagtatgatagttaacgagacattaagccaatgttgaatacacggtttacataaaccgatcttaatcgattctatactctaatacattgcgttggtagctcacatgacataagattactttatattatttaaatcattctgaacattatcttaatgggctaagctttcccaatttgaccatgcccaactttttaagagaagatatgttttaaaattaaattgcgtatacagattcacttgacgtcactagccacgtatagtacgaacttatgaatgaagacataattgcaaccatatccaaactgattaactatactgtatccgtatgtataacacctacaacgcctgcttgtaaatcatacaggaatgaatttaagtattttttatatcttcgttaccaataccatatcaaatacattatgtggaaaaaattcaaggcacatgttcatccaccagcgaataaaaggaacaatatctttctttgtggatattcaaatgcaggataattcacattctttcatatttgcatttttaaatacatggaattaatctttgatgtcatttccttgtggaatcggaattggatgtttttgataagcatttcataatttcaaagattaattccagaagaaaacgaatttttaaaaaaaacatttatctaaattttcaataactaaaactccaattcctttgggataaaataaaattccaattccacaggaaatcaaaaacaaaatcgacaaaaagggtttggattgtaatgaatgttacaccgcaacagccacgatatgaacaaagtccgtaaaagggaacgtcagctttttcgaacgtgaaagttgtaagcgctccagagtgttttacatgcaaaaagggttttcgacagtactgaacatagccaattttaagaccacattcaatctccacttgtccaagtacaaacacacatgcatagacactaagacacacacttatttctatagattagaatgtaagcagtgatcccgaccacattcaaacacgaagatgaacagaagctaagatacggtctcatttgggggtaaaaagaaaaggaaaccaaacttgaattctcttccttatttaattatattactatacttctcttcattagggcaaatcattgtttaatgttaattaagttactttatgatagtaattacatactaatatgagtataagaacatacctttccacgtagaccaacaacgtcacgagactaagctctatatataggagaagagaaatgcttagtttgttacaactacaaatctcatctttgaaacagtttgaagaaaatacataacacttttaaattccaaaacacaaaaaaggaatatgaagatgcattttttcatcctccttgtaataacctcatggttgtcggagaaaattacttcacttcctcctgattctcgagtattcgatcgtcatggttttcccgataattttgtttttggaacagctgcatcagcttttcaggtaatattttaattggtcattaactaatatgaaaccatcgattctttttagatcattataaaacgcagttgtttacttgttatgtacggacttaatgatatatagttgtgacgttgacaaattaaatgcggaatctaagattcgtacgtactcgtaggtctaattccccttgatgtggaagttcatattccaagaattgaaaacttaaatgcgatataatttagtcagcagcgccgtcttataaattgttacgactaagatgacgttttttttgacgtggtttttttattcctcaccttttgtctatgttacaatgaataataagtataacaaattaatgatatttgtaatattggaatttttttatttttctaagaaagatcaactctcactcaaaattaagcttgtccatttgtcctttatgtagtacgaaggtgcaacaagcgaaggtgggaaatctccatctatatgggattacttcagccacacttttccaggtctcttttatatataataataataattattattattatattccgtacaattaaaatgtttactctaaaattgtatcgctacacatatattaatgacgtctaatagttgtattccaaatgcagaaagaaccagaatgcagaatgcagatgtagcggtcgatttttaccatcgttataaggtaaaatattggatgccagacgatattctttcttttgatttgtaactttttcctgtcaaggtcgataaattttattttttttggtaaaaggtcgataatttttttttggagccattatgtaattttcctaattaactgaaccaaaattatacaaaccaggatgacatcaagttgatgaaagagctaaatatggacgctttcagattttcgatttcgtgggctagattaatacccagtaagtaaatttacattattactatatacgttcaataaaaattaatatctatttaaagattttggtgaatctctgctttaacttttggtactatttaaaaggtggaaaagtaaaagatggagtaaacaaagaaggtgtagaattctataaggctcttatcgacgagcttgttgctaatggtaagttaactaatcaaagatattatgcgttataatatcttatattatatgttctaatgaacaaacatatgcaggcattgaaccatcgatgaccctctaccattgggaccatcctcaatcactggaagacgagtatggtggtttcttaagccctcaaatagtgtaagcgaacttagcaaattgatggttatattatatcattaagatagatataaaagaaataatattaactaatatttttaattctcctaaacagagaagattttcgagatttttcaagagtgtgttttgaagaattcggagacaaagttaagatgtggactactataaacgagccttatgtcataactgttgcgggctacgacactggcaacaaagcggttggacgatgctcgaaatgggtgaatagtaagtgtcaaggtggcgattcaggtactgagccttacattgcatcacatcaccttcttctcgctcatgccgcagctgtacaagagttccgaaaatgtaacaaggtggattattgaagcttttaatttaaataatgtatttctgattagtttctgttttgattttatatattaaccaatataatttgtgtgacagactcaagacggtcagattgggatagtgttatctcctttgtggtttgagccttacgactctgcttctcctgccgacaacgaagctgttaaacgagctcttgccactgaactagattggtataagttgttatatactttagataagtaatgttatctttatagtaatcataagatatttatttatatttttcgaatgtgtgtatcaggcatttagatccagttattcacggagattatccagaaatgatgaagaaacttgccggaaatagattaccttcgttcactccagaacaatccaaaatgttgaaaaattcatcggatttcattggaataaactactatacagcgcgttacgttgctcatattccacaagccgatcctgctcgtccgcgattcgtaaccgatcatcagctccaatggcgaggtaagattgctaatgttaacatccgtacgaccattctctttgtatgagattcaataaaattcctaaactagttttttttgtctgtttatgaacagtaacaaatcacagtaatcaccaattcggaccaggggtacgtaacatttttgactagttttgttacaaaatcaacgttgcaattatttttactttttattaattgatccaaagattctaataagaagataaatgcttgtttttgaaaaacaggaagatcgaggcatacttcaatcacatcctgaaggtttacgaaaagttcttaactacatcaaagataaatacaacaaccctatagtttatatcaaagagaacggtaagaatattttacgaatttgttttttttaatctattaattaaacagtttcctctctttgttaattgccaaaatatttttataggaattaatgactacgacgacggtacaaaatcacgagaggagattctcaatgatacatttaggataagctaccatgaggaccatctccaacaactccaaaaagctataatgtaaatcctggtccacacttttacgataaaaacacaagattttaaactatgaactgatcaataatcattcctaaaagaccacacttttgttttgtttctaaagtaatttttactgttataacagagaggatgggtgtgacgtccgaggatattacgtgtggtctttactagacaatttcgagtgggaacatggatattctactagatttggcgtgtactatgttgactacgacaacgatctcactcgtattcccaaagattccgttaactggttcaagcagttcctcgatgtaaagaataaagaaatatgggatgtgtcacataaagaaaggtataataagacttttgatgatgtagaaagtttcgaggcatctgttggttcgattctctatctcatgacgaacaacatatcgaggagagaagaggaagaaagagatcaatgcgcttttgggaatcttaatgatcagtccggtctgttgttggaatcatataattctttcggatttttagaaaacgtttggtgaaagttagacgaccttttagatgttcaatttaaatttttgagttatcgtccatgaagaaatctgttgaatggaaaatgaaaactagtaatgtgagatatgtatgtataataattaatttatagttttctattcttcgatttcttaaaacccatatatagcagaactttcgttgatgaatgacaaaacccattccgaaactgagtgccaactctaatttaaacgttaccacttacatatactagaggaatagtgaaaattccgacccggatcctagccggcagataaagattcgcagtctgaaacattcatgccggtcatatcgtgtgactgaacctcccaaaatttaccaaaagtctgagacggtaaattttatggattgaattggatatttatgtaatatgatattctataattaattaggaattgttatgtgtataataataatgattttgtggttttataattttctaaggatttagaaatttatatgtattatgaaattgcgttaggttagtttgtattttggaattagattaaggattaaaatatttgattaataattatacatgttatatagtatatatataaagttaatttagagggtttttcacggatcgatcgattcgaatttgttctgccgacaaagagaagaagacgttgatgaattccacacaagcttaggcctcctctctgatgtttttacttttgagataccggtgaattcgttagcatctacagagcgtgtaaaattgttcatcggtgtgagttctctaacctctgttttctctgtttatgtgatctctgttttgttcatctattttgttctttagtaataggtgaaaatttccaagtagtagcaccagttgaatgcactatgaatgaaggagaggagatagggttagggtgtttattagctctttttgcagaatccagaaacttaacttaaatggttgaaagttgcaggattacaagatgttttctcttactaagaaaatatggactatgattgatttgtggtttcttggggagctatctaccatcattcaaaattttgatttttcttttgcagtttccagtggtctaaatgattcagatggaaatgtagtctcttgagttgttggacaaattaatggtcatatcttttgagcatcttgaatcctgtcaaaatgctggtcgttgagtacatgagatgtcttggcttagactcattttgctttcatctgcagttcctgctgtttgttatatgtgtgctcactgtatcctgaaagttgtggtgtgaaatttgccagtaagttgtttgacatatttctcgagttactagctgagtttcatcttatcatccgtcgcattggataattttcactctctttctcacccgtttacttgtcaaatcttgaagcttttattttatctctttgaacttcatctacttgtccatgcctccatggtgaaaatggttatcacaaagacgatgaggatgagctttttgctcaagtcatagtgaatggacatacagacagtgaaggaggactgtggtgttgacgttgtttttgataacgaggtgagcaagaatgtctattactcctaaacactcctttatgtgcgaaatagagaggctcttgaaaataccttctagaatcagaccattaactagtcctcatgaatctctctgactctggtggtgggaaggcaattttgtaagctagggttcttaatgcaatctctttgcaagactctaaattctcaagttattgaaaacttttggcatgaattaaagttagaaatcgatcgtagactgaagactgaaattagaatgtttaggtctgatttcttttggttgagtagaactcaaacagaataaattttagagaatgctatacatttacgtctataatgattccatctctttagtcttgagcatagctaaaagtctatcaaacttcatctctcatcaacaagacaaaaacattcatcgctatcttcagaacaactttgagtggtgcgaattttggtggcaatttcttgaccactttcttctctttgtatttcttaccaagcactgaagcttcattagcgatagaattatgcttagatattgagggccataagcataaacttgacctgtttcctttctagaaccgagtctaacaccactaaagctaagaagcttcgtaagtcagattctaacacactattgcttaaacttattgaatcaattgatttttttcataacataactacgaagttaatgggtcctaaataattttcgagaagatcgatcatgcaccaaataataatatctaaccatccaattacgataggaaaaaacacataagataaattctcatatattcttagggattatttagccaacttaagttagtagtttaccaaagcgtagtaagtcaaaaagttttatggaaaacttggaatgcgcaaacttgagggtgagtaccaaacaaagaaatatggccatgaaaggaagtaagatatatagtaccaaaaacaattatttgacgcaaatcacctttcctttctctaattttcaactatattaaagaaaattatattgtcatcaatctttgaataaacagttaaactaaaactttaatgtaaaataaaatatcataaatacactttgtttcctataaaagttatgtgtaatttttatacagatgttctgtattatgttaggaaactaatattacctgaattgattagtctaattattatatttaatagtcatccaaaaataatagaaagcactagagagtagagagagtgtcgaccaacacaaaagaaaaaaaaaaaagagaaaaagtggttaaaattgtgatgttggcaaatagacgttatactgatgtgttcggatctcttatattaatggctaaataaatcaacggccgtccttataaaaggccgtaaaaacaaaaacaaatttgaggatagcgacatttcaagtttcgaggtatgtaacgtaagagttctttaaaggaaatggaaagtaacgtaacaattgcatagattgcgatatagtataagattcgactacatctgtcaacatatttattaggtctatctctggcgttacacatcacacatggagtctaaaattacttttatttattttgtaataagaacaaaattataaatggatattaaaacaagaacttgaaatccaaacaaaaagtaatattgtatacgatgagataattaatatgttatgattctaatgttttaaggaatatggtaaacaaaaaattcttaaaaattcattaaaacctatgtatatcagtatatttaattagttttttctaaatataatgataattataaatatagatcgtgtcaaactagttaaaacccgatagtcagacactcaaatactcatttggttcaacaaatagggtacgtatatatttataaaaaaatcatttagtttatatattgtctattatttgtgtcttattctttttttttcaattttaatattacttcaatgcgtgccagttcaaaatcttacctataaaaggattacgactacatactaaatcacaagtaaaataatcgcatcgaaaatcttttttattgtgctcttcgtctcttccacggtcgtatcgaattgccgttttttcactctcatcaaactgatacaaaaaaattccaaacttcatttttctttgcaactgcgaaacaaaagctttttgctctttcttaaattagagttacaaatccaatcgtgaaacaaaactttttgctcttgcttaaattagggttacaaagtccgatcttaaataatatagatattctgtatctattgaattataccactttaattttcaatattcaagtaagtttttttctttcacaaacactatttatattatttatattaaattatagactcttcgctagagaaaactattcaggaactgatgtaattacatagaaaaaagactatttcgaatccaaacttttttaggtaagcaatctagtcgagcattagaactacgaaaaataaatttaatacggtaaaaaaaaaaactaaatatcgattccaaaagctaaaaatcaccatttcagtaactaaaacctccaatcccacttccaccaaacctccaattccacttccaccaaaaaataactattcaagtaaagggcttgggtagtaatgaacggccacgatttcatcaaagtccgtaaaatcagccttttgaacgtgagagttgtaagcatttcagagagttttacatgcaaaaagagtttttgaccataaggatctacatttccacgtagatcaacgtcaagtcacgagactaagctctatatataccagtagaggagcacattgtttgtaacgtctacaaaatttagcttttatcacttaattacaaaatctttagaatcgaaaaccaaaaagaaaagaaaaaaatgaacgttcaaattttcatcctccttttgataatctcatggcttacaccgaagattacttctcttcctcctgaatctcaagtccttgatcgaagtagttttcctgatgattttgttttcggaaccgctatatcggcctttcaggtaatttaagatagtaactttaacatgcattaacggaaaagatggtaacatgaagtcggtactcgagttatttcaaaagttttgatgttttgttcagcctagactgatacaattgatccttcactttcttatagagttatagttgtgagacgttgaaaaataatacgacattctttgtagccgtatataattatcagttccttttcgatgtctgaatattcaaagaaaaaacaaatgagtctagtaggactggtggcgttttggacttttagtgggtccctctaaacgagattgaattttggatcgaccatgtagcttcataagcttagatatgatcataggttggctccaatccgaaatttccaattaacagaaagaacaaaatttgaaaaaatttaactaagatgtgatattaagttctctagctgatttgcttctccacctttttttatgtaggcatataaaatattctctaatttgtctatgaattaatttagctagtaatttatccattatgtagagcgaaggtgcaacaagcgaaggtggaaaatcgccaactatttgggattacttcagccacacctttccaggtctctttaaattttaataattattttttttgctcggaatttttgtaacaattattatatatatatattagtggctaatagatgtataatgagttatatataatgtttgaaatgcagaaagaaccaatatgcagaatgcagatgtagccgtcgatttttaccatcgttataaggttattataaatggttttcgttattattaagaacccaattattaatattttgttatctacctaattatttaaatgaccaaaaatcattaaactaggatgacatcaaattgatagaagagctaaatgtggacgctttcagattttcgatttcgtgggccagattaatacccagtaagtgtagttacatttttttttttcttactcaagaatgtattttttcctatgttgatattatagtttaaaaaaaaaacaaattaaaggtggaaaggtaaaggatggagtaaacaaagaaggtgtacaattctacaaggctctcatagacgagcttattgctaatggtatttatcaatcaattaattaaactaaacttctctaatcaaaattaactatagtataggtatggatgattttatattatatggtttggtgggtgaaattgtgtaggcattcaaccttcggtgactctctatcattgggaccatcctcaagctcttgaggacgagtatggtggttttttaaaccctcaaataatgtaagccaaataaacaaaatgttgcagtacacactatttattggttatttcatacatttacatacacgcacttaaaggaaattataactaactgtttttcaattcaattaatcagagaagattttcgaaattttgcaagagtttgttttgaaaatttcggagacaaagttaagatgtggacaacaatcaacgagccttatgttataagtgttgcgggctacgacacgggcatcaaagcggttggacggtgctcgaaatgggtgaatagtcggtgtcaagccggtgactcggccatcgagccttacattgtatcacatcaccttcttctttcccatgctgcggcagtacaagagttccgaaattgtaacaaggtatactatatacacattttttctatcatatataactcacatatatacacattaactatcgaatttgaatctggattacacggcagtggtcaaaaatatacaagttcatatctaatggaaatattttgatgatattgtttaattgtattaagaaataaatcaagtgtgtttcatgggacagactttacaagatggtaagattgggatagtgatatctccttggtggcttgagccttacgactctacatcgtctgctgacaaagaagccgttgaacgaggccttcccttagaactagagtggtacgttatcttttataattaaagtgataattatttatatgttttgggatcataaaaattatttacataatattctgaatgtttttgtgttaggcatttaaatccggtgatttacggagattatcctgaaacaatgaaaaagcatgtcggaaatagattacctgctttcacaccagaacaatcaaagatgttaataaattcatcagatttcattggagtaaactattatagcatacacttcaccgctcatctccctcatatcgatcatactcgacctcgattcagaactgatcaccattttgagaagaaatgtaaggttccaagctaaaatccattttcttatatatttttttgtatgaataaattcaagtgaaactcgtaaactaaactactttttttatacatcacttgtgagcagtaataaatcgcagtaaccacgaaactggaccaggagtatgtaacattttaatcatttttatccccaaaattttgaaatgttttgactaaattattcagtactatatcaagaaattttatttttccttacaggatgatcgaggcaaaattcactcgcatccagaaggtttgcgaagagttctgaactatatcaaagataaatacaataaccctatcgtctatgtaaaagagaatggtaagcaagaaataatatactgtaccttttttatagtatcaacagcaaatgattttattttattttttggtaaaaaaaaaaagcaaatgattttttacgtctctttagataatttttaaattgaataattcttctttttctaaaagtattatttgctaacttatttttgtaggaatagatcactacgatgatggtacaaaatcgcgggaaacaattctcaaggacacatttaggataagctaccatcaggaccatcttaaacaagttcacaaagctataatgtaaactccggtccacaggttacgtataaattgaaagtctgattgttttaaacgcaaaaaatataatgcgtttactagttttttttttttttgtcaaaatcattttgaaattgtaaacgcgaacagaattttattttgtttacgtcttataattttcaattgatattgataaaaatctactaaaatggtgtgttctcttttgaaaatcaaaagtatacacaataaaaatgtaaatctagaaagataagccgccccaatttagagatttatcagtccctttatccatctaccaattttgtttttgtaaataatttatactttaaggtatttgcagtagatggcattagaaatgattttttttttttcttttttttttttttttttttttttgtagcagtgaaatgatgataactaagaaaaggtgagactgtgaattactttgaaatgttttggacggttttacacatgtgatatgtcattttactgttgcgtcagcatgatatttttccataacattgttgtttttcctattgataaattgaggctttgattcctatcattgaagttttgcatgatgcatgcacagtttctttccgtaacatgttacatttttgtgtggtcatataatattacattagagttctagattaatatttaaacattatgttaacaaaaataccaaagacatataactttaagcatatattcaatttatcaaaattaactcgatattttgactcttctaacagagaggatgggtgtgatgttagaggatattacgtgtggtctttattcgacaacttcgagtgggagcatggatataattctagattcggtatgtactatgttgacttcaaaaacaatctccaacggtatcctaaagattccgtcaactggttcaagaaattcctcagtagaccggtggtaagaagtgaagaaacagaggatgaaaaagtatgcaatgtgtcacgcaaggaagaaaaaattaataaggctttggatgtctcagagggtttcaagacttcagttgattctattgtcaatctcatcaaaaacggatcgagaatagaagaagaagatgatgaagaagagagagatttctgtgcttttaagaatcataatgatcagttgggtttctttctgaagctacagaactcattgggattctagagaacctttttgaggacgatcgagactctttagcttttctagttgtgcgtgttttagtaatctatgtatagtagtaccaataagggaaatatctagtcgtcgtgagtaagtagtaacattcgtgattatgggtttttaatcacgtgaaactcgtaaagtgtatattatgttccttttatttttgagactgaatcatatgagatttactgaaccaagaatccgacgaaagccaatgaaatagtcgatttacatacaggtcttggacatatattgggccttagaccaatagagcacgacagtttattaccgcttcagtttattggacatatattgggccttaacgattaggaacggaaacaaacggacgttttctcacggcattgaagggagagtgataaccacgcgcgagcgtaccgcgtcagagttacataagaattccattattatcccagcaagcattatttagcgttccttgatgattcatcattatggaaatatatttatattaggtcagagattatggctaatgtccaacattttatgatgtgtcgcctctcttttatcatgttcgtgttactttatttatttttattcttactctgaacagaaatacaaggtaaaagtcgtgaggatttacctatatataatgggctccccaatattaataaataaaccattagagtggtaattgaccgacacttggtttgccctgctagttgctagatcatacgttaaacccttttactttgtttgttgtcttacttttttgttccttctcgtcacaccacctcaaaaattttaaaataaattaagtttttgatatatattaagtacaaagaaacataaccagcgaagtcgatgaggttatgtttctaaccatctcaagaaactaataaccctcaaaccaattttactagatccatttctaaccgtctcaagaaactaaaagccctcaaatcaattttcaatataggaaattgtgtaaaacgaaatggattaagtaatcttggttattaggtgaaatgttagcagccacaataatgtttcttttgtctcatagcgttttttactgaagacaagtacctctcacaaatagtaggtaaaccaaatttgaattacagaaatagtcaaagacattaactagcgtctataactaattaaaatcttaaaccaaatccccaaacacagagttgggggtttctcaaaggataagaaaatgacttttcttcaattatatatagggccactaaacccaacaaatatacttgatccagttataaaacctttcctacgaaaactcaaagaaacaatggccatcaaatccatatttatcatcatcatcatcagcatcatcacatcaatatctgaactttatgctttggatccttcgtttcttcgtctttcgacctctctccaaagaagtagctttcctcaagattttcggtttggtgcagcttcgagtgcttatcaggtcaatttcattcttcttatttcatttaactggtttttctccttaactgtagtttagaatcaatttcatatagatttcgatttagtacagagtgaaggagcagccaacgttgatggaagagaaccaagcatatgggatacgtttactaaacaatatccaggttattctcttttttactagccttataggtgaaatatacaagaggcaagagctaacgtacttttgtatcttttgatatttaggtttgtatcttttatttcaatcccaacgttgtatttgatacaatcatacgtactcttactttcgacgttttatgttatacatacagctctttaacaaaagaaaaattaaaacttgttactgcagaaaagatttcagatggtagcaatggcgacgttgcagacgaattttattaccgtttcaaggtttgtttttaagcaaatccacaatatatatattttcctttaaaattttttttgtaacaatattatatcgatgacatttttgcttattggccaggaggacgtggcacatatgaaagaaatagggctggactcatttaggttttcgatttcttggtccagaatactacctcgtatgatttggttttagtcattaattaacatcgttgtgtttactcgttacgtggccattattttcagcaattgcttatgtttggttaattaaagtgacgtcaatgacaaatattttggtccaaattaggaggtacggttgctggaggagtaaatcaggcaggaattaacttctacaatcatctcatcaatgaactcatttcaaatggtcagtgcattttttatcccaattcgaaatttatttgttatatggataaagtgatatagacttaccgttaaaccttttttccaatttatgttaattattctatcttaatattatcattatgatattaaaaaaataaaacaggtataaggcctctggttactctgtttcactgggatacacctcaggcacttgaagatgaatatggcgggttcttaaacccacaaatcgtgtaagaatctactaactacattattaaatatttcaggaaacaaaataagaatttgattagaaatcaggattgaacaggaaagatttcgtagaatatgtggatatatgtttcaaagagtttggagatagagtgaaggagtggatcacaatcaacgagcctaacatgttcgcagtgttaggttacaatgtcggtaatattgctccggggcgttgttcgagctatgttcaaaactgcacggttgggaactcagccactgagccatatctcgtggctcattacttaatcctttctcatgccgctacagtccaactctatagagagaaatatcaggttcttttctttataattttttataaaatatttaacctaagcctaagatcgcaattttcttaaagtttttcttctttaattttttttattgtgacttgtgtgaaaagcagagttttcatggagggaccataggaatgactattcaaacatattggatgattccaaaatataacactcctgcttgtagagaagctgccaaaagggctcttgacttcttcttcggatggtaaacttttattttactaatattatatatgttttgaattttccattcagttttagttcaagtttctagatttttattagtaacacataataattattgtgatacacgagtaaaactgatttaagctaaatggagattcatttttcgatttcgaaataatttttttttatatgacttctaatgcgtgttgcttcacactatgtatgtgtaggtttgctgatccgatcacttacggagattatccaaaaacaatgagagagttggtgggaaatagactcccaaaattcacaaaaaagcagtcaaaaatggtgagaggatcctttgacttttttggactcaactattacacttcaagatacgttgaagatgttatgttctacgctaacaccaatcttagttacacaacagatagtcgcgtaaatcaaacaagtaactaacaaaataaacttatttcccaaattattttcaccatttattaaaaagaaaaacggtttttgaaatgtattgttgaaatttacagcggagaaaaatggagttcctgtgggtgaaccggtaagatttttctttccacatgtagcttaaatttattaatttaaattgtgtaatagagacgagtaaatataattgatgtaagaaatgttttcattttcagacgagtgctgattggctctttatatgtccagaagggtttcaagatgttctattatacataaaatcgaagtttcaaaatccagtaatcctcgtcactgagaatggtaggtcaaagtaaaagataagttgggtttataggcgaaatgtataccatcaattgcaaccagttaatgatctctacttgctacattgctaaaaaaaagccaaaataatatatgtaattttagaaataaaaagatattaaaaaaaacatacaattataattttaggaattgataaacttttaatttgtaggtaaatcggatatattggtcaaacaatttgattgcaagtgttttattactttggccctacttattctgatatttacatactttgggggggcattttacctccttaattaggaatgcctagcgagaatgacaaatcattgtccgtgaacatagcactcaatgacgaggcaaagatcaaatatcaccaactccatctcactgctcttctagaagcagtcaggtaattatattaatttcatatacaaagaatttcaaatatccagacttctgtcatagttttacaaaaaaattaataatgttgatgactgatgtgtttttctttcatggaacattgaaacagtcaaggagcagatgtgagaggatattatatatggtcattaatggatgattttgagtgggaatttggttacaaatatagatacggattggtctacgttgattttcaagatggacttaaacgacacctcaagagttctgctctttggtaccatcattttctatccaactcatcctcctatcaaatggactagcaaggaatatctaaaattaatatcttcactttatacaactttcttatgtattcctaagaataaaatgaaacatgcaactttagcagtactgtttatcccagactgggacacgaatatatgtatcaagatttttttgtgtggccatcaaaacatattgggccgtggttctaggcttcaagcactcggttttcagatccgaaccgggttgaatgttgggtcttcagatgacgacccggagaggaatttacttggactcacccacttcatatctatgtactaatgaaaataaaaatatccaacaggccattacggatgatcatcacacaattattgcatgcaccaacccattatcaatatttttgttttttgtttgcaaaacacaattatcaaatcggcaagtagatgttagtcttaatcactggaataatgacgaaactattcgagtgattaactgattatatatatacttttctgtcagtgactatatttagtataaccaaagaaagtatttaaatagtgttgcaatttctttataaccgatctgaagtttgagctgttatgtgattttttatctttttttttgtttttattctttccgctttcgtaaaagctttttataaaccattgatagactgatagtgaaagaaattagtcgacgaaaaaaaaaaaggaaaaaaaatcgacgacaaagttgaccaattagatgccacgtcatcaagactaattgtaatttgtcaagtggtccccgcttcgtagagcccaaagacgaaatcttattcacgtgcttgtaaattaccaatatgcccttcttaagttccggtgaacgattcaaagtcaacgacgacccccatgggtcgatctaaaaaagagttgactggaggataaacaataaaaatatacaacattaggctatatatttgttgaacattaaaaaaagttataaaatttgttgaacaagaaaaggttataaatttagaatctacacacaacaaaacgaggacttgaagacctcgttgtttcctaaagactgaaatctgttgttcctaatgatatgaacatcattaggcgcaaagtatctaatttgaattgtgcgtgcatgttttttctttttaattattgacttattgtgcatgcatgttaatttacgattctaatttctaaagcattagcctctttcgtaacttagtggaactttaagttacaaaaaaaattatgaaaatccattcgattaattaggtgtagttggatttgggtcaccatggaactcatttatattattgacctgtccttttctcacttgatctattgtttatttagagaatatggtaactgttacaagatgtttggtaaattatagcctaaccaagctaacataaacgtaaataatatcgaataactcaattttgaaggtgaaaatggattattgattattatttatatactatggactatggagattggagacagacaatattcacggtaagaataatcgacaatggacaaatttaatatcaaattaaaaataaaaaaatatattaaaatatgctagtgtgctgaaaattttgaagttgaccggtcttcttgatattttttgtaacaaacaaaaaaactagctgcaataggactcaatcaatacgattgaaaaaataataaaaatcccataaaaaaataattgtaatcctagtttgacttctcaattctctgcatctctcaatcacgcatttatatatcatatcattcaagcctttttatcttagtgtctctctataaccagagaaattatttcaagatctacttctcatcatcgttcttttcttatctcttcttgtccaacttcttctgaatcaagacaagagaaaagcaaccaaagatggcacagtgagtgttctgtttctttttctctgatgtcaaccgtttcaagattcttatagtaagagaaattatattgacaatctttaatgttttgaaattaatctgcagtcttcaaagaacatttcctactgagatgtcaaaaggtagagctagctttccaaaaggctttctctttggaactgcttcatcttcttatcaggtaaatcagttcgaatcaagaactataaaaaaacattacaagatcaaaatgatatttacttttaagttttgtttttttctttgtattagtacgaaggagcagtgaatgaaggtgcgagaggacaaagcgtgtgggatcatttctccaacaggtttcctcacagaatcagtgattctagcgacggaaacgttgccgttgatttctaccatcgttacaaggtacttttcttctcttcttgttctgttttttttttcgatttcttacttgtcaaggtaatttagttacaagacttgaagatctgtgattgatttcttgtacaggaagatattaagagaatgaaggatataaacatggattcgtttcggctttccattgcttggccacgagttctaccttgtaagtatatcatcagtttcgaaaccttattttaacgacaatcgatcgccgtttcaaaatcgatactaatctttgaaaacaaaaacagatggcaaaagggatagaggagttagtgaagaaggaattaagttttacaatgatgttattgatgaactcttagccaatgaaatcactcctcttgttactatctttcattgggacataccacaggatcttgaagatgaatacggcggttttctaagcgagcagattatgtaagcaaaattcatttatttgaaatttgaacaagttgtggagatatttatgttaggtgatgtgtatatgcagagatgacttcagagactatgcgagtctctgcttcgagagatttggggacagagtgagtctgtggtgcacaatgaatgagccgtgggtctacagtgtcgcgggctatgacacaggaaggaaagcgccaggacggtgctccaagtatgttaatggcgctagtgttgctggaatgtcgggatacgaggcatatattgtgagccataacatgcttctagcgcacgcagaagcagtggaagtgtttagaaaatgtgaccatgtaagttaaaaaatttcccttaatagataatatttgtcattttccaatactatgttctgttgtattgatctgatttgaatacaatgcagattaaaaacggacaaattgggattgcgcataatccactttggtacgagccatatgatccgagtgatccagatgatgtcgaaggatgtaatcgagctatggacttcatgcttggttggtaagtcatgactaaaaagtcaagtaaataatcttcattacgaatctacatataaatagatgggtcaattagctttgaggcacaagttcacaaaaccgtttttgattgtcttcttgtggcgatatgttggcaggcatcagcatccgactgcttgtggagactatccagaaacgatgaagaaatcagttggagatagattaccgagttttacaccagaacaatctaagaaacttataggctcttgcgattacgttggtataaactactatagctcgcttttcgtgaagagtatcaaacacgtggatcctacgcaacctacttggagaactgaccaaggcgttgattggatgagtatgtctttttttggtgattatgatttatgaataataatgatggaaactttgtgactaacttttggctcatactaaaacactttgcagaaaccaacatagatgggaaacaaatagcaaaacaaggaggatcagagtggagtttcacatatccaacaggactcagaaacattttgaagtatgtgaaaaaaacttatggcaatcctcccattctcataactgaaaacggtaaaacaaacttaagtttctctgtttctgtgtctctgtttactctgtttatatgtttctgtttctctcaagacctcatgcaacattttctataataatctcagggtatggtgaagtagcggaacagagtcagagtctttatatgtacaatccttcaatcgacacagagagattggagtacattgaaggacatatccacgctattcatcaagccatccagtaagttagatatatatgactagagttcttttaagtatatctgaaaatccctgaagaaaacctaattatttactctgtcttgaatttaacagtgaagatggagtaagagtggaaggttattacgtatggtcattgctagataacttcgagtggaacagtggatatggtgtgagatatggtttatattacattgattacaaagatgggcttagacgatacccgaaaatgtcggcgttatggttgaaagagttcttgaggtttgatcaagaagacgattcttcgacgtctaagaaagaagagaagaaagagagctatggaaaacagttattgcattctgttcaggacagtcaatttgttcattcgattaaagacagtggtgcgttacctgcggttttggggagcttgttcgttgtgtctgcaactgttggtacttctctgttcttcaaaggagctaataattgaaacagaagaaacaaaattttaaaaaattgttgggatttgttgttgttcttgaaagattgaaaaagaactatgtgatactttgtactattcttttctataatttattgtgtgttttgttattgaaaacttgtgtggtctattagttgagaaagattcagtgtctcccaagttagcgagtgtattttactgaagctgtttatatgtgcctgaacgatcggccctttaagtagttcctaaaactagcccatatttagtgatctcattattcgttatcctctgtaattcaatttccacattgaaaaattaggcctagtctcatacccttcttttaatgtagaaattgaattaatttttgctacccaagcggtttccatttcgaacaacagatttgtcaaaaaaagaaaaaaaaaaaggtgtaattcttttaatttgaaaaaaattcaaaaaaattcattggctgaattagggcatcccgttggaaaagaaaagaaaaaaaaaacaatatgggcttcaaatttaaatatggacatatttgggcttcattcttagagcccataacgaacatacccggtcagttccggaacccgtcaattccggtcatttgcattatttattgttctctctttttctttcttttttctctttttttttttttttttttttggtctttcaaattctagtttataatcctgatcttaattatttcttgatatataatgtcagaaattggcatatatgaatatttttctatctatcacaacagtcatcaagctttaaaagaaataattttgatcaggattataaaattggaattgttataaactccgtagcaaaataaaagggggtaatactaactaatgcaatggaatgcaataaagaaaaccacatgggaagtaaagagaagacaaaggtcacatgccaatgccataattctagtgtttgttccctctctactatacctccattcttcttgttcccatcttttttttcttcctctcctctcttatcttctttccttaaaacttttttttttaggtttttgatagctacgaaaaattagacattttctcgtagtcttttacaaaatacggttgatacgacacattgaacgtccattccaaatgttgcgcaaagcgtttttggtgtttcttaagctattaacacaacactcaccactttatggatatttttgactaagagtattgtttcatccggattgataagatctatgtaataaatatacgacaagcgaaaaaaaaaacttaagaattaagataatgataacaaaattaatcgacagacagagtccaggttcctagtctagtaataatgaaggataagacattgtcgtcggctttaaatgggccatgaacccatatgtgagacttcttcatgtgagccatcaaatttgggggcaccctttgtttttctttttcttttacccttttctccgattatgctggtttactgaattaatacttctctgcgttgacctgcttgtgtatattcaagtcaaaggggcttgatcgtctttccccaagaagattaaaactggaaggaaaataattttgaaaacgatcgatggtgatgatgatgtggttggccactaagtttggccaatcggcttctgttaatgtctttggttcccatatgattggcgtattgtgattgagaccaaaagtccaaaccttatatctgtttggtccattccattgtatacaaccctggtatactacattaattaagtttgcctacttaacaaggcacttgtggggatctgattgaccttcaaattagaattagacaaattaatcaatcccttcgatcgattgttatacaaatgtgattttcatcattgtatccattgatgttttagtcgtataatcattctggatatgtatcatttacacaatggtgcgatcttgtccaaacaaccaaaacctaacgattgctcagttaattaactattttggatttattaaaacatatttaggtacgacttaagtgtttggctagttaaatccatcgttttctcatcaataatccaaatatgtctatgtcatttatatactatactacaaaacatgagaaagtgatcgccttaccttgcgatggggataagagaagagagtgctcagttttttttttctcacatgaggatggtcccatcatgttttcacatcttttataagtgttcattgaaacttgtaccatcaacgtctcttcgttatgatatcattattaaaactttcattatccttttctgcgatcgattggaaactttggatcttgggtttagtgggaggccttatcacgttattaatttagttcattagagtaatgattcgaagagcgcacaaaatggagtatagtttttctttttctagttacctatagatcgtgtttacttgattttcaagttccaagtacctttccactttttattttatctaatcatttttccctcctcacgtccacaaaactcaaaattaagaatgtgtcatctccaaaaattctacgaatataaaattgtcacgtggcaaatttccacaaatccacagaacatagaaaacacgcaagtacattagtgtttcatacgcaaacaaacatctcccattctcaactatgattgcaatatttgaaagccaataatgctctctggatttgtttacacaattgaaaaatgtatacttaagttaaggttattataattgcatcatcatggtgttttgtttttgtaatgtaaggaaaaatcatgatcattccatcataatattaggttttcgaatcatgtattaacacgaacaaagtacttctttcatcatataaatctttattgttactcttaattataacaatagaaaatgtccttgaagtagtcattactgattttaccaaagattactacgtgaagacctctttagggtttcgactttcgagatacatgatatcgctataatagttccacttgtggtctaaatattaaaaagaacatatatcaaaacaacttgtgaaactactgtgtctttcttaatgattatcttggcatataaaattcaggagatgaggttgttctgataagaaagtctcagttagaggtttaaccataaaaacaaagtcttaatggtggttcaactcctagttgtcatccatatgtcccatcgtaaatgcatcaagccatcaagacaagggaaaataataatcctaatcataactaattacttaagaaacttatgattcttaaccaagttgatgtaccaaccaatagcaccatctctttattagttgattattctgatttttttaaagctggacggattagatgactgaatcgtttatgaaatttaaatattgtataagtacaccctatcaccaaatcaagaacacgaagtatattaactatggatggtaggagttgttaagctaaataagttgttacaaatgacgaatgcatctagaagtgaaaggattagcatgattaagatagcttcgtccttattgcttaatgattagggtttcgagtactctattctatataattaactaattaaaacctctggaattttctgtaaccggtattcaattatgtatttgagacaacgacattgtactagctcaatacatgagacatactattgaacattagtttaattacttattacatatggttaaattattcctaattacatataatatggcatatatagttttcgtctattttgatgcacgcatgtccaacttcaataccgtcgaagagggataagaaaattcttaaaattattgagcaagttcttgatattcttccgttttatttctttttggtccatattcttatcaggaaaacaaatactatgcactaataaatttctgtgtgtatttattgaatttgaaaacggcacaaagggggaacatgaaggcagatctacagtcgcacatgaaatggagattaaacaaataatcttacggtaagattcgcattttgttctaactcgaggaagtggtgcaacgtgatgacattctaaaactccactaatccaatggttccctaaaattccgacgaatattaaataacgtaatattctatgaataagtctaattttgtttttgcatcaacttcgaataatgtcatttggataaggacgaagcatgtactcgtcattcgtctgcgtccatcacaagctaaatactaaaccaaaattattgatcatattattggttgctccattttcattcccttatatatgctgttgttcctatatataccggaatccgtatatctcaatactacatcgctagatcaacacaacaattatttccatattatcatcctcaaagtttgagcatctgaatttcacaatcagacccaagaaacagctacttattacttgagtcgatacagaatcaaaacatatattcattttgatctatagtatgagatacttataagaatataagtaattacttagataattttttttacttattcctccaggactccatccactaactggtctaattgggtaggtacatgattttcattactattgtaatcattaatggtcattattaactaggtcagcgtctctgtatgatacaaatgtatattcttattgttaaaaatgcagtattaacttaacattgataccaaaaataaattaaaaaatgtagtattaactttgcagtatttatagatatatttaaatggatagtcagacactaaataaggacagacagatctagcaaggccaaacgatattaaaccccattttatctgatttaattaattaaatatcattttcggtaaccaaccagaatattcaagtccacacgaaatacataatactattgtatacttgaactcttcaaacttctacgtcatatgatgttcacaagtttctaatttagaatattcaaaacagctttggactcatttttttcttgtagagtcggtacatacgcaataaccacatttagtcattagattcaattatctatgttttatttcgctttcaaaagtttagtagtgtagaaatttgtccattgtaccataatgtaattgaggtagaacaatagaacatgaaatcatttaacaaaaacaaaatcgaatattatagtcacgaataaaaaataactcgcatcaatctctatgtttggttaataagaatattggacagtgaaaagtcgtactttaatttttcccataattcgacgtgagacatgtgagtggccgcagggagacacgtggcggttaataagacgttagactgacctgacgtggacgagaataccgatgtgtcaagtggattccagctggcagccacttggataaagagagttggatataacttgtaatgtaattcaacacaaaaaaaaaaaaaaacaaattctaagaaattaccttaataacatatgaccaagcttactttttttgtaagatgtcataataagtcttcttttaatgccccatttaatttccctcttaagatgaagaaaaaattatatcttactctatagttaaaatatagaactcactctctggtctctaccaaaaaaaaataatatatatatatatatgtatatatatatatatatatatatatatataaaactcacttgtagataataacttgttgaccaaacttacataattctataatattatagcaatcatttctttagggtatattcgaggagccaaaggaaatgtttgatattttataatataattgaaattaattactaattgtttttaggtatagggcttattaggagaagtgtattcacaggctgtcgtgtgagctttatttagcttttgttcttcgaatgatgcaaataaacagctggccgtatcacaacaagacactgtcatcgttgttggtgtacgcaaaggatggatatacacatttttgtgtttctattcgtaattatggtttgtgtaatttttgaactttcacaaattgacatcaataaattggtctctttcggacatattttatattatttgaaatgaaaagtgattggggttctccttttttcttattctactatatcataacatagcattaatttttgttgttgttaaaactcatattaaaattatgcgacaagtaatctaattaattttaaaactttgattctatttagaaatttatcataaaacccaaaatttaatcatctaaaaaactaaaacatagaacaaacaaatacatagccagtctttggctataagccatggcaaccaattcgtttggtaatttgtcatcttctaagtttgaagaaactgcaaattattcaaaaaatattgtttgacaaaaagacgagtgtatcatcattcccattcattacctcataaatatttgaagcacatttttctacatattattttgtttctacttaaagcatgtttaattgaatagactttgatatccagtatggctcattattcatatgccgaaatgaattcaaaacttattgatggacctaccaaaaactcccaatgactttatcataaggttcataacacacacaaaaaaacgcatttttgtggtctcttctcttaatcacagatttttttttcttaaaaaaactttctctaatcaaagttaaagaaaagaaattacagtcaaaacaattaaattagtattttaattaacaaaacagttaaacaaattcaaaataaaaactgccatgtggtctctttcttctctgtttctctctcccttcctttaagaacgcgtttgcagactttgatcagacttcgcgttcccgccgcccatctccctctctctctctttttctctctcacacgtttcttttttgtctctctccctgattcatcgccgtagctgtgtgaccgaacattgctgcgagttcctcaaaacccaaatctttcttcctcaaagactctgttttttctttcttcctttcttcaatggcgttatcgaaaaacagtaacagtaacagctttaacaagaagaaagtttcgtatatctcagtcccttctcagatcataaactctttatcatcttcctcattacaatctcttcttgtttctcccaagaaatcatcaagaagcaccaacagattcagcttctcttataggaaccctagaatctggttctttactctcttcctcgtctcactctttggaatgttgaaactcggtttcaacgttgacccaatctctctccctttctcacgttacccttgttcaacgacccaacaaccactaagcttcgacggagaacaaaacgctgcatcccatcttggtttggctcaagagccgattttgtctactgggtcatcgaattcgaatgcgattatacaattaaacggtggaaagaacgagactttgttaacggaaggtgatttctggaagcaacctgatgggttagggtttaagccctgtttgggatttacaagtcaatatagaaaagatagcaattcgattttgaagaacagatggaagtatttgcttgttgttgtctctggtgggatgaatcagcaaaggaatcagattgttgatgctgttgtgatcgctaggatccttggagcttctttagttgttcctgttttgcaggttaatgtcatttggggagacgaaaggtataaactttaaactcattataatctcttaaagaagaaagtaataagattgtgacattgttgatctaattgtttgttttgttgcaattttagtgaatttgcggatatattcgatttggagcatttcaaggatgttttagcagatgatgttcatatagtttcgtctttaccttctacacatgttatgacgagacctgttgaagagaagaggactccacttcatgcttctcctcaatggattcgtgctcattatcttaagcgagtaagatttcttaccaaaacaataccattttgaagtgtttctttgtttgactagattgagctaataatagtgttttatttcctctgtttttgcagattaacagagaaagagttttacttctccgtggactcgattcaagactctccaaagacctcccttcagatcttcagaaactccgatgcaaggttgctttccaagcgcttagattttctccgaggattcttgaactcggtaataaactagcttcaagaatgcgtaaccaaggacagtatctctcacttcatctaagaatggagaaagatgtttgggttagaactggttgtctccctggtttaactcccgagtacgatgaaatagtcaacagcgaaagagaacgacaccctgagcttcttaccggtagatcaaacatgacttatcacgagagaaaacttgccggtttatgccctttaactgctctagaagtcacaaggtattataccaactctatgaacaaatccttttgcttatgttttttcaagtaatactaacattttgttgtcattctacaggctgcttaaagcattagaagctccaaaggatgcgagaatctattgggcaggaggagagcctctaggaggaaaagaggttttggagccactaactaaagaattccctcagttctacaacaagcacgatcttgctttacctggcgagcttgaaccatttgccaacaaagcttcggttatggctgctatagactacattgtctgcgaaaagagcgatgttttcataccgtctcatggaggaaatatgggacacgcgttacaagggcaaagagcttacgctggtcacaagaaatacatcactcctaataagagacagatgcttccttatttcatgaactcgtcgcttcctgaatcggattttaacagaattgtgaaagatcttcatcgagaatcgctaggacagccggagttgagaatgagcaaagctggtaaagatgttacaaaacatcctgttccagagtgtatgtgctcggatagacaacaacaagaacaacagtccgatgcttaagccttgaaggacattttggacattatttggtgcgcggaaaatgaagaagacgccgattttttcccgatcacccggaagattgattgaggaagacgattcatggtggttcgtgcgatattcttttagttcgggttttaatctgatcattttttcaaaatcttttggagtaaatatatattcgtttcaactgaggttatttttttcttacatgtttttacgatatacgtgagaagtagaatagtgaggttataagatatgattctttgattcgatttatttgggctgtaattatatattacagagtttgtatacggttctagttgtacttgtactataaataaagcaacagttaatcatctcctccaactctgttattttgttgaaattcacctaaccataggtttacatattcacaaaactacaaatgtgagtgaagtagctaaatcatgaatatttcagctacaaacatattataactcatattcaattggtcgacaaaagatgagacaatatgctgatgaagacataaaagacgacgtcgcgttgtgtctgtttggtttgatgattaaacgacggcgttttaattagggcttcgtttagttacaaaacgacgcagtttgctttcttcacgctcatagattgaagtctcgcgaacagtcttgttgggttttgggttttgagagacagagaggttttggcttccgggtcgttagtgtttgatcatcttcgtatctcagaagggtgaactttgttgttttggcttttgcgtactgttgaatcagcttttccaggtttggtttcgttttctggtttttgattagagaacttaaattaaggacctttaatcgttttatggtgtgcttccaattctttgttaacagttccgtgaactcaattcatagagctagtctgattatatcttaggttttagtgaattagtctgaatattaatcagctgtgaattgaatgaaacagatgcctcgaagaccatcatcaggaagaagagtgttaaagcatcagcctttaacattttcaccgtttatgcggttactttcctttgcttcaatggctaggcgtgatttgtctcatcctgaagattgtcaatgttctgatgaagatatatcttttggtgagtaaaccacttagattgattgagacttttcttttcacaaacattgtaattatagtgatgtatcattctcattttgtagatgaaaagcaaaagatccctaatttaccaagaaaagggaaagaagaacaagtctcggactcgtctgatgaagaagattctcaggtaagggattaatttactcttcttctgttggttttgtagatgaaaaagatcagaaattcgtcttttattcaatgcttgatctttgtaggaagatgtccaagcagactttgagttctttgatcctaaacctacagactttcatggtgttaagatcctgttacaaaactatctcgatgacaaggagtgggatttgagcagttttgttgattgcatattggagcaaacaactgtaggaactgttgtgaaagtagctgatgatgaggatgagtcagtatttgctcttgtcactgctcttaacatggcaagagataaggcaagtcactagaaaactcactcgatacatgctttgttcttacaggaaacttggtgtttgattttgttacgcttgttgaagtaattctaatcatagaatgtgtttgttggcatttgttcaggacaacaagtgttttagagagttaaaagagtttcttcgtaaagtttgttctgaaaagaatatagcgaataatctagaaatgctcttagagaaaaaggcacaagatgttggtttattggtatctcaaagagtgatgaatcttcctccacaacttcttcctccactttatgatggattgttcgatgaagtctcatgggcaatcgaagatgaggttcgatcttgtaaactaaacttatatgtaactttttatgaacaatacaaatataacagttttaaagtttttttgtttgttcatatagcctacagaaaagcttcgaagatcattccgttttaagtcatatcttctagttaccaagatttacaaggtaatttttgtgttatgctaaggttttatattgtctagcctttttgttttaacaatatgatatgtattcttggttatatagctgaagaatcctaagcagagaaaacctcgacatggtgaagaagacattgaagacacagtatttcttaagcctgaagatgaactctttctcgaggtaacttattctcacatatattgactcgactacccgtgtgaaatagataaacataatctctgaacatatgttggaaaaactgcatttgcagcttagctcttggtccttcacattccctatgcgctcacagctcgttacttcccaagaagtaagtttatctctccggcttatacacattgtttttattttattgtttctggcttgtcatgtttggtttttattggctttgctcgcagatgaagaattatcagctgatgggtttagtgatggccgtggaagcaaacaagattcctaaattcagacagatgttgaactctctcattgattaacaatgatgaacatcttcttcttaaagattcaattaacggtttagttgtaatcgattcccgccagttttgtttgattcggttaaggattattgaggcttgttattacccaaactgtggtttgttttgtctaaaacgatgaggttcttattagttattactccttcagcttaataccttttgaacaaatgtgtacaaaaccagtttaattttgacgagaaccggtcgaatatttaaccgatttggcttgattttcaaaaccatgaaaactttacaattaaaatttgagcggtctaaaccattagaccgtttagagatccctccaacccaaaatagtcgattttcacgtcttgaacatatattgggccttaatctgtgtggttagtaaagacttttattggtcaaagaaaaacaaccatggcccaacatgttgatacttttatttaattatacaagtacccctgaattctctgaaatatatttgattgacccagatattaattttaattatcatttcctgtaaaagtgaaggagtcaccgtgactcgtcgtaatctgaaaccaatctgttcatatgatgaagaagtttctctcgttctcctccaacgcgtagaaaattctgacggcttaacgatgtggcgaagatctgttgtttatcgtttctcttcaagaatctctgtttcttcttcgttaccaaaccctagactgattccttggtcccgcgaattatgtgccgttaatagcttctcccagcctccggtctcgacggaatcaactgctaagttagggatcactggtgttagatctgatgccaatcgagtttttgccactgctactgccgccgctacagctacagctaccaccggtgagatttcgtctagagttgcggctttggctggattagggcatcactacgctcgttgttattgggagctttctaaagctaaacttaggtatgtgtttacttttcttttctcatgaaaaatctgaaaatttccaattgttggattcttaaattctcatttgttttatggttgtagtatgcttgtggttgcaacttctggaactgggtatattctgggtacgggaaatgctgcaattagcttcccggggctttgttacacatgtgcaggaaccatgatgattgctgcatctgctaattccttgaatcaggtcattgaaatgttgagaagttcataaatttcgaatccttgttgtgtttatgtagttgatcttgcttgcttatgtttatgtagttgaaaagtttaaaaatttctaatccttggtagttgatctcgcttgtttgttttttcattttctagatttttgagataagcaatgattctaagatgaaaagaacgatgctaaggccattgccttcaggacgtattagtgttccacacgctgttgcatgggctactattgctggtgcttctggtgcttgtttgttggccagcaaggtgaatgtttgtttttttatatgtgatttctttgttttatgaatgggtgattgagagattatggatctaaacttttgcttccacgacaaggttattgcagactaatatgttggctgctggacttgcatctgccaatcttgtactttatgcgtttgtttatactccgttgaagcaacttcaccctatcaatacatgggttggcgctgttgttggtgctatcccacccttgcttgggtaaatttttgttccttttcttctttattttagcagattctgttttgttggatactgcttttaattcaaaatgtagtcatggttcaccaattctatgcttatctattttgtgtgttgtcaggtgggcggcagcgtctggtcagatttcatacaattcgatgattcttccagctgctctttacttttggcagatacctcattttatggcccttgcacatctctgccgcaatgattatgcagctggagggtaagaccatatggtgtcatatgagattagaatgtctccttccatgtagtgttgatcttgaactagttcaatttcgtggaatgatcagagtgtcctagatagtgtcacagcagtcgacattttagtggctagataatgagttctttccgttagagataaacattcgcgaacattgtttccagcttccgcgacccaacttctgattttgtttcttggtaccttgttttcagttacaagatgttgtcactctttgatccgtcagggaagagaatagcagcagtggctctaaggaactgcttttacatgatccctctcggtttcatcgcctatgactgtgagtcttgtagattcatcttttttttgtagtttattgactgcattgctgtatctgatttttgctgttccttccaatttttgtgacaggggggttaacctcaagttggttttgcctcgaatcaacacttctcacactagcaatcgctgcaacagcattttcattctaccgagaccggaccatgcataaagcaaggaaaatgttccatgccagtcttctcttccttcctgttttcatgtctggtcttcttctacaccgtgtctctaatgataatcagcaacaactcgtagaagaagccggattaacaaattctgtatctggtgaagtcaaaactcagaggcgaaagaaacgtgtggctcaacctccggtggcttatgcctctgctgcaccgtttcctttcctcccagctccttccttctactctccatgataacctttaagcaagctattgaatttttggaaacagaaattaaaaaaaaaatctgaaaagttcttaagtttaatctttggttaataatgaagtggagaacgcatacaagtttatgtattttttctcatctccacataattgtattttttctctaagtatgtttcaaatgatacaaaatacatactttatcaattatctgatcaaattgatgaatttttgagctttgacgtgttaggtctatctaataaacgtagtaacgaatttggttttggaaatgaaatccgataaccgatgatggtgtagagttaaacgattaaaccgggttggttaaaggtctcgagtctcgacggctgcggaaatcggaaaatcacgattgaggactttgagctgccacgaagatggcgatgaggttgaaatcaatggcgactttgccgaaattgattcaaagtatgagaaaagaagttccgaagcattctaatcctgttttgccctctctgagacgagctttttccctctatgatcagatcaatctcattgacaatgttcctgaagaccagcttcgcttccaagagtaatcaattccaagctttctctattgtttttcgtcgttgattttgttttttaccgactgtgtttctgggtttgatttaatgaatgattagggtttttggaattggaaatgtataaatatgtggtggttgattgattctcttcacttactttgcagatttaatgatacgagtttcactgtgaatggagtcaaatacgaaggtagcttactctgtgttgggaatctgttaatgtcatggagtcctcgtaaattttcagagatcaccactgataggtatcttctctcttctcaggcctttgattctcaccaatgttctgtcacaaccttatatcgatttgagctgatttttatgactgtgtttgagtgaaagttgtgtgcttttggcaatagattggttgaaggttttcaatgttcattgtcatgagaggatttgacagctttatcaatttgaagtgtttgataaaacatttggtttattttcgacaagtgttcttttttttttttgtcattgagagcaatggctaaacgtttgtatatttctatttccatggatgcagcttgtctatcttccagacagttcgacctattccaggtaataatatttgtgtacccatgagtcatcagtatgaaaataaaactgtattagtacctctggttgattaacttttgctgcatattagcttcaatctcagctcttattagatattctaaactaaatcatcgaattgtccagagctcttgattgttggttgtggaagagacattcacccggtaactcccgaggtccgtcagtttgtcaagtcccttggcatgaaactagaaacagttgattctgtaagtttcttaatccatttctacaggcttcttttctagtcccaagcttacttcataacttcttattcgcttattatattgattacttttaattcagagaaatgctgcatcaacgtacaacattctgaatgaagaaggaagagtcgttgctgcggcattgcttccatatggagttacatcctaaagaaaactaacaactcgagctctggctttctaaactgtaaatggtttttgagaccttccgaaaataaaccgaatttcatcggagtttttattgcgtttgagctatataacaaacgttgtaacatggtgcgactttatctcgcatttctcatccttccaaagatataatatctccagagactatgttgtatcaatgaatgagatttaaagaatctgaattacagttatatttttaacggaaatcgttacggttagttaaaaacttagaaatgagtttttgagtatataaaggaagaagaagaagagagagtcattttcttgtagtcaaattcgtatctcgcggggaagaagaagaaaagactgctttttctcaaaaccctaaaatctctctctccggatccatttctcgaacatggcgtctattgttcaaccatcgcctactttcccggcgctaaatctccggcgttcttctctgattcgtccgccttcttccgttcgatttcctcttgtaagtctcatctacttctctcactctctccgactattatctttctattggtatttgtactttatacggtcttcttcgctcgaatctgatgaatcttgttctcgattgtttctgttggttgtggaattgaaaagaagtgtaacgcggcggatccgtacaagttcgacggcggaaactctgccggtttccatctgcttactggcgacaccgttccggctagcttttcgaggacacgtttggaagattcgatttatcagaacaccacacgacttcgtatcttttccggcactgctaatcctattttggctcaggttcgttcttagctttgttagtcgttggagttctttggatttaattgcaagaattagtagcttggaactgaaattagtttaggaagaaactgatatagacttcggaattagtagcttaaaactggagatttgttcaattgcaaagattaggattaggaagaaattggtttagagtatattctggaatcgtcttgtttgttcattggtgttttacgctgatgatacaggagatttcttgctatttgggtctggaccttgggaaaatcaagattaaacgctttgctgatggtgagatctatgttcagctacaagagagtgtaaggggatgtgatgtgttccttgtacagcctacatgcccacctgcaaatgaaaaccttatggaattgctcgttatgattgatgcttgtcggagagcatcagccaaaactatcacggctgtgattccttactttggttatgcacgagctgatagaaaggcaagtctttttctataactatagaatctgtcttggattcaatcgtcctgtgaaaacatgcacaatgatttgtctccaagagtaatcgattgtcagtttaagtcagatctatggtagttagtatttggaagtaatcaagtaatcaaattggcagcttagttatctgtatgaagctgatttgggtttatcgattgtctcattcctctggcttcacttagtttctagttgagagtttttcatttgactctttcgttgtacatattcttgcagactcaaggacgtgaatctattgcagccaagcttgtggccaatttgattacacagtctggtgcagaccgtgtccttgcttgtgatcttcactccggacagtctatgggctactttgatattccagtcgatcatgtttatggccaggtagaaaaaagtttttcttaaatgactcctctgagcatcaagttcctttttgtgaaaatagactttcttatgtcttcttttccttgtgctttaatattcatgaacagcctgtcatacttgattacctagcaagtaaggccatatcctctgaagatttggtggtagtttcacctgatgttggtggcgtcgcaagagctcgcgcttttgcgaagaagttatctgatgcacctttagcaatagttgataaaagacgtcatgggcacaatgttgcagaggtagaaaaacctttggaaaatacattttaaccaagtctggattttgacatttaacaacccgtttcatgtaggtgatgaacttaattggggatgttaaagggaaagtagccataatggtggatgacatgattgacacagcaggtgagtaataagtcacggtctgcatatctgtaaacattccccattgtgcttagatacttacgttaggtatatcatatcaggaaccataagcaaaggtgcggctctgttacaccaagaaggagcaagagaagtatacgcttgtaccactcatgccgtttttaggtaagtccatgaaatattttctctgtgttggaattataaaaaaagagaaagaagctgacatatgcatttgtgtctatattcggaaacagccctcctgcaatcagtcgactatcgagcggactgtttcaagaggtgatcataaccaacacgattccattgtcagagaagaactattttcctcagcttacagttctctcagtagcaaaccttcttggggagaccatatggcgtgttcatgatgattgctcggtgagtaaaacataaacactacttgcaattttcgcttgaagagaacttctgtgtctaataaagttttttgatattctcagggagccattgagccattttcgacgttggggattgattgagtgatggaaaaagggtaaagaatgtacttatagcctctcagtagtatgaatttctgataatgtacaaactcttttccgctgtaaaaatgttagacttgagtgtgattgtcaagaagggaacacttttgtagagaagaagatttaatggaaccacgttttcaaactttttaagaatacaatattttttttttcgtcaatttggatccaatcatgtagatagtttaccgttgaagattatttatttgtgaaatatctggattttattttattttatttaaagccaagttacatttagaccttaaacctatgacttatataagatataaagcaaacatactcaaatttgcaaaacgaggagagacaaaattaaaaaacggcggccaagacaccaacaaacggagcaacagtaaccgtcgcaggctcagcttgctggaaattactcctctcatctccataaacatcgttctcgttgggtcctccgacaagtgctcccattaaaacgttagggtttggtgcaggattgttataccatttatcataccctccactacacgtcactggtgttttgtcctttctgatcgatactatggaggctgctctatggtgtggttttttgggataattggtcccaactccaaccatgtagctcattttctgggggttcgacccaagtatatagtcaacctatataacatgaggaaatcgcaaattagtatatattatattgaaaaaagtcttgatatattttcaacaacatgttttatagttggtactatattaggttttattaactacctgggaacgagcgatttggagaagatcagaagcttgaagagcacctttgggacattggatggaggcttttgcctttgtgagatacttagaatatgctgagagaacgaaagaagcggttgtggtgtattggaggttgttccacggcaagaagtagagcaaaccgccaggggttttcttaacgttgttggaacctttttgagcacagttgcagataaactgctctgccatactcttgtactctgcgatctttccattgctccctactttccgttcaagtgcaagctgcatttgcaaaactttgtgttatgtttgtttcttgccacataagatagtgatatgttttctttagtgaaatagtcataacttaccttggccatcaagacttgtgcacccacgaacttatcgtcccaggcaaaaacacttcttggacctccggtaccagatgcttgtgttaggtaattgagataaatctggtcgttagtagcacggtggagccaagctgcagcccacaacaactcatcttcgtatccactactcgcgtagaagccacccgcgttagtaatggagttttggtaaaggccagggtgagccttagcgaatgcaaataaatcttttgcatgaccaatgagtatattggcataggctttatcaaatggtgcgaaggcgatagacgctgccgccattgcggcagctgtctcacctgctaggtcagaacctggatgttgagcatcgatgcggtatgaagtacgcggagtggtcatatcctcaggtctcatccagcatttgtggtccgagtttccctcacccacttgtccgtacaggacattaggctgaggatgggctttaatgagataatcggtggcccacttgagagccctgagcgagtttccttgctcgtggtgggccctaagctctgatcccatctctatgttgctccaagctagcatcgtcgtagtgaacgctaaaggaaatccaaacttcatattgtctccggcatcgtaataccctccggtgagatcaatctatttttacaattagcaaacagtttacttcaagtaataaatattcattacacaaaaaaatatggaataaaaataagtaattggatattaaacttacatgagcatcagaaccatctttgagtgcagaatctcctctccatgtaactttttggttcggaggcaattttccagaacgttgagcttcaaaatacaaaagactcttttggagagcttctgcataatttgtagaaacagctccacgagccatcgacattactagtaccacaatgcaaatacttgtccataagcattgtgaagatccgtttttcgattgagacatctttttttgataaatctttagacgatctcaagaccaattgtacaatagattttactttttgcttgtgttttggatgtctatgtctatgtatgtattcactatttatagagaatctataaatgatggagtccatggctagtaaaggacttgctcaaaaaaaaaattagctaaaaatgttgtaatctgttattcaactaagaattaagaattttagaagactttggtttttctttaatatctcatgttattcaaatattgagttctaaatatctttccaaatcctagtttagtactgaacatgaaacttaggtaaaatcatttacactttcttgttattcaaataatcatttataaaagtcatatgaaatccaatgttattcaaaatttcttaaatttcttaagaaagagtttcggaaagggttttaagatatttttaatcacaattttagttgaaaatagagaaaaatcacattcttgatagggatgtcaaatgggctgatgatcatgtcatagaacagtccaaattataatggttaggctatgatcaaacccaaagtcgaaggagtcatataggctagaaactcatttaccctacaaaccaatgggactaactcatctggacagtgacaatccaataagccttaaaaattagggttactaatttgaagatattttttcctcatttttcttaaaaaacaatagttaaaaaggggttggatttgggaaatttgaagttgaaaaacattccccggaaaattgatgagatgtcgacgttggtttagtttacattttgtgttagttgtctttgggaattaagcctgatccaataataaaggaaggattttaattacagctttgacagaggattgttgtacttcacagtaaagtccaagcttgaaagtcagggaaaagtgaggtactcaaaattgcgttgtgtagtatatatggacattgatgataaattagtgattaaaatgtggaattataaacagagaaagaagcagaactattttcctcagcttacagttctctcagtagcaaaaatacattttttcttggtcaattatgatccaatcatgtagaaaatagtttccagttcaagatcaattatttctgaaatatattggtttttaacttttaactatcaattatattatattttcaagccaaattacatttagacctaaatcaatgaacagcctaggacttatataagataacaaggtctaaagcaaacatactcaaatttgcaaaacgaggagagacaaaattaaaaaacgagggccaagacaccaacaagcggagcagtagtgaccgtcgcaggctcagcttgctggaaattactcctctcatctccataaacatcgttatcgtcgggtcctccgacaactgctcccgctaaaacgttagggtttggtgcaggattgttataccatttatcataccctccactacacgtcactggtgttttgtcctgtctgatcgatactatggaggctgctctatggtgtggttttttgggataattggtcccaactccaaccatgtagctcattttctgggggttcgacccaagtatatagtcaacctatatcacatgaggaaatcgcaaattagtaaatattatactgaaaaagtcttgatatcttttcaacaacatgtcttatagttggtactatattaggttttattaactacctgggaacgagcgacttggagaagatcagaagcttgaagagcaccatcgggacagtcgatggaggcttttgcggcttcaagatatttagaatatgctgagaggacgaaagtagcggctgtggtgtattggaggttgttccacggcaagaagtagagcaaaccgccaggggttttcttaacgttgttgtcacctttttgagcacagttgcagataaactgctccgccatactcttgtactctacgatctgttcactgctctctactttcccttcaagtgctagctgcatttgcaaatttttgtattatgtttgtttcttgtcaaataagtcagtgatatgtttctttagtgaaatagtcataaactaccttggcgaccaagacttgtgcacccacgaacttatcatcccaggcaaaaacagtccttggacctcctgtttctgcttctgttaggtaatcaagataaatctggtcgttggtggcacggtggagccaagctgcagcccacagcaactcatcttcatatccactgctcgcgtagaagccacccgcgttaggaatggagttttggtaaagtccacggtgagccttagcgaatgcaaataaatcttttgcatgaccaatgagtatattggcataggctttatcagatggtgcaaaggcgatagacgctgccgccattgctgcagctgtctcacctgctaggtcagaacctggatgttgagcatcgatgcggtatgaagtacgcggagtggtcatatcctcaggtctcatccagcatttgtggtccgagtttccttcacccacttgtccgtacaggacattaggctgaggatgggctttaatgagataatcggtggcccacttgagagccctgagagcgtttcccttctcgtggtgggccctaagctgtgatgccatctctatattgctccaagctagcattgttgtcgtgaacgccaacggaaatccaaacttcatgttgtctcccgcatcatagtaccctccggtgagatcaatctatacatttttacaaatagcaaatattttagttgaacttgataaacatacattacaaaaaaaaaaaaaaaaaaggatttgagtgttaaattacatgagcatcagaaccgtctctaagagcagaatctcctctccaagtaactctttggttcggaggcaattttccagaacgttgagcttcgaaatacaaaagactgtttttgagagcttctgcataatttgtagagacagcttcacgagccatcgacattactattaacacaatgcaaatacttgtccataagcattgtgaagatccatttttcaattgagacattgttttttcaattaatctttagacaatctcaagaccaattgtacaattgattttactttttcttgtgtttggcatatgtctatgtattcaactatttatagagaatctatataagatggagtccatggctagttaaggacttgctcaaaaaaattttagctaaatatgttgtattcaactaagaattaagagttttagatgactttgggttttctttaaaatctcatgttattcaaatattgagttctaaatatctttccaaatcctagtttactgaacatgaaacttatgtaaaatcattcaaatcatttagaatttcttgttattcaattaatcatttataaagtcatatgaaatccattgttattcacaatttcataaatttgttaagaaagagctttggaaaggattttaaagactttatttacagttttagttgaaaatagtgataagaaaaatcgcacctctagatagggatgtcaaatgggcctaatgaccatatgataaaccagtccaagttataatggtttggtgcttgtcacgcccaaaatcgaatcggtcaatattggacatcttggtcaatttatgatctaatcatgtagaaaataatttcagtttaagattaattattggttttaactatcaaatatattttattttcaagccaaattacatttagacctcacacctagattaaagaacagcctaggacttatataagataacaaggtctaaagcaatatactcaaatttgcaaaacaaagagaaagattaagcaacggccgccaagacaccaacaaatggagcagcagtggccggagcaggctcagcatgctggtaatcagtcctctcatctccataaacatcgttatcgttgggtcctccgacaactgctcccattaaaacgttaggatttggtgcaggattgttaaaccatgcatcgaatccttcactacacgtcactggtgttttgtccttggtgatcgatacaatagaggctgctctatggtgtggttttttgggataattggtcccaactccaaccatgtagctcatgttctgggggttcgacccaagtatatagtctacctatataacatgttgtagaaatcacacattaatattgtatgaacatcagaacatgtcttatggtatgtactatattagggttagttaactacctgggaacgagcgaggtcgagaagatcagaagcttgaagagcaccattgggacattggatggaggcttttgcgtctgtaagatatttagaatatgctgagaggacgaaagtagcggctgtggtgtattggaggttgttccacggcaagaagtagagcaaaccgccaggggttttcttaacgttgttggaacctttttgagcacagttgcagataaactgctctgccatactcttgtactctgcgatctttccattgctctctactttcccttcaagtgcaagctgcatttgcaaaaactttgtgttatatatgtttatttcttgtcacataagttactgatatgttgtctttagtgaaatagtaccttggcgaccaagacttgtgcacccacgaacttatcatcccaggaaaaagcagtcctcggacctcctgtaccagatgcttgtgttagataatcaagataaatctggtcgttggtggcacggtggagccaagctgcagcccataacaactcatcttcgtatccactgctcgcgtagaagccacccgcgttagtaatggagttttggtaaatgccagggtacgccttagcgaattc

SEQ ID NO: 375 - DNA, 109375 bp, Arabidopsis thaliana
gaattctctgaaatatatttgattgacccagatattaattttaattatcatttcctgtaaaagtgaaggagtcaccgtgactcgtcgtaatctgaaaccaatctgttcatatgatgaagaagtttctctcgttctcctccaacgcgtagaaaattctgacggcttaacgatgtggcgaagatctgttgtttatcgtttctcttcaagaatctctgtttcttcttcgttaccaaaccctagactgattccttggtcccgcgaattatgtgccgttaatagcttctcccagcctccggtctcgacggaatcaactgctaagttagggatcactggtgttagatctgatgccaatcgagtttttgccactgctactgccgccgctacagctacagctaccaccggtgagatttcgtctagagttgcggctttggctggattagggcatcactacgctcgttgttattgggagctttctaaagctaaacttaggtatgtgtttacttttcttttctcatgaaaaatctgaaaatttccaattgttggattcttaaattctcatttgttttatggttgtagtatgcttgtggttgcaacttctggaactgggtatattctgggtacgggaaatgctgcaattagcttcccggggctttgttacacatgtgcaggaaccatgatgattgctgcatctgctaattccttgaatcaggtcattgaaatgttgagaagttcataaatttcgaatccttgttgtgtttatgtagttgatcttgcttgcttatgtttatgtagttgaaaagtttaaaaatttctaatccttggtagttgatctcgcttgtttgttttttcattttctagatttttgagataagcaatgattctaagatgaaaagaacgatgctaaggccattgccttcaggacgtattagtgttccacacgctgttgcatgggctactattgctggtgcttctggtgcttgtttgttggccagcaaggtgaatgtttgtttttttatatgtgatttctttgttttatgaatgggtgattgagagattatggatctaaacttttgcttccacgacaaggttattgcagactaatatgttggctgctggacttgcatctgccaatcttgtactttatgcgtttgtttatactccgttgaagcaacttcaccctatcaatacatgggttggcgctgttgttggtgctatcccacccttgcttgggtaaatttttgttccttttcttctttattttagcagattctgttttgttggatactgcttttaattcaaaatgtagtcatggttcaccaattctatgcttatctattttgtgtgttgtcaggtgggcggcagcgtctggtcagatttcatacaattcgatgattcttccagctgctctttacttttggcagatacctcattttatggcccttgcacatctctgccgcaatgattatgcagctggagggtaagaccatatggtgtcatatgagattagaatgtctccttccatgtagtgttgatcttgaactagttcaatttcgtggaatgatcagagtgtcctagatagtgtcacagcagtcgacattttagtggctagataatgagttctttccgttagagataaacattcgcgaacattgtttccagcttccgcgacccaacttctgattttgtttcttggtaccttgttttcagttacaagatgttgtcactctttgatccgtcagggaagagaatagcagcagtggctctaaggaactgcttttacatgatccctctcggtttcatcgcctatgactgtgagtcttgtagattcatcttttttttgtagtttattgactgcattgctgtatctgatttttgctgttccttccaatttttgtgacaggggggttaacctcaagttggttttgcctcgaatcaacacttctcacactagcaatcgctgcaacagcattttcattctaccgagaccggaccatgcataaagcaaggaaaatgttccatgccagtcttctcttccttcctgttttcatgtctggtcttcttctacaccgtgtctctaatgataatcagcaacaactcgtagaagaagccggattaacaaattctgtatctggtgaagtcaaaactcagaggcgaaagaaacgtgtggctcaacctccggtggcttatgcctctgctgcaccgtttcctttcctcccagctccttccttctactctccatgataacctttaagcaagctattgaatttttggaaacagaaattaaaaaaaaaatctgaaaagttcttaagtttaatctttggttaataatgaagtggagaacgcatacaagtttatgtattttttctcatctccacataattgtattttttctctaagtatgtttcaaatgatacaaaatacatactttatcaattatctgatcaaattgatgaatttttgagctttgacgtgttaggtctatctaataaacgtagtaacgaatttggttttggaaatgaaatccgataaccgatgatggtgtagagttaaacgattaaaccgggttggttaaaggtctcgagtctcgacggctgcggaaatcggaaaatcacgattgaggactttgagctgccacgaagatggcgatgaggttgaaatcaatggcgactttgccgaaattgattcaaagtatgagaaaagaagttccgaagcattctaatcctgttttgccctctctgagacgagctttttccctctatgatcagatcaatctcattgacaatgttcctgaagaccagcttcgcttccaagagtaatcaattccaagctttctctattgtttttcgtcgttgattttgttttttaccgactgtgtttctgggtttgatttaatgaatgattagggtttttggaattggaaatgtataaatatgtggtggttgattgattctcttcacttactttgcagatttaatgatacgagtttcactgtgaatggagtcaaatacgaaggtagcttactctgtgttgggaatctgttaatgtcatggagtcctcgtaaattttcagagatcaccactgataggtatcttctctcttctcaggcctttgattctcaccaatgttctgtcacaaccttatatcgatttgagctgatttttatgactgtgtttgagtgaaagttgtgtgcttttggcaatagattggttgaaggttttcaatgttcattgtcatgagaggatttgacagctttatcaatttgaagtgtttgataaaacatttggtttattttcgacaagtgttcttttttttttttgtcattgagagcaatggctaaacgtttgtatatttctatttccatggatgcagcttgtctatcttccagacagttcgacctattccaggtaataatatttgtgtacccatgagtcatcagtatgaaaataaaactgtattagtacctctggttgattaacttttgctgcatattagcttcaatctcagctcttattagatattctaaactaaatcatcgaattgtccagagctcttgattgttggttgtggaagagacattcacccggtaactcccgaggtccgtcagtttgtcaagtcccttggcatgaaactagaaacagttgattctgtaagtttcttaatccatttctacaggcttcttttctagtcccaagcttacttcataacttcttattcgcttattatattgattacttttaattcagagaaatgctgcatcaacgtacaacattctgaatgaagaaggaagagtcgttgctgcggcattgcttccatatggagttacatcctaaagaaaactaacaactcgagctctggctttctaaactgtaaatggtttttgagaccttccgaaaataaaccgaatttcatcggagtttttattgcgtttgagctatataacaaacgttgtaacatggtgcgactttatctcgcatttctcatccttccaaagatataatatctccagagactatgttgtatcaatgaatgagatttaaagaatctgaattacagttatatttttaacggaaatcgttacggttagttaaaaacttagaaatgagtttttgagtatataaaggaagaagaagaagagagagtcattttcttgtagtcaaattcgtatctcgcggggaagaagaagaaaagactgctttttctcaaaaccctaaaatctctctctccggatccatttctcgaacatggcgtctattgttcaaccatcgcctactttcccggcgctaaatctccggcgttcttctctgattcgtccgccttcttccgttcgatttcctcttgtaagtctcatctacttctctcactctctccgactattatctttctattggtatttgtactttatacggtcttcttcgctcgaatctgatgaatcttgttctcgattgtttctgttggttgtggaattgaaaagaagtgtaacgcggcggatccgtacaagttcgacggcggaaactctgccggtttccatctgcttactggcgacaccgttccggctagcttttcgaggacacgtttggaagattcgatttatcagaacaccacacgacttcgtatcttttccggcactgctaatcctattttggctcaggttcgttcttagctttgttagtcgttggagttctttggatttaattgcaagaattagtagcttggaactgaaattagtttaggaagaaactgatatagacttcggaattagtagcttaaaactggagatttgttcaattgcaaagattaggattaggaagaaattggtttagagtatattctggaatcgtcttgtttgttcattggtgttttacgctgatgatacaggagatttcttgctatttgggtctggaccttgggaaaatcaagattaaacgctttgctgatggtgagatctatgttcagctacaagagagtgtaaggggatgtgatgtgttccttgtacagcctacatgcccacctgcaaatgaaaaccttatggaattgctcgttatgattgatgcttgtcggagagcatcagccaaaactatcacggctgtgattccttactttggttatgcacgagctgatagaaaggcaagtctttttctataactatagaatctgtcttggattcaatcgtcctgtgaaaacatgcacaatgatttgtctccaagagtaatcgattgtcagtttaagtcagatctatggtagttagtatttggaagtaatcaagtaatcaaattggcagcttagttatctgtatgaagctgatttgggtttatcgattgtctcattcctctggcttcacttagtttctagttgagagtttttcatttgactctttcgttgtacatattcttgcagactcaaggacgtgaatctattgcagccaagcttgtggccaatttgattacacagtctggtgcagaccgtgtccttgcttgtgatcttcactccggacagtctatgggctactttgatattccagtcgatcatgtttatggccaggtagaaaaaagtttttcttaaatgactcctctgagcatcaagttcctttttgtgaaaatagactttcttatgtcttcttttccttgtgctttaatattcatgaacagcctgtcatacttgattacctagcaagtaaggccatatcctctgaagatttggtggtagtttcacctgatgttggtggcgtcgcaagagctcgcgcttttgcgaagaagttatctgatgcacctttagcaatagttgataaaagacgtcatgggcacaatgttgcagaggtagaaaaacctttggaaaatacattttaaccaagtctggattttgacatttaacaacccgtttcatgtaggtgatgaacttaattggggatgttaaagggaaagtagccataatggtggatgacatgattgacacagcaggtgagtaataagtcacggtctgcatatctgtaaacattccccattgtgcttagatacttacgttaggtatatcatatcaggaaccataagcaaaggtgcggctctgttacaccaagaaggagcaagagaagtatacgcttgtaccactcatgccgtttttaggtaagtccatgaaatattttctctgtgttggaattataaaaaaagagaaagaagctgacatatgcatttgtgtctatattcggaaacagccctcctgcaatcagtcgactatcgagcggactgtttcaagaggtgatcataaccaacacgattccattgtcagagaagaactattttcctcagcttacagttctctcagtagcaaaccttcttggggagaccatatggcgtgttcatgatgattgctcggtgagtaaaacataaacactacttgcaattttcgcttgaagagaacttctgtgtctaataaagttttttgatattctcagggagccattgagccattttcgacgttggggattgattgagtgatggaaaaagggtaaagaatgtacttatagcctctcagtagtatgaatttctgataatgtacaaactcttttccgctgtaaaaatgttagacttgagtgtgattgtcaagaagggaacacttttgtagagaagaagatttaatggaaccacgttttcaaactttttaagaatacaatattttttttttcgtcaatttggatccaatcatgtagatagtttaccgttgaagattatttatttgtgaaatatctggattttattttattttatttaaagccaagttacatttagaccttaaacctatgacttatataagatataaagcaaacatactcaaatttgcaaaacgaggagagacaaaattaaaaaacggcggccaagacaccaacaaacggagcaacagtaaccgtcgcaggctcagcttgctggaaattactcctctcatctccataaacatcgttctcgttgggtcctccgacaagtgctcccattaaaacgttagggtttggtgcaggattgttataccatttatcataccctccactacacgtcactggtgttttgtcctttctgatcgatactatggaggctgctctatggtgtggttttttgggataattggtcccaactccaaccatgtagctcattttctgggggttcgacccaagtatatagtcaacctatataacatgaggaaatcgcaaattagtatatattatattgaaaaaagtcttgatatattttcaacaacatgttttatagttggtactatattaggttttattaactacctgggaacgagcgatttggagaagatcagaagcttgaagagcacctttgggacattggatggaggcttttgcctttgtgagatacttagaatatgctgagagaacgaaagaagcggttgtggtgtattggaggttgttccacggcaagaagtagagcaaaccgccaggggttttcttaacgttgttggaacctttttgagcacagttgcagataaactgctctgccatactcttgtactctgcgatctttccattgctccctactttccgttcaagtgcaagctgcatttgcaaaactttgtgttatgtttgtttcttgccacataagatagtgatatgttttctttagtgaaatagtcataacttaccttggccatcaagacttgtgcacccacgaacttatcgtcccaggcaaaaacacttcttggacctccggtaccagatgcttgtgttaggtaattgagataaatctggtcgttagtagcacggtggagccaagctgcagcccacaacaactcatcttcgtatccactactcgcgtagaagccacccgcgttagtaatggagttttggtaaaggccagggtgagccttagcgaatgcaaataaatcttttgcatgaccaatgagtatattggcataggctttatcaaatggtgcgaaggcgatagacgctgccgccattgcggcagctgtctcacctgctaggtcagaacctggatgttgagcatcgatgcggtatgaagtacgcggagtggtcatatcctcaggtctcatccagcatttgtggtccgagtttccctcacccacttgtccgtacaggacattaggctgaggatgggctttaatgagataatcggtggcccacttgagagccctgagcgagtttccttgctcgtggtgggccctaagctctgatcccatctctatgttgctccaagctagcatcgtcgtagtgaacgctaaaggaaatccaaacttcatattgtctccggcatcgtaataccctccggtgagatcaatctatttttacaattagcaaacagtttacttcaagtaataaatattcattacacaaaaaaatatggaataaaaataagtaattggatattaaacttacatgagcatcagaaccatctttgagtgcagaatctcctctccatgtaactttttggttcggaggcaattttccagaacgttgagcttcaaaatacaaaagactcttttggagagcttctgcataatttgtagaaacagctccacgagccatcgacattactagtaccacaatgcaaatacttgtccataagcattgtgaagatccgtttttcgattgagacatctttttttgataaatctttagacgatctcaagaccaattgtacaatagattttactttttgcttgtgttttggatgtctatgtctatgtatgtattcactatttatagagaatctataaatgatggagtccatggctagtaaaggacttgctcaaaaaaaaaattagctaaaaatgttgtaatctgttattcaactaagaattaagaattttagaagactttggtttttctttaatatctcatgttattcaaatattgagttctaaatatctttccaaatcctagtttagtactgaacatgaaacttaggtaaaatcatttacactttcttgttattcaaataatcatttataaaagtcatatgaaatccaatgttattcaaaatttcttaaatttcttaagaaagagtttcggaaagggttttaagatatttttaatcacaattttagttgaaaatagagaaaaatcacattcttgatagggatgtcaaatgggctgatgatcatgtcatagaacagtccaaattataatggttaggctatgatcaaacccaaagtcgaaggagtcatataggctagaaactcatttaccctacaaaccaatgggactaactcatctggacagtgacaatccaataagccttaaaaattagggttactaatttgaagatattttttcctcatttttcttaaaaaacaatagttaaaaaggggttggatttgggaaatttgaagttgaaaaacattccccggaaaattgatgagatgtcgacgttggtttagtttacattttgtgttagttgtctttgggaattaagcctgatccaataataaaggaaggattttaattacagctttgacagaggattgttgtacttcacagtaaagtccaagcttgaaagtcagggaaaagtgaggtactcaaaattgcgttgtgtagtatatatggacattgatgataaattagtgattaaaatgtggaattataaacagagaaagaagcagaactattttcctcagcttacagttctctcagtagcaaaaatacattttttcttggtcaattatgatccaatcatgtagaaaatagtttccagttcaagatcaattatttctgaaatatattggtttttaacttttaactatcaattatattatattttcaagccaaattacatttagacctaaatcaatgaacagcctaggacttatataagataacaaggtctaaagcaaacatactcaaatttgcaaaacgaggagagacaaaattaaaaaacgagggccaagacaccaacaagcggagcagtagtgaccgtcgcaggctcagcttgctggaaattactcctctcatctccataaacatcgttatcgtcgggtcctccgacaactgctcccgctaaaacgttagggtttggtgcaggattgttataccatttatcataccctccactacacgtcactggtgttttgtcctgtctgatcgatactatggaggctgctctatggtgtggttttttgggataattggtcccaactccaaccatgtagctcattttctgggggttcgacccaagtatatagtcaacctatatcacatgaggaaatcgcaaattagtaaatattatactgaaaaagtcttgatatcttttcaacaacatgtcttatagttggtactatattaggttttattaactacctgggaacgagcgacttggagaagatcagaagcttgaagagcaccatcgggacagtcgatggaggcttttgcggcttcaagatatttagaatatgctgagaggacgaaagtagcggctgtggtgtattggaggttgttccacggcaagaagtagagcaaaccgccaggggttttcttaacgttgttgtcacctttttgagcacagttgcagataaactgctccgccatactcttgtactctacgatctgttcactgctctctactttcccttcaagtgctagctgcatttgcaaatttttgtattatgtttgtttcttgtcaaataagtcagtgatatgtttctttagtgaaatagtcataaactaccttggcgaccaagacttgtgcacccacgaacttatcatcccaggcaaaaacagtccttggacctcctgtttctgcttctgttaggtaatcaagataaatctggtcgttggtggcacggtggagccaagctgcagcccacagcaactcatcttcatatccactgctcgcgtagaagccacccgcgttaggaatggagttttggtaaagtccacggtgagccttagcgaatgcaaataaatcttttgcatgaccaatgagtatattggcataggctttatcagatggtgcaaaggcgatagacgctgccgccattgctgcagctgtctcacctgctaggtcagaacctggatgttgagcatcgatgcggtatgaagtacgcggagtggtcatatcctcaggtctcatccagcatttgtggtccgagtttccttcacccacttgtccgtacaggacattaggctgaggatgggctttaatgagataatcggtggcccacttgagagccctgagagcgtttcccttctcgtggtgggccctaagctgtgatgccatctctatattgctccaagctagcattgttgtcgtgaacgccaacggaaatccaaacttcatgttgtctcccgcatcatagtaccctccggtgagatcaatctatacatttttacaaatagcaaatattttagttgaacttgataaacatacattacaaaaaaaaaaaaaaaaaaggatttgagtgttaaattacatgagcatcagaaccgtctctaagagcagaatctcctctccaagtaactctttggttcggaggcaattttccagaacgttgagcttcgaaatacaaaagactgtttttgagagcttctgcataatttgtagagacagcttcacgagccatcgacattactattaacacaatgcaaatacttgtccataagcattgtgaagatccatttttcaattgagacattgttttttcaattaatctttagacaatctcaagaccaattgtacaattgattttactttttcttgtgtttggcatatgtctatgtattcaactatttatagagaatctatataagatggagtccatggctagttaaggacttgctcaaaaaaattttagctaaatatgttgtattcaactaagaattaagagttttagatgactttgggttttctttaaaatctcatgttattcaaatattgagttctaaatatctttccaaatcctagtttactgaacatgaaacttatgtaaaatcattcaaatcatttagaatttcttgttattcaattaatcatttataaagtcatatgaaatccattgttattcacaatttcataaatttgttaagaaagagctttggaaaggattttaaagactttatttacagttttagttgaaaatagtgataagaaaaatcgcacctctagatagggatgtcaaatgggcctaatgaccatatgataaaccagtccaagttataatggtttggtgcttgtcacgcccaaaatcgaatcggtcaatattggacatcttggtcaatttatgatctaatcatgtagaaaataatttcagtttaagattaattattggttttaactatcaaatatattttattttcaagccaaattacatttagacctcacacctagattaaagaacagcctaggacttatataagataacaaggtctaaagcaatatactcaaatttgcaaaacaaagagaaagattaagcaacggccgccaagacaccaacaaatggagcagcagtggccggagcaggctcagcatgctggtaatcagtcctctcatctccataaacatcgttatcgttgggtcctccgacaactgctcccattaaaacgttaggatttggtgcaggattgttaaaccatgcatcgaatccttcactacacgtcactggtgttttgtccttggtgatcgatacaatagaggctgctctatggtgtggttttttgggataattggtcccaactccaaccatgtagctcatgttctgggggttcgacccaagtatatagtctacctatataacatgttgtagaaatcacacattaatattgtatgaacatcagaacatgtcttatggtatgtactatattagggttagttaactacctgggaacgagcgaggtcgagaagatcagaagcttgaagagcaccattgggacattggatggaggcttttgcgtctgtaagatatttagaatatgctgagaggacgaaagtagcggctgtggtgtattggaggttgttccacggcaagaagtagagcaaaccgccaggggttttcttaacgttgttggaacctttttgagcacagttgcagataaactgctctgccatactcttgtactctgcgatctttccattgctctctactttcccttcaagtgcaagctgcatttgcaaaaactttgtgttatatatgtttatttcttgtcacataagttactgatatgttgtctttagtgaaatagtaccttggcgaccaagacttgtgcacccacgaacttatcatcccaggaaaaagcagtcctcggacctcctgtaccagatgcttgtgttagataatcaagataaatctggtcgttggtggcacggtggagccaagctgcagcccataacaactcatcttcgtatccactgctcgcgtagaagccacccgcgttagtaatggagttttggtaaatgccagggtacgccttagcgaattcaaataattctttcgcatgaccaatgagtatttgggcataggcttcatcagatggtgcaaaggcgatagacgcagcagccattgctgctgctgtctcacctgctaggtcagaacctggatgttgagcatcaatgcgaaatgaaggacgtggagttgtcatatcctcaggcctcatccagcactcgtggtccgagtttccatcgcccacctgtccgtacaagacattgggctcaggatgggctttaatgagaaaatcggtggcccacttgagagccgcgagggcgttttcttgctcttgatgggccttaagctgtgttgccatctctatattgctccaagctagcattgttgtaaagaaggccaacggaaatccaaacttcatgttgtctccggcatcatagtaccctccggttagatcaacctatgcatttttacaataagcaaatattttagttgaacttgataaacatatattacaatacaaaaaaaaagggattgagatttagattacatgagcatcagaaccgtctctaagcgcagaatctcctctccaagtaactctttggttcgaaggcaattttccagaacgttgagcttcgaaatacaaaagactctttgtgagagcgtctccataatttctagagacagctccacgagccatcgacaatacaaataacacaatgcaaatacttgtccataagcattgtgaagatccaattttcagttgagacatcgtttttttaaataatctttagacgatctcaagaccaattgtagaattgatttgattttctcttgtgtttggcatatctatgtatatgtccgtgttcaactatttatagagaatctatataagatggaatccatggctaattaaggatcattaacattcgtagttcttactcaaaaataaattagctaaaaatgttgtacctagatctcataatattagacatcttctcatttatcctaaaagatatagacaagaccaataagattgcgaactataattagttaggctatcttcttaaaaatatattccttctatttttcttatgtatatatctattaataatcttatgcattttttgaaagtttcttactatccatgtagaaatttacagtttttggtcaatattctttcaatcttttgtataaaatttacagattttgtcttaatttttattttatttttttttgcatcatttttaaccatttgttgatttcttattgaatgatagtacaagtacagatatcttagattttttttttttttttttgttaaaatttttcaagagaatcaatgctacaaaccaaaataacttaaccgagccgaaatcactttagtcttgaaacagaggaaaaacctcatcagtcttcaaaatgtctcactaaatcaagatattttaacaaatcaaattttgtttctctacccttagacctaaaacgttagttgctagagcgtccttgggaaatgtagtccaaagaaaataatacttaaggtcatgcaatggcagccagaacaccaagcaaaggagcaaccgtgacggtatcaggctcgccgtgctgaaaatcagatcgttcatctccgtatgcatcgtactcgtccggtccacctacaattgctccaaccaaaagattaggattcggttttggattgttgtaccaagcttcaaaccctccattacatgtcaccggtttaggatcatttttgattgacactatagaggctcctctatggtgtggtcttttaggataattggtcccgtatccaaccatgtagctcattttcttggggtttgacccaagtatgtagtctacctattacataaaccatgtaaattgttttcttcttatgttaatcattttagtcataaaccatgtaatcatcacagaaaatcctaagaactatgaagattacgaacactttgcatatctttataagaattaagtcttgaggattctcaaaacgtaatttaatttaaaagggaaaaacacgaatgcctgcctaacctgggcacgagcaaggttaagaagatcagaagcttgaaggacatcaccattggggcattgaatcgatgtttgtgcagcttcgaggtattttgcataagtggctaatgcgaaagaagcggtggcagtgtactggaggttgtcccacggcaagaaccagagcaaacctcctggggtctttttaacattgttgaaacccttttgagcacagttgcagatgaattgctctgccatactcttgtactcaatcatcttcccttcgttcttcactttcccttcaaacacaagctatcatttgcaaaagagtgagtgaattgtggcgtaagtaagggtatggtctcttttaggaaagtcatataacctaccttggctaccaagacttgcgctcccaagaacttatcgtcccacgcaaaaacggaccttgcacctccactattagaagcttgtgttagatgatcgagataagtctggtctccagtggcacggtgaagccaagccgcggcccaaagtaactcatcttcgtaaccgctgctagggtaaaagccacccgcgttaggaatggagttatgatagactccagggtaatccttagcgaattcaaatagttcttttgcgtgactaataagtgttttggcgtaggctgaatcagatggcgcaaatgccaaagaagccgcagccatcgctgctgctgtctcacccgcgagatccgcaccaggatgctgagggtcaatgcggtatgaagggcgcggagtggtcatatcctcgggtctcatccagcaggcatggtccaagttggcatcacccacctgtccgtacaagacattgggctcaggatgggctttaatgagataatcggtggcccacctgagagccgcgagggtgtttccgtgctcctgatgggccttaagctgtgattccatctctacactactccaagctagcattgttgttgtgaacgctaaaggaaatccgaacttcatattatctccagcatcgtaataccctccggtgagatcaacctatttttacaattggcaaatattttatttcaagtaataaatattcattacagaaaaagaataatgaaataaaatagatttggatattaaacttacatgagcatcagaaccatctctgagtgcagaatctcctctccatataactctttggtccaaaggcaattttccggagcgttgagcttcgaaatacaaaagactcttcgtaagagcttctccataatttgaatttgcagaaactgctccacaagtaatcgataataataacacaatgcaaatgcttttgattgtgatgaagcattgtgatgatatacaagacatggttgtaagctatttttactgacaaaatattagacgtacatatatgtatatatatatatatatagcatattcgtatctacatatgtaatcaatatatatatatatatatacttccttatatttacgtatctatataattggtacgtgatccctttttcagtataaagaccatgcatataatcaatgagcggtaccagaaaaaataattgtgatcctcttattcgctatatagaggatgtatctatcttagtaagtaataatcaatgacggtgccagaaaatatcgtgatccatgaccatgagcggaaataaatattttcctgattatattctgaataataggattactttaacgatcaacgtactaaatcttcatggaataggcaacacatttgaaagtttcaatgaattccccgaaaaaagtacagttactacaacttatatattatttattaattaactttctggtttgttctccttattttatggcaaagagactgattaataactaataagaatcgtaatgcatatagtgtagctttctctaattagtttagtgatttgtgttaagaagtcgttgactcaaacccatatagtttttatttaatttccaatctaactgtaatgttgggtcttaaattaattattgccccagttaaaaaaaatttgagtgcgagagcgtacatttccttgcaattgcataatcaataaatacaatcccaatgtcaaaagatctaaatattcatagactcacaagtatggaagtgttacttgattcaagttccaagagagaaccaattctcaaatggatcaacctcatcatgaatgggcccatcatggttttgttcatttagtatttcgttttaacgtaacccatgtgtcttctcagcttctggtcacacccgttgcatagtggatacgtatatatcttgatgagaaaattaaatccggagatcttttaaaattgttttgaccatattacaagaatcgcggaccaaatattttttcgcttctatgcaaataggtgaagaagcaatgactgcaataatgatcaaacaaaaggtatcgtttcattcacgtagagtctgactgatctgactagtgctaatcgctactctcctctacggatgacaaatcaagaatatttaggatcagaaatttgttttcttatagttataattcttttattccgccacacgtagtgccaatactttgacggattcgttggccgttaagtcataaattattttttaatctagctttattttttttgctttgttatattattttggtcaaaccatccgtcattttatagactaaaaccacttgttcgacacagaacaattttattgggtggtagagtgggtaagaaattttctaaattagtgaagaaaaaacaaatcctaggagtgtacttgcatctcataaaaagttttataaacactaattaatactgtcattttctaacactaacgaaagtttgtaggtgacgtataatgtcgaatatacagtatatgattctccattaatgcataactatgtcgtcatgtcgaatatttttctggtcaccaacatattagagttttatctaatttttatgttgtgtaaactctttatcattcggcgaattatacgtacagtaaatattatttttgataaacaaatattaattcaacggattaatattttgtctaaaaagtttgagatgacgaaagagaagcagtactcctacgcgtcggagtcgattcctttggtgaacatctcaatcacgccgggaggaataaaaagcgcgcgcagaggatttcccggcgggaccggcgggatctcagctctacacaaaggacacatggacttcttctccaaccacggatcaatgcaatcgacgtggaaacagtgactgcatgctgctatccgcctcatcttttctccctccgtcgcattttcgagacaaatcgtacaatacggtgatgaatgtttttcctcggctgtggtttttctccatctccggcgatgatggaccgtgaatgtacggtaacgacgccaagaacggctcgcgaggaaacaagcgaatctatagaagagacggagagtgaagacggctacagagacgataatgacggattcggcaatgaactgagagagttgaatcacagtttcaacaaacattctcgagaaaattaataatctattttatcgagaaaatgtttggagattattatggcagaactaacgaagctggttaatatttgtttgtagtttggaaacacatatattaacatatactaagagcgaccccactggtttagaaccaattggttcttaattttgaattttaaccttattataaattaaaatgttgcttttactaagttaagaaaagttagaaaaagtttaactaatttttactccaatggttaagaactattggtttcttaaaaaacaacattcaaattatgtcctctttttattcttttttttctacccaattaaaacacaacacctatacttttcttagttttaagaaaacatcttagttaagatgtttatcttagctaaggtttgttggttttattaaatttaatcacttttatatctaagaactagctaagaattagctaagatacaaggttggggttgctctaagagcatcttcatttatgacctttttagagatgtctttacaatagtttattataaaagttaatattattttaattttgaattatttattagttaagtgtgatgtctttaaaagtaggaaaatgtttttgcagagacatgaaagatattggatcttcctcctaaaagcactaaataacattttattttattttttcaattttttaaaaaatttaaaaacatttttttaaatttgactttgtatactactagtcattaattatttccaaaatgttggtctagattcgaattctcgagactacacgtatgctagtatatgaaacaacactaattgtcgacattattcgctttgtctggatttgtaaagttaaaaattaaattagtttattaatttgtaaagctcgtttacaattaatagttggtacaacaatctctccctatgaacaataataaaacaaatacaaataaaacatcaaaaaatgaattagtcattacttttccagaagttttactgtgcagttaacaataacgtagtccagttttctactgctacattcaattattcaaacagagtaacaaaaccaaagtctcgtgctctgtacaaaacaaataacatgtttttcatttatacaacgttgtactgtataaactatgacaaagactaggcctactgaagataaccaaaaccaggccccaaagtctcttcaatttttgggcccagccagttttgacttttatgcaactaggcaagaaattggatgatgatctgtgagactgtgtgacatgtaattggaattttatgtatgtgctactgaattcacgttccaaaagaaaactttctcgaatggatcacgctcatcttgaatgatccagactgtgttcatacacccgttgcatagtggacacaatttgatgagaaaaattcgggaggtttcttaacactgttttcatttatttacaagaatcttggaccaaatggctatgttttgaagccctacagtatacgaatctaattgacaagggctaatcactactctgctctatggagatcagatcaacgatatttgtgatgtccttttatgatatcagaattttgttccctcatttttctacttgttcttttcttccatcacacacttaggcggatttttttggccgttaactttgtcataaattattctgtcgatatcgcttctaaaggggttttgcaattaaatttagtagttaaccaataaaacatatctcctttgttttgttttattagtttcgtaaaagcatcattatatagactatacccacttgttggaggcaaagagcaactttattgggtggttgattagatatagtgggtaagaaattttctataagtatcgtaggagtgtacttagattcttttaacgtataaaaaacttaaaaaaaacaatttgattgataataactaaaatttaaaatttgtttgctaaatttcatttagagttattattgacaattttttttattttttttaatttcgtcatttagaccggcccctgtctctattaggaaaaaagaaattagaaactaattaatactgtcattttctaactttattcggtgacgaatttttgtgaatgaggtaatgttgaatgtatatgattctccacagcataacatggtgtgtttgtatttttttttgctcaccaacataattggacttcaatccgaatttcacgtcgttatcattttgcgaattatacagtaatcaatggaatatttttttctccgagagagtaactaacaagaataatgaaataaatgaatacttttttagtttgaacgaaaaaaagaatgaatacattgattacttttacgagactaaaaatcgtctaaattctaagaaattaataaactcgtttcttaatcttaaattaataacagaattaaatgtttgtgatgacgaaagagaagctaaaaagcctacgcgtcggggatgattcctttggtgaacatctcaatcacgccgggaggaacaaaaagcgccaccagaggatttcccggcggcaccggcggtatctcagctctgcacaatggacacgtggacttcttcatcaaccacggatcgatgcaatcgacgtggaaacagtgactgcacgccgttatccgcctcatcttctctccctccgccgcatcttcgagacaaatcgtacaatacggtgatgaatgtttttcctccgccgcggtttttctccatctccggcgatgttggaccgtgaatgtacggtaacgacgccaagaacggctcgcgaggaaacaagcgaatctgaagaagagacggagagtcaagacgacgacggaggcgatgatgacggattcggcgatgatctgagagaatctaatcacagtttcaataaacattctcgagaaaatgtttggagactatggcacaagtaacaatgctctgctttgtgtagtgtctatatataaggttttatcttgatgacatcgacggtcatgatttaatcacgtgggagaatttggattaattgaacggtgatgattagatgtacagtagtttgtttgtagtttcgaagcaacttactactaataactaatccaacttccgacttattaaccgtcaattttgatcaaaattcttcctaaaatttgactttgctagtatatagtaatcattaacaatttccactagtggtctacattcgaattctcgagactacatgtatgctagtaagtagtatattaaacaatgttaaaatagagagaaaatttgagattggctactttgaatttttgggattagtcaaaattaacttagtttattaattaagagttggtgcgaaccaaaataaaacaaatagagttaacgtaatccaattttcgactacactcaatcaaacaaagtaacaaaaccaaagtctcttgctctgcacaaaacaagtaacatgtttttcatttatttaacgttgtactgtataattactagacatgacaaagactaggcctaacaagacaaccagatccagggcctattctcttcaattttgggcccagccaataaatatagttttaaccaattagttaagaaactggatgatctgtgacctgtaatttcacttctaaaatatcaaataacacaaaacaaagaaaccgaaggttttagaaatagagaaactatcttatcttgcactaaagacaggtggtgcatcagctttaggttgtgctctgcgtgtgtatttcagaagtaacccttccatagatagtctaggaacatgaagatccctgcaaataacacaaaaacccaaatcaattcataaatggaataacacaacttcttatggaatctgtcaacacaagatttgttcaattaccttaggtaaggctctaagtctttccattcccattttgatctatgtttaaagagtactgaaaacctttcttctggagttgaaggcagagagcgcacactaaacgtatagacccgtgtctcgatcccgattttctctgttaaaacctctccttcaagcatctcgaatctttcttccatcccatctggtatcttcttcttccactcttccatgaaactctctagtctcatcttttcttctctcagtatctgtctagcaaagtgcaaacacacaagcctcggttccaacttccacttatcagtttcattaactttagagccaaacacacgcaagcagtgactcgctagttgactaggaaactcatcagctaccaaagcattcacaacttcatcttcatcaagatcatcaaatgaccaatctttcaatacacagttatgaagaagcattctcagaatcacgtctaggtaattctcatctataaccctccagaaaccatcaatctcaatagcagaaagactctgcaagccattgcgtaactcctcatcactcgcttgaaccgtgttaaccaaatcgctccaagtgtacaacgctagatctttcttcccactatggtctaagtcatcattatcaacatccatcatagcttcaacttcaccagcaccaaaaggatttgccaagagaatctgcttaagtttatcaagcctaggagaagcctcaacaagttccatattaccaggagcgattttgagaaccgatacattgttgttggtatcagaaacttgtgcatctccaggaaaaattgaaggaggaataaggaacatggaattagaattaccaacaaatttgatagcataagtcttagacttggtgcaaagaacagcatcttcatcaggaagtcctctcaatgttaccctaaagagaatggatactaaattaagaaaccctaagacacaaatgaaaaatcaaaacaaacccaaaagcttcaaaatcgtacctttgatgaaagatatcagagacgagtttgtcatcagcttcaagaagaagtagatcctcgtgaggcccaaaacatgggtgataagaaattggtagcgaatatccagatttgagatttatcactgcttcagctcctccaatttcttccattactagaaatcaaatgtcacgggtaagtaagcgacgattaagcagagaagtcaagaaatgtttccgaaaattcaaatcaattagacaaagacaaatgaatcaaacctgatgcgaataacgaatcgtctgggtagggtccgaataacgaatcgcgaggttgaggataagagaaggaaccttcgagctagggctcttcaggtttcgcgccttattttagccattttaggcgcgtaagttttaattctcttatctgggcacaaaggcccaagttaatgggtcaaagaaaaggaaattttattaccaagtaaaaaacttaagttaattttgtgtgtgcaagaaatagcaacgattataccggagataaccacaagtactacaatagttgtctgtttatcaacttaaaaggtttaatatgtcaaccaataaaatcaaaccggcttcgttcatcgaacccaaaccgctgcatcaatctcatctctagccttcttgtatagctcgagcctctttgcacattgcattctcctttccatcaatgccgggttctcatctagcaactgtcccaatcgtttcccctgctaaaaagaaccaaacccaaatccttaaaccggaactaaaaccaaacttagctagttaaccgaactggataaacgaatgtaagagacaacaaacctgactctgactaatctgtgcatagaagtaattaagcaaagagagtttcgcttgtctgacttggcaatgaacaacagccttaggaatagtgttaacaagtgtctctgcaaccatcttgatataagcagctacatttgaagctatctttctgaaatgcccatcaccgtattggtctattgctgatgttggtgaagaaagagacatgttttggctttctacatgaagcttgcgaaagaagtcaaccgttagatatgaagattccatgtcgactaatctaagaactgacttcatgctttcttcacgaaacttgtctaatgatgagtttgctgcagcaactaactcaatttgtagtgaagggaaacgttttagctcctgaattgtttgcacatcaagaaatcaataggcatttttcatttacttatatctaaataaacgaataaatctcacctcagtttctgcgattgctttccttacaagctcttttaagataaggtgaatctgttacaatcacagtcgttacggtcttattatatagataccgatgaaagagtgaagtgagaaaaaggagcttacagcattcacagaagcttcagctggacctctaaaatgatttagggatccttcaataagacgacgataacctaattctggtgctatcaagtgaggttgatagccatcagattctgagacaattctcttaacactttgcaatgaaagatgacgatcaaatggaagtttttttatggctgttggaagattgtagtcaaagattccatagatccgtgcacctccgggacgcctaagattattttaccaatcaaagttaagcaagagtttatccaccatgacaagaaagccaataaaattttggttcgatagttgtgtttttcttacccgccatccaaatgctctttgaatatcttttcgaatgctctacacattcccaagatagtgtatagttgagcctgaggagaccaacaagattttagcttaccagagaaatatatacagttcctatcacttcttaaagtgtatatatgtacttactccagcatcaatagcgataggcctgcccaattggtctaactctctttcgagttcctcgatgttgttgtttatcaaggataggatacttggaatacgtgaccttataacagattctaagagctggaaaatgaaagaccacataacttaaaaacagaacgaccaaattctcatttatgtgtgtaagtgtttggttttgagtaaaaaaaccttagagaggagctttgcaagatattctgagcccattcttgtggctaagtgaccatagtcaggactggtttcaaagtactctcgctctttccttcttgcaaccatcatgtcgacattcttattaatgtcggcttgtgaacggttcactatcccaacccaaggatatttcagcttgtaagatcttccgttgataaccttaacgaggaaaagattcaatcaaagtcaatatgtaacactcaagatcttcatgaggcatctaaattcttaaaaaactactttcgacaagagaattaaggaggacacttacgtccaatgcattagttcccttgtccattaagtctaactttgtcaaaactccaaacgttctatcacctaagatagtgaaaaagtcagaaacccatatcattgttttagggagagagaagaggaagttttttcccaattcatttgctgtaaaacagaacaaaacaaacctattggatccacttctttcgcgagcttcatcgcgtcggatgtagctatgtcttgattagcaggagatattgccagtataagacagttaggctgtgaacaaaaaaacataagttaactatcaaactacaagaaaaagtgactggaacatattaataccacagcatcaccaaaccacgaaaagtgtagaactagcaatactatactcgtcaccttttcgacgtatgagcgaaccatggattcgatatcctcaacaatagtttctggctgtccttctgaatacaaattgacaatgttaacaagtaacgaaccaaaggagacccaaacgaagttagagtcaagcaacacataccaacagcaactttagtcaaaccaggtaaatcaatgagagtaagattcacaactgattccaaaagaaataaaaactaatgttagtttggataaaagacttataaacaagagaatcctagaaacgattaatagcttaccattgggagagaaaatactgaggtgaataggaattgaagaaatctgtttgttcttcccagtgattctatcagtctcatcctcaatctcctttctaaccaaagctgggacacaaattccatttcaatatgattgactcactacagccaaaaagacacattcatatataagtttgtttacatacagaaattggtgaattttttattggtaaggtggagaaactctgcgttatcctctgttccattttcagtcttatgaagttgtaaaaccaaaggccgtctcgtaacaatacctacaaaaatcagattctccttccattgttttaacaatcaatcacaaattagttacgaaaaaaattgaaagctttggttttgatcacaaaccggatcctctgggaagaaaatctctcccgacgatactctctagaaccgaagatttaccagaactctacactcattaagaagaagaagaacaaaacccttaaaagacaagcttaagagaaaaaactatgttagagttatctgattgagacaaaacctggccaccaacgacggcgacggaaggaagagcttcccatagagaagatagagcgttgctatcgccgccatgatcgccgactacggtgcatgctctttgtatcgtattaatcaacacgatcaaactctccattgtcgttcgttagagaacttcgaaacaatccagatacgaagaagaagagtgcaaggacttgatacgaacgcagatggacccgagaacgaagggaggagaaacgagaaaaaacagagagcgggcgttttcaatatgattaaccaaaaccagtccaattttaatttatttttatttttttggcattatccatttattattataagtaaaacttttaaattgacttgatttgttaccattaacgtcttcttcttttcttttcctaaaatttaccattaacgtctttaagcatttaatttacttatgaaaaaatctctttcaccactggttattcaaacccatatataactcaaatttcaatatcttggtaagggttttaaagtttaaatgttttcaatttcaaagttcgaaactaccttgatcttagtcatgttgttatatatatatgaaaaaattatatattattcatattaaataccctttcatagttaaggatatttaaggcccaataatagagaatatggccattattaaaaaagaaaagggcttttaaattcagtataagccctgatgtgtgaagggtcaaaggtaacgtggctaacccaagaagaaatggacgaacaagagtgtcgaacagagtttgaaccatctaaaatggaagaatccgttcactacaattttttaaaaggttaagagttttgattcggaatatataatatgatgtatgatggtgaatgagtgttgtttggaagctcggcaagttaaaagataaggaataagcacaatcacgtaaagttgagaaaacacaatgtggtagtgtgcgaaaaagaggtcgagaacttcaccacctctcctatggtacgatatacttgacggcgaagaaatcggagacccaataaacgacgctcagagaccttacttttccataggaccacctcgctgcattcgtcgtccgcaatcacaactacaattttatttcatgattgtgtttcaaataatacaaagaaagtggattagtttccatgtgtatctagaattgaattcatacagtatctttgaattcttgatcatacaattattattcaggatatcatcaaacgcacatagaagacttcaatagtatcacaaattagacctacacttaataacaatcatatatgtacaaactttaaacgtgttcttatacaaaacaaaaggaaaccaccaagaacttattaggtatttttccacagaatttcaaggaagaacgttgacatacgatgtccttagcaaggacggttagtctaaaacagttttaatgagtcaaattaagaggacgtttacttttaacatttttttcttttataaagtaataactaaaatcattacacaacccaatagagatgaagtaataactaatcattacataacccattgtgtgatgaagtgatgtttgttttgacaatgataaaaaaagcaatgtcaacgacaatacgaattatgaaaacaatgaaatgttcatctccccactacaagcacacccaaaaagaagaaaaggaatagtgacgtttaggacgttaattaagcgaatgggataattatcctttaaccataagtattaatcatcgtcatcttaattgcaaaaacaatgctttataaaccaaacaaaggctaacgtgtcaagcctttattacctgaaaaaatactactttctatttttcttcttaaagaaaacacaaatcagaaaatttccatttactccggcgattctcttctcattagatcctctctctctctctctcaaaaagagaaaatctcagagccagaagaagacaaatatatcttttctattcctcagatctctgaaatcgaagtttctcgaactgttttgttttgttttttttccgatgaggtgtaagagacacacagtagatttcagtagcagtatcggcgtttgtgcttcttgtctccgtgaacgactctttactctcgccgtttcaaccgccgcgtctgaaaacgacgataacgatcatcgtcattctcgtatttctccacctcctctgctttttcctcgttctgtttctccttacgttgctcctagaaaatccgacgccggaaccggaaccggagctggaggaagagactccgtagcttcttctaataaccgattcttcgcaacgccgcaagtggttgttcaatcatcgtcatcggaaaaagtcttcgaatcagacagatcgtttaagaagaaaaaaagcggtttatctagattctctagcttcttcagaacgagatctgacgattacgattcgcgtcgcgattcatgcgacgcctccacggttttttctcaaccgtcgtcggcgacgacttcacggtcatggttttcgaaggttatatcagttcgatcgaagaaacaatcaaccaccaatacttgctacatcgaagatttgatcgcttccgaatccgatcatcatcatcataatcaaaatcgacctagacagagatattgtagaggaatgtcgccggcgggagattcaacgacgaacgatgaatcagttgaggaatctccagggagattaagaagaacgccggtgatgggaactccgggaaggaaaaagacggcgacgattgggattggtagaagtgtatcagggatggctttttgcttaagtccattagtgagagctaaacctaactgttcttctaactggaaagcgaaatttccgccggattttggatattccggtgaattgaaatctccggcgaagcctcacctatcaacggcggcgtctttttgcggtaaccggtctaagaagcttgtggatttaggtagagttgatcaccgccgttgatttttttggttgaggtcaaaatctgaccgttctttgtgaaattacctaaaatacccttcacaagattcatatggtgtggctttactataccaacagataaagagtgaatttactttttttttggttattcattacagtatattataatgttttgtgattgtatattaaaggaagaaatattcgtttttatatttaggagattagaagagaacaatgtcgtgtgttttctttttctttggatagtctaatgtgtatctctttttttcttatgagaatttttgggtgtacacatcaaaaaatgacagatagtagaagaagtaaacctatgactagttcatgtcagaattgtaatacattgctattatttttgaagttttcaaatctaaaaaaaaaaaaatcaatgctttgttggtgataataaatgtgacacatacccttgtgtttctcttaatctagagaaacaaaatctgacaacacttaagtcttagacattggcaaagtcaaaaagaaccattcacaaatccaatttactagtctcacttactaaccagacacatgaaaaacctaataaagaaagctagagaaaaagtgggcatatagatctaataacataggtctcaatttcgacgaaagatagacgacttttatgaagatccaagtaccgtctaagagagtttcaaaggtttaaaaagagtaaagactaagagtttaatacaaatatacggaagtaggaccaatttaagatttaaattccatgggtccatagtcgtgaaagagtattataaatataacgaaaattagactagtatgactctgaggacttatttgtaatttgtcatcttacagagagcattaacggtcataaaagggaagttggcatttaatgaatgggggcttttgttggagaggggagaattgaaatagtgtttctttcgtggctctaccatctcctctcacctacatcttcattgatttcaacttactcattcttttttttttttttttgaaggggtctatctttaattatggtcattattgcgaattatgcgtttgatgagttagtgggaaaattcaaataaagcacaagtgttatgtaatttttagctattagttggtactatgtatgaggatttgattgatgacaatataattatgaaatatagtgtcattaaaattttcaaatagcttggttggactattcaaaaatatgacaatacttttcagctgcaatgaaagaaaaacaatcgtacaagtttctgtttttttttttctttttcaaaaggatatgtcataaattcataataagtaattacaaaaaaactcattccactaacttagttccataaaatcgttacgagtgattattgctgattaagtgagtatacacattatttgggatagaattgctgagtatactccaactgcattaacccaccagagctttttacgatgagagaagcttaattttagggacatggtggaactggagaaaaatacctgggaacagtgtgagactttgaatttaattagctcatttaagtgatctgaactaacgacatgtgtacgaaattaattatctgtttctttatgggtcaaagattaaaaatgctgtgcttctttctctatcagactatcacatggaaagacgaaacgaaatgagagtttttattacctagcagctcacagttatacataattaaattcatagaccgacaaatcacagttttgagaaataagtaaacaaaagtactgaagcagcgagcatttgaaactccaaagaccacaaaagatcacagttagggacaaaccatagctaaaacagagtcttctttaaaaacaatccgatgaagaaaaaaagttgaaaaacaggcaaaaattttacagatggaagacgataactgatcgaatcatgcaaaggggcttgaggacattttttagtagtgtgttttgttgttctctatcgatttgttgttgtgttgttgttgccaaatctaacaagagcatcctcctgattgctgctgagcgagagatgcatttgcattggaagacttgagattgacatcaaccatatcctcttgctttgttgaagacaatgtctccattcccggcaaagctgctgctatcttgcggaagagcgcctagcaatacaaaaaggtttgaaatcataagaaaacaagatttgcacggagtgatagcgttatggatttgcggtaattgtttagagagtatcagtgaaagatccatacaaatgaggaggatgtaataatcagcaggttgggttaaaaatttataagtctaggttaattaactattgaatattgatggaactaaacaaagttagggcttagttgaactaagcagcaagtttttgttgtgcaagaaaccctcagaaatgtgtcaagccaagatctttgttaccttaatgttgaagcccgctttggcactggtttcgatgaacattacattaagttcgcgtgccttagcttctgcttcctctattgacacttgcctgagaaacaaaatatttaatacaaaggcccaattggcagtaacaaatgtagtaggcaccatcaagtgtcaaagcgtgttgactataaagaaaccctgtaaagatatgcagttgagcagcaaatgattttccatttattatcttgtagggtcgtttggcaacatactcaataccaccagaaaagtaagacgtggtttaacaacagtttgtacttgagtaaaacaaaaaagacacccattcgtcttgtcaacatacttacgaaatcagagcgtgtttaaacaaggaggactaccaaatttcagtctcaattgctattgaacagtaatttgcacatcatggtttaacaagaaacaagtagaggaagagatggtagatcattattaccttttgtccactagatcagttttgtttcccacaagcacgactatgacatcactaccacgttctgtcctaacctcatcgatccacttagtagtgtttaggaaggactgcctgcctatatgtcagtggaaaacaaaataaatctcgagtttcacaacgcacaatggatcaacataaagaagaaatcgaaacgcataaattcataagattactgaaaaccacatccccaagatctcagatatgggaaaatattcatgtgtttgagagaacgagtgaaggtacacatacttgcaacatcatacacaataacagcaacggaggaatccctgatatagctcggaattagactcctgaatcgctcttgcccagctgtatccctgtcatatgatttcggctctcgatgttaatcatcaaaaaatgatctgcaatgttattcttcagtattcgaaaattgaaagaggctcaagatcttaccacaactgaagtctgaccgttcgatcttcaaggtacattgtctttgatagaaaatcaataccaattgtggcctgatgattatgaaacaacataaaaactacttagaaaaggaagaacattctgtaaaatgacgataagcaagcatggttcacatattattaggagcttaaacgtaattctcataatcacagaacaagatcagatgctttcattcatcaattgagaactaattcgattagataaacaatgataacatgatcaaagaaacatcctcatattagtgttactgcgatcttctattggactgaattctcgactttgtacaataaacgagagtgagcgattacgatgccaaaatctcattcagctgattgttacgtcctatacattgactaaaacacgatctacaaatcagatcacacataattacgcaaaaccaaacgcccgatcacgtaaacgagtaagaacttcgaactgaaaaacacgattcccgtccatgaaaacggatctcaaaatcaatcaaaccctgggattttcccgactataatccctcaaaatagaagcaaacgtcgtgcatcgtcgagataatacctagatttgaacaatggaaatttacctggtaagtgttgtcgaatttgtcgtacatgaatcgagtaatgatactggttttgccgacggattgatctcccagaaacaccagcttatacttagcgagtgccgagaccggagccatgatttctcaaggatctaactcgccggacggatctgagaaacgtcgagatctcgctttgctgagaataaaagtttccgatatttaccggagagagatcccgtcgctctggaattgcaaatactgtattagtgagagtttgttattcgtaaattgcagtttattcctcgagtgacccaattgggtcatttatgttaaattagaaactatttgagataagttacaaaatatataaaaacttagaagctgattaaggaatttactacattatgggcagcatttataagcccacgtaaggatttgggctagccttatagtagggggcacgtgtcatctcgtatgacctgaactatttttgccccttttggctacttgactcttctgtgtctctctcatcaaatcaaatccctaattctcgagctcgaagaaagagacgaaaatggcactgagaaatgcaattcttcgtcacctgagggttccggtgcaaaccctaggattgaatcagtctaaaattgggttccttggtacgatccggtcattttcttcgcacgatgatcatcttagcagagaagctgtcgtcgatagagtactcgatgttgtcaagagcttccccaaagtcgatccctctaaggtcagctcgatcttcataaaatttggccaaatcgtgattcttatcttttgttttcctcattattgggaacaaaatgattattttgccttgaatatttgtcaatgtaggagcttttggttgatttcgtattgatctagtggaaatagagaccaaatgtatctgaaacgatgttgcattagtgttgttagtaaattgaaggttattgatctcaatgtggtttagtaagtgtagcttatcgtgttgttgttcctatggatttgatttgatatggtcattcttatggattttgcatttatgaatccttcatcaactctctctaataagggttgtttggttagggttatttttgttgatggctttgtgataaatatcgacaggtgactcctgaggttcatttccaaaacgatttgggattagatagtttggacacagtggagatagtgatggctattgaagaggaattcaagctggaaattccagacaaagaagctgacaagatcgattcttgctctctcgccattgaatacgtttacaatcatccaatgtctagctaatcgctgtgtgctctctcatggtttctccttcctttttcttgtatgaggttcttctctctttgataatgccataatgggatttgcaaaaaaatcacttttatttggagagcattgttattgactcttttaacggttccagtttcttaaaaagaaaacctttttgcttgaatcttgtgaaagttgacactttttcttgagttaatactttaatacgatttgtatataatacacttgattcttagcatggtcttgatcatacattgaagacgaatctttgaaaaacatacttgttttaaaaaactgatcgtctctcttggatacatatgcaagaccaagaaattggatcttatatactacattacatcataacgtgctattaactagaattgtttgtcagccatcttttggatcgaatacagacagtagttttcatttggacaagttttctgcttcatctcaactacagcatttgtaccaaaatacaccaatatctctatccacaagttagatgttttaattaggagatacatttcaggtttcgtttgaatcgattttttagtaaatgggacaaaatgggtgaacttacaatattaaaaacttgctaagctaattatgcaaaatggatagggtggaaggaacaaagcaagatgctgaaaccgcaacagcaatgaatcttgtaaacacattgtagtgatattgatcataatgactaaagaaagactaaataaacatctaacgtcaacaatatatctcttgattaagtttaacccgaaagagacagacaatggcgcaaactatagttgttaggaacgattctgagaagttgagacggttcttcagttccatgaattcctacttcactcctaagcaagccaatcattctacaccaaatctctttgctttcactaacattacttggttttccccatataaacgccaactttccgtagtattccccgatcccaatgcatcgagctttgtcaagatctaaaccataaaccactctccacaacatcagctcagagtcataccacattaacccaaatctaaggaagtaaacgaagagcacattgtcaatcacgcattttcctgtcttccaccaattatcttcaggtatcgtatatctttgataagaaccatctctagtatcgtaagaattcatgtattccctcgaatttaaagcataaaccttcctatcaagtgaaacacttgcatgcgtgaaccattcgtttctatcctttgccttaggaatcggcgctgcttcccaagtttgtgtctttaagtcaaatacttccgctaggatctcttcgcctctgttgcctccgatcacatagatcttaccaccgactagtcctacggtagctgataatcgctccacttgcatactaggtccttgacgccactgtccagattgggtgtcaaagatccatacgattgatgatgagggaaaattatatccgggaatgcagtaaatctctgtatcaattgcgatattggaaagagggtaagaagcatgcccgggacgataaggaacatcgatggagacgaagacattctcagtcgtattcatcttgttatcattcctccggagagtgaaccagtgaaaagtcgtccggttccggttcgggtatgtagttctggtcgagaagcatagataaagagagtcctttccgtgtaaagatcgcgtcttgtgaatctccggcgagcgaattagactccgcaaggacttggagacgcaacagaggattgggtaatatcgttttggtaccaaggctaagatgttcaatacgatgtccaccgggagtgagaacaatgacggcggcgtcaatgaagacgacggtggttggttggttttctgcggtggttcgtcggcgttagacatcgagagctattaggaggaggagactagagaacaactgagtgaatcaatcaaattgagggctttagccaaaaaccaaaagccggttaaattcttctctgattctgctttaatcggttaaaaccggtttatatttcttgtcttgatcagggaaacacacagagttttagaataaggcccaggaataagcccggtgagtgaatctttctaaggaatcgattttaaaacaaggcccattaaagggtgaagaaaaggcccatgaaaatgcttaaaccccctttgtctcccagcttcgtacacaggagagactgagataaggaaagaagaagaggaagaagaaaatggcgaatcttaactcagctattgattcagtgttttgggatcagaacgtttcttcacctcaaacccttgaaggcactgctcgctctgttcccggtgagccatttcccttagacggagcacgagcaagccgctctcaccggattcaacagctctctctgcttcgcgaaggctttcctcttggaatcattccttctttggctcctgcttctgacaagagactcggctctttctctctcaattctctcttgctcagtccttcctctaacaactggtaaatgctcttaacctcttcaataatttacaaaattgtgagcgagtaatgctttaaaggttgagactttgaatcaaactggtgaaatagtgttgacattgttggatttgatgagacatgtgattagttttgtttggaattttcactcaggtggttaggtttagttgggcagttcaaaccaaagaagctctttgctgatatcaaagcagatattagcaatgcagaagagtgggatttgcaagttgtaaaggatacagcaaaacacattgttgacaaatccctttactctattggtttatggactcagattgcgttgggtacttcttcttctctcttgcttagcactgaacgtcttggagataaaaacggactccgaaacaagttgatgcttgttcatccggtatgtctctgtactgtaactatgatggattcttcttttgtgttttaaagcacttctaatttgtttttttgtttgaactaatgagcagcttgagaaacatgatctcactgtggaagcagcttggccagatttgtttttggacaataaaggacgtttctgggatgttcctgaatctttgaatgttgatgtctcatcccttgttccagagtcaggggttagataccggtttggtcttcataaaagcaggggtaatcctcagcctgtgaatgctgctggtgttgagagtggtagtgatgctcctacttctttgatgcctggtttatgcgccaaggctgcagtttcgtacaaggttaacagagacttgtggaggccacaagagaaagaaggcaacacagaagaagaggataaacctgtgtttctgccttatgatttacgtctcaaggagcctcatgcagcaatttcaggaatagtaggtactctctttaaaaaaccaatcccctaaagaagtctcgttccttttcttttcttgaccttgaattgaatgctgagttctctcaatgtttcactctctaggaagcagcttggcagcttggatcacaggccgaggcatgttggttaatggcaagaagcggagtccgataagcgcagatgtatttggttctgcttgttatacgttccaaaaaggacggtttagtaagttgtatggcgatcttacccgagtagatgctcgcgtggacctaccctcagcttttgcccttgctaaaaaactcttccatgcaagtagtaacaactcagacgacacattgtggtctcccagactcaacctgatattccagcaacaggtattaagcttttgtccaaagatcaaaagatgtaaaagagtctatgatgtttaagcaattcccactaatcacactgttatgcaggttgcgggtccgattgttttcaaagtagactcgcagtttcaggtaggagctgcacgcatggaagatgtgatatacagtctgaattactcgttgaggcttcttgagtctggcaaaatcgtggcttggtattctccaaagagaaaagaaggcatgatcgagctccgagtttttgagttttgattttagtctccgtttatgttttaaaaatcgcaactttttttttttgacatgactataaaaaactcttatgtttcgtaaaacctagttcatcttcattgcttgtggcggtcgatccctagaaatccacttgggaaagatctatcctcacttccatcggctctcacacggaaacttcctaaaaatccaaactttctcattgttgaccgtccgatttctctacgctacagagtcaataaaatgatcgagctttgtcagttagtcgaggctgctaacatggaggctatgttggaccggaagaaggagaaagagaaaacttgtttttttttttgaatatgactatctctgaaagtgatctcaattgatattaaattgaaggattaactagaaacaacaattgctgtctgaaaattacagaaaacttgtaaaatcttcaaatctctccctcttggacaagacttcactcaacgagggccaacaagtcactctctttacagaagcaatgcctagcatcggttcccaaatcgacctgagaaacaaattcagagatgttcgattctatattccttaaaaccacacaaggacaggacaacaactaatcaaatacactgcagagaagcggaattcacctcataagcgctcacatcagagaacaaaacctgtgaaaggcaaaggagaaagagataaagacaagattcacggtagttacaatggataaataactatgtctttgacttaagaagaaacatttaccctctttccaggtccaacttgttgtccaacctcagaaccaacagatataatctgaaatgattctctattcttaattaaagatgctctaacacaagttatataaaacatataaggagcaaatgacttacctctcctgttaggtatctctcaaacttcacagctgctttaggcaacaatactccacctgaggatttcttcagaataacaatttaagagcccataagtttttggcaatggaattcaatttagtgattcatcaaattaatagcttattgataataatcatgacatttcagacaataaaggagctaaactgacaataggaagatcttcaagacgaacaagaactctgtctgcctgaggaacaacctgcaattatcacctcaacactaagattaatcaccagtttttaaaaacagagaaaccaatacatttttcggaaaagacagtacctttgtcggttcccatttagtggaaatcgctttgattctaagacaacctcttcgacttcctgcataaacacgaggaaacaaattatcaaaaagacaaactttatatccgaaaaggaagaaacatcaaaataactttcagatagttaagtaccgagaagcgtatggttagccgtcgaaggagtagttgctttgaccggaaaagcaaagaaaggatttggtagagagcagacgaaagtggaagccatagcaggataaggttttttgcagaagcagatcttcttcttcctccgttacgactttggctccagctttctcgtcagtgcttcttatgttttacattgggccaatattacagcccatttaactattaagacccaatatctttattctattaagcctaaccgatgtatgttttattgaaccgagaaatctcaattgcactttattgagagtcaccgaagcagtaatgcagtatcgtggggtatactgaaaagtcatatactacggagggaaaaactcacgtagtactaaaatcaagttaactattacatgaatctatctatatgtcatgtcaggatcttccggagctgccaaatccaagagtacataataccaacggtacaatatgttgagatcaacattaaaggcaaaaatggcaacttatcacctagaaaatacggatgcaagaattgagacactatctctactataatcaaacccattagatagctcttctcaaaacatccaatcctaaacttgctcttgatttcactagtctccttcttctgcgccttataatctgtgtattgagctgcaaagccgagccacattaccacggaatgcaataacagcaacagaaccttgatcgggtactccgcggttcatataagagtggatagagcgaatagcaagagactgcaggaaaaatacagagattaagtacaaggaatgaatgattatgcgtaaaagttgattctggttagagaatagtatatacctatggaaaccagaaagtaatgtttagcatcttctagactctgaactgcaacgattgcaagtgggatggtaaagtgaagcgatgctttctcatggacgtgccatccaaacagaaaaccgcatgtatatgcataagctacccatctagcaacgagccccgagtgtggttttttccaggctttgatgagacatggagatatagctagtaataccattgcaaatgttgtcaatggcgtgatctgtcattgcaccagtccaacagaataagattgagtgaaacaattcatgagatatgacagatactcatgaagagtagtacctgaggaagaactgcaaaaggcgaagaatctccaactaatcctccagtgaaagatgcggaaggaatttgaatttcatatcctagcttccgcagcaaaaccgcaagccctttgtcgagtattatgtagaaaacccaaaaattaggtgcccagtatgcatgacacaatcctctcccgaaaggaaacattctactgatgacttgctgtatctgcaacacaacgagagaacacgaaaactaccaccataagatgttttctcaataaatctatttaggacaaggtttgacttgattgatgtatagagattcactgattcgtctaggataatttccattgataaaagtagtgaaatagctctctagcaccaaaatttctaacaaattctaactctttgccaaatcaaacaacaacaaaaatgattcacaatctcctaaacacatcaacaacattagaatcttcaacttgaactcaaaagaatttggctatattcttcaacattgaataggaaagaactacactaacctgtccatgatagataaaaggtccataggcagcagcaaaaaccgccacaaccaccgcaccaatagttacaagccgtcggaaaccagtaactaaaccagaccagcaataatgcctaagtagataaacaaagtaaaccggagcagtgacggcgaacaaatgcttaaagcatagaagaactgcgaataaaaacccacccaaaagatctctcccttcttgaagaaacgaaatcgaaagcaataaccaacccagtagaaatccattatactgaaaatgaatgtgatctacgatcaatagccccggagaccaaatcaccaatgcgcagatcagatttcgtttcaacggttctaattttcgagtcaatcgataaacaccgtagagaagacatagatctgagacgattacgctgattcgttggaagtaaattacagattcggcattgtaatcgagtcctgattgaagatctacgatcctgggatcgacgagacgcgcgaaaattgagaggaagcgttcgaagtaggcgaagaaaggaggatagtcgagtgtccattggctagtctcgtcgaagtaccatttggtaagaggaagagagtttgtgatagcgagccagttacggtggacctcgaaatcggtgcttctggacgacggaatgagaaggagttttacggcggtggctacggcgaagaaccatagcagtagtcgccggtcactcttttcccggtgatccatctcggcaccgatagactgggaacattagcgaccgttgatttacaaaacccattgatatgggcctaatttgggacacgaaccggcccacttagtaactacagaagtttacgtggagttgtagatatggcagtacataattggttaaaaatatatgacatggcattacgtggaactgttcaaattggtttttatatcggattaaaccggtttagctatgaatatttcgttgtgtgtataagtcgtacctacctattacaaccgcccaaaaggaaagtagctattggctatagcgtagagctagaccattcgaattaatcagcggttgagatcattcttcagtaactaaggccacgtgtcatacacgacgaccctaaaagatcaaatagtaaccgtagactcaaaacaacagattttaattcccatgcaaaccttaagacctttacctaacagccacgtagcacgaactcggatcttagctggcgcacgagcgaggatcaccgcacgtgtcaactgcaggtgagtttaaaaaaaaaagaaaaaagtagggcaaacggggtacaagggcagctgtcgtgggcccgggagacaaggacgttgataattgggcctttcaaaagagaggtgattgtgggtcccattaactcattaatctgagtcagctcgacgccttgttgtatcgacagatgacaagttgtgtggtcctaaccaattatgtaaaacctcctttctttttttggaactttattataattgatcacgaaaacaccttttatttttgtatgtattaatacactttaaatatatacatttttaatgttttattattggtttgccgttcgtaatgtgagtcattgcttactcagattcattgagttttcttgacgtgatcttatttaatttaataaatcatgatagtgttttcttacctttgatttaaaaagtcaaaagtctcatgttggaggattataatatgaatcaagagcataaaaatgtgatatttctagtcggtatctgatatttataatagtatacagaatttcacctatgtgacacgttatgtggttttagtattaaaactataattgaactcggactaagaacttaatactactatagtaaatgaataaaataggtcggtcaccctcttattcgttttattacaagtattagcgtatggagtatgtatgtacacattactagtagtagtaaatgtgtaaacgtattcgaattacatgttctagaacctttttaaaaaaaaactttatgactatttagatcgtatttttaaatattattgtttgaacaaagattttgccaaagactcttttacacattttcaactagaggattcttagctatagtattcatatcgatataaaatatagaatagaatagtactatttcgaaagagatttaaattcatccaatgtctttggaatattttttacttggacatgtacatgtgtaccaaaatgtttttgtctcactataaacacgaataaattaattcactctactatagtaacaataaaaaaaagacgttactgtcgatatgtccattgaagaagttaatgaaatacaaataagtacaagcaaagcattaaacaaaacgagaggcgattataaattacacacatgcaatgaaacattgtccaggcgaaatgaatcctaaggaaaagcagagaaagtacacacgagaacagattaataaaatagaaattattttagtagtaatattcatataaaaaattagaaactttctcttttttgtttttttgttaacgaaaatttagaaactttcatttaatgttaattgaatatttgggaaaagtccaccatcatgcgctatgcatgttattgtggccaacgaatcttacaaaacgcaagacttgtttgattctctcgtcgaacgagatccacccaaattattgtattcccaaaataatactaatatatgttctttattgctcttacaaaagaaataaaataattttaaaatttactcgacattcgtaatgtaattgcaaaaataaaaacaaagaaaatagtactcgtaacggacaaagagtttgattcattgcactttaactttatcgatgaggtaaaataatcagaaaaaaaaaaagaatttaccacaacacaaaaagacaataataaaatataataaaagtaatgaattattgaactttaacgtatagatctttcgagatgaagattcggtcacgatgaacggtgaggatgtattgtagagtactgtaactaaagtggtacgtgacacaggtgatcagctcaagtcaagcagaaagtcctaaagccggctttataaatgaacaccaaatcaacctccttcttcctcctcctcctctcgcttcttcttcttcctctcgaatctgcttttcgcagtctatttcgtcatcgtaaattcggaagctttcgtatttaattaagcaaatggcttcgtattactctggttttttgggttgtgaagagccacactttttggaatcgtgttctctttgccggaaacaccttggtcttaactccgatatcttcatgtacaggtattgattcgattcaaactaaagcattaaactttcaattgagtttctagatctggtttttttctataattcatttatttggtctgattgtttatggtttttgtgatttacagaggagacaaggctttttgtagcaacgagtgtagagaagaacagattgaatctgatgaagctaaggagagaaagtggaaaaaatcttcaagatctctccggaaaaattcttctgaaactaaagaatccgccgccggaaacaccgtacggacaggaactctcgtcgtggcttagtagaagcttcagttacataatcaagcaaatagtctttttttcttctatataaatacctttttgtctaaaatctataaaccctcctaaaaccacttatatctccaaagcctctaaaagatttgctctgtttctattgatctttctatggatcggagataactagttttctaattccggttgtcggaatctgagaaattgtagatctggtttatgtaaatgaatgtggagttttgggggcagagagaaagaaagatgctaataattttggctgtgtgatgtgatggttttgtaatctggggttgaaattttgttcgatgttccataataaacagagcataacaactatgttcttaataaatataaattcaatttctgtatctgcgtgtgatcgtaatggtgtcttagaaatcgacaaaatttattcaaactggtggtgttaagatttgttggcttttatagttattcgcattgaacaaattagtcagttcgactgctcttggcggtatgcattttacggcaggcaactaactaagaactccggggaatcttttaaatgtgtaacagtgacagcttttttgggccttaaatgggcttctcaagatcccatatattaggttaagacattgacagttcccactttctatgaagaatttgatattcagaaccaaaaaagaaaacatctcttcctctgtataactcaatgattgtagtcttcttgacctgtaactttaccagagctagaccgagtttcaagtgtttatatctttgtattacagaatgtcaaaatctggttttcattaggttcttgttccatctatcttttgttttcagatttgttttggttaatagtgattgaaaaatgaagattagttccgtacaacacaagaaacttaagataagtaggatacaccctaaattttcagcaattatagacaacagttaagcaaagcaaaatccatccatctggtaaatgatttaattgattactcacaggtaaagaatttcccaagacccatcaaagaacggttctatgttgaagattctacttagaacttttgagattacatagtgaaaaacttttaagtgtcgacctttcttcattagctcttctcatcctccaaacgcagtttagtatcatccatttcaaacccgtgaccatcagaagaatggtggtttagccaccgagattgtattcaaccacaagactgttgagaggagagagtatcattgtttgttgtgtaccttaaagccaaagatcttaggaacgtagttttgagccggcttctgcggtttcatgttcccataggccatgagaaacaaatgagggaaagtagttccaaagtaagctccatcaatgtctgcaataagcattaaggaaagaacactaagacaagtggacaacactctttatcttctaaaagatttaatgcaaacaaactagctaatcgcaatgtttaaccaaacaatagcagatgcatcatattatgacaagataaagcttttttgaacagaggagcaaaggatactgccttggtatttagatcgcgggtagtaaatatcctcgcattttgggcagtatatcttcacagtgctcgacctcgggatatcagattggccaaccggaagacaagactgtccgcaacagaaaactctggggcatctcccgaaatcataattcttatacttctccatctacaaaagagaaagatatcattcaaaagatcaatcagaaacaaagatgtagaagaagtatcttgcttaccatagcagccattcctttagtagtgagaatataacgaacatgaataagaccatataacatctcagcagctgattccaccatctcatgctgttcttcagtaaacatatcacctaatccaataaacattcctccaaattatacaacaattctcagacaaagtaaagcctaaattcatcaaatggacccttcacttaccatttgatgattcaacatctaaaatgagatcaagtgcataatcatagtaaggaacttgaccactcaaaccacagagattgaaatcatcttgtatataatcttcatctacttcacagaaaaactcattccctctcaaattacaaaaccatgagatccaagaggtatcatcaccttctgaaccactcacatctgatccttcactatccgtgtcagattcaactgcatccacaaagaatcaaaatttattaatacccaaatcagaaagtactaaaaccacatgaaattgaaattgagtgagatataagcaattaaccatcgggggaacgagaatgaagctgagatttagcagttgaagtagaagggacagaatctttgtccttagaagtgaaaaccctagatgtagaaggtgaagatttcttaagatgtttgtctaaagcatcattgattcgtttccgatcaatagctccaccaaggatctccgatctcgatgatccaccaccacccattattcctcctccactccgatccttgtacataactcgattcgattccctcaatgaaaaaaaacaaaatttttcagctttagattctcaaagtcttcgactttcttatcatcagaggaagaagaggggcggataaatctagggtttgttttttcttcgatagtttgatcacagagtagaagaaagagagaagaagagataaagagtgctctgcttttccctgtggttttttctcattctctactgttttgttttcttctctttgtttttttttttttttttaatcattgtttaattttttaaaattctagtatttagaaatgggcttttcggatgggccttatgacactgacagttgtaatacaaagattcacgtagaaggaaacatttttttgtacttaaactatgattccaaattatatcttaggaagaaagaaatcataaaattcatttttttttgtatcaacacggtagtaataatggacttgcctttccatctttgttaatgatgatgtgtttggtggtcgatccattgtccaaacttaaatcgaaaaaaaaaacaaatgatctagagataattaaaattacacatcttgtaaaattagtcatgtaaatgtaactgaatttacaaaatttgatttgatataaccaccacttattttcattttgctgaaacatttggacctttgcatttgcattgattggtgaaaaaaacaaagcactataatttgtacaactttcatttctaccaattataattttttttatcaaaagcgttactaaaagatttttctctcagcttttttatacattttttttaatataactgttttttagtaattttatactatttcaaaaaaagttaacagataaaagttatgtacagctatgtgttaccaattagagtttttttggaaagaagtaaaatatggcaaaatctatctaaattcaaaaaataggaaagaaatcaaacccaccgaataaaaaattatttttaaggcgttttggctctctgacagctcaaattaaagttgactccttttttaccactcaagtctcattctcattcttcacttgaaccagaataaaaccacagaaagagagagaacagggtaagtaaaatcagagaattttctcaatcaatgtcagcttcaatggctgcaacatcaacatcatcagcaacagctacaacgtttataaagtgtgtcactgttggcgatggagctgtgggcaaaacttgtcttcttatttcctacaccagcaacacgttccccactgtatataaatccatctctccctctctctcttttggattgcttttcttgatagcttttggtgactgttgagatcttgttattacaggattatgttccaacagtgttcgacaatttcaatgctaatgttttagtcgatggtaaaactgtcaatctgggtctctgggatactgctggtaaatgcttttacctaatgtcaaagttgttcttgtctttagctttatatctacaacaatatgtcaaggtctaatcttttggtccttttaaaagaagtcagttgaaaaatttgaatctttgatgcaacattgttttggttcttgaattcactatcagattttgctcatgtttcttcaaaacttaaatgagaccaattatgattcttgtgttatatatcttttgggtgattcacattatattacaggtcaagaagactacaatagggttagaccattgagttacagaggagcagatgttttcattcttgccttctcacttattagcaggcctagctttgagaacattgctaaaaaggttgagacttgagattatctttccttttacttttaatttcactgtaatttaactttacaacactgatctcatgtgcatatggatcggttttctttcgcagtgggtacccgagctgagacattatgccccgactgtgcctattgttcttgtgggaaccaaatcaggttgaagataatgaaccactctgttatgtcttgaatgttaggaatctaacatcaatgtgtaagtgatgttatgtagtatataagatgaatttcttgatattgcagatctaagagacaacatgcagttcccaaagaattatccaggtgcttgcacaatcttcccagaacaggtatgtttttttaaagattcttcttcaatgtatatgatcaagaaccatgttaagaatcaaactcttttataactcaaagattgcttcttttatagggtcaagaactaagaaaggaaataggagcattagcatacatagagtgcagctcaaaagcacaaatggtaaagtaaccattaatgcttgagttacattttacaattagaccaaatattttggacctcaatctgataaagaaagacttatgatgatgctaaatttgcagaacgtaaaagccgtgtttgatgaagcgatcaaagtagttttacatcctccttcaaagactaagaagcgaaagagaaagatcggtttatgccatgttctttgactagtgtactcaagtctctggctttggtttgttttacatcttttttagtgtgtttcttctatgaaggactcttgcagattttagtatgattagctatcttcgttataaaagtttgatcttgtagtagagattcttgtaacagaattataagcgaattctcgtctatcagtctatgtaaaagaacaatgtttgtcttctttgagttcaagagacaacaacaaagaaccgttttagcgcaaaaagaaacaaaataaaccgattgaaacagaatcgaagaataaataaaccgggttttgttttttggctaataaccgaaaccgaaatagaataaatcaataaaatctcaattctctagtcttctcctttaaactagagtcgatgtctagctccaacgaaccaccgcgaaaaaccgaccaaccatcgtcgtcatcggcatcggcatcggcatcgccgtcattgtttttgtcactgccactggaaatcatttcgatgatcttagcccgcgtcccaaaacgatattacccaatcctctgctccgtctccaagaacatgcggagtcttgttcgctcgcctgaaattcacaaggctcgatctttactcggaaaagattatctctatatcggcttcatcgacgaaaattatcgccccgtatacgactactggtacactctccggagaatcgagaacagtacgaccgagaatctcttcgaatccattgagttcccttatccttccgagcctaatcgattttccatgaacgccgttggtccaaagatcttcttcatttcagaatcttgtactccttcatcaagactttcgatctttgacacccgatttggggagttgcgtcaaggaccttgtttgctagtgaagcgagggtacaattgcgtaggactagtcggcggtaaggtctatgtgatcggaggctatcaggacgacgagattgcagcggaaagctttgatctaaatacgcaaacttgggaagcagcgccgattcccgatgaaaaagaaagtcacaggtggatttgtaaagcaaatgtttcatttgacaggaaggtttgtgctttaagatctcgtgaaggcatgacttgttatgacactagagatggttcttgtcagagatctgagatgcctaatgatcaatggtctagagtaggattgtgcgtgattgacaatgtgctctttgtttacttctctagattcgggttaatgtggtatgactctaaactgatgctgtggagagtggtttatggttttgatcttgacaacgctcgatcagttggaatcggggaatactacggaaagttggcgtttatatgggaaaaaccaagtcttaatgttagtgaaagcaaagagatttggtgtagaatgattggtttgcttaggagtgaagtaggaattcatggagctgcagaaccgtctcaacttgtcgagattgtccctaacggttatagaatgtgtcattgtctgtctctttcaggttaaaacatgtctagtactactttctttggtgtaaaatgattgttttggataggagtgaagtaggaattcatgtgactaaagatgatgatgtttaatactttcgttagtctatatcaatacaatgtgttacaagattatgaatgtgttgcggcgtttacgtcttcaactctcgatttattcaattaatgttgcagtttcagcatcttcctctgttccacctaatcaagtttgtgttattgtaaactcactcagttaagtgtattttacatcggagttgttgtgttgtgtttctcttgcccattaaaccgattccatcgaaaactgtattcttaaaccgaataatgcaaatataaattataaaccaagacgaaaccaaaaaaagataaccgaaaatgaatgaaaaccggactgaacatcggtaatacaattagtcaaccaacacacttgaaactccatacgagtaaaggcccattggggatgaggatatttgggccaatccttcttaccgtttttcgtttgttaacaattaccgaattaaaagcttgatcgccacgtctttttcttaatagaatatattgattttatttatcttttatttttagaccaagctcaggctatcatctctccgttaattagggttttcttctctatctcgatttcaataccattgttgatccgctgagctagggttgttcgatcccgataattgtgtcgcttagctctgatctctgttcatcgaatttggttaatttgttttgattggttaagatacattggaaagcgatgccaccgaaggttgtgaagaggggaggcgccgcgagaagaggtgggaggcttacgagatcggcgctcaaggcgcagaatcctcacgtggaatcttcccatgacgaatctgttaatatcggtgagctctcaggctccgatgcactggaagccaaggaggtgactccggaggttgataaaactgttgaggaagagaatccattagatgtgccgaagtcatcggattcaattgatgattctgaagctgcagcgaatccgcatgttgatgttccgtcgaaaagtaagattcttttagcctggttattaattttgtttcgtttttgggattctctacgttttcgttgttttgatggatctaagtttcgctttgacgaaagtttgtgacttagagttccaacatatctgaccatagagattaaatgaatgtctgaccattgaatgtatgaatctaatttggaggatggatgtttagctgtttttaattctgtggaagatagacgtatcttctgagattgttatctctgaacaaactttaggctacctggaatagtgtagatgttttactcgcttttactcgcagaggagactgaggtagaggaatctgtggatgattttggaaaagatgaaagattggatttagatgacaatgaacctgagtatgaggctgaggaatatggcggggaggagtttgaagagagggaattgggacaggaggaccatgagttggtaaatgaggagggggaagaactggaggaagagattgaggtcgaggaggaagctggtgagtttgcagacgagattggagatggtgcggaggaccttgatagtgaggatgatgatgatgatcatgctattgaagaggtcaagcatggagaaactgttgatgtggaagaagaagagcatcatgatgttctccatgagaggcgtaagcgtaaggagttcgaaatatttgttgggagtttggacaaaggtgcttcggaggaggacttaaagaaagtgtttggtcatgtgggcgaggtgactgaagttaggattttgaagaatcctcagacaaagaagagcaagggttctgctttcttgcgttttgcaactgtggaacaggcaaaacgagctgttaaagagcttaaaagcccaatggtaattgtctacactttagtatttgatggagagtttgtgtagctttacattttgtatcatgctcttggtcattgggactgcagataaatggtaaaaagtgtggtgtaactgcaagccaagataatgataccctcttcgttggtaacatatgcaagatatggaccccagaagctgtaagtatttgggtgtccgtagatatgtcaattaaacccaactccacagttcgtggtgatcctgacaatcaggtatttgttgttgttccagttgagggagaagcttaaacactatggagttgagaatatggatgatataacgttggtagaggacagcaacaatgtcaacatgaatcgagggtatgcctttttggaattctcatctcgctcagatgccatggatgctcacaagcgtctcgtcaagaaagatgtgatgtttggagttgagaagcctgcaaaggtctcttttactgattctttcttagacctggaagatgagataatggcgcaggtactcacattgcaggatcaattatttctagcaactttcatcctaccatgtcttctttagagcgttggaggagtttataggggcatgtgtgggtgccacctattctgtatggtgacttagaatacttgctaaacccatcatgaaaacagagtcagaatacatattccttttggccctctaacaacatgctagatactgaattattgattgttggtgaatctattatatctaacttatctatcttgctcatagtaattagttttatgatatttctggtgttacaggttaagacaatcttcattgacggtctgttaccttcatggaatgaagaacgtgttagagaccttctgaaaccatatggtaaacttgaaaaagttgagcttgctcgcaatatgccatcagcaaggaggaaagattttggctttgtaacttttgatactcatgaagctgctgtgagttgtgccaaattcatcaacaactcagagctaggcgaaggggaggacaaggtatgcataatttaaatgcattatccttatccacgaagtattttcttgctttctaattctctttttttttccaggcaaaagtgagagcacgcctgtctagaccacttcagaaagcaggtaaaggccgacaatctagtcgctcagaccagcggtctaggcatggggctggacggtctggaaggagttcatttgctcgtcttccacctcgtagccttgcttcctctcggagtgctagaggcgctggatctcgggccccatcttctagtgcaaagagagcttctggatcaagaggaagacgtcctcgcccacctctacctccgcctgcaagagctaggcccttgcctccacctgcaagagccaggcccatgccaccacctgcaagagccaggcccttgccaccacctgctaggtcatatgatagaagacctccaggtaccactggaattattacatgtttagttatcttttttagttgaatctcttttgtgttcatgtatctaatgattctgatcatatcttccatattgtgttttgcagttcctctgtatccaaaggctagcttgaagagagactatgatcggcgtgatgaacttcctcctccaagaagcagaccagctgtaagctatagttccaggctttctcctgagaggcatctgtcttacagagatgattatccaccccggggttcgggttattcagatcttcctagaagttcttctcgctctgaaattaggaggccattcgtagatgacctttacagtccgagatttgaaagacctccaagttacagtgagggaagacctcgtgcttatgaacctcttcctggatcaaagcgtccatatgctgcactggtctgacttattgttttctccgaccagtttgtcttcttaattttgtttctttagactatgattgtttactctaacgagtgttcattattcaggatgaccttcctccccgttatgctgatgttgatgttcgtcattcaagaccccgtctggactatgatgttggcccatctcaatatggggaatcctacggggaccggtatgttctctttttatggatagcttcagttatttttggtagcaattttctgtgccaagtgtattattttcttacttccatgtttggtctaggattcctaggtctagtctaggatatggaagcagccgaaattctatgtcaaatcatgactcgcggggcccatacagcagtcgtcagggaatggattatggaggaggtttgattcagaacttggcttaacagagagcaatacttcgtcgagatacacttactgccttcaatggctataatttcataatgttgctttcttcaggttcttatagtggcagcgatgtaggaggtatgtactcgtcaagctatggtggcgacttacccagaagagatgtaagtggcttcacactttccccttttttatatttattttggaaagtcaagttgtgtaacattttagtattggatttacagggaggaggtagctcgtattcttcaatttactccagccgtggcttgggtggtagtagttactctggtggtggtccaggatcatactactgaatgtgagtgtgtttggttccttccatctttagttgtgtctttgtgcattattttttggttttgtttgtgggatatattgttggttggaaagaaaacggtatctcctctttcaagctctaagcaggaactatagatcaaatgtgtgcttaagtttgttaatggaacacagaatttcacatgaccgaggctgctaaaaaaggaggtttggccatgcaaagttgtgtatgtagaaaggaagctaccagctgcgaaaggattaaagccagcttcggtgagactgttggaatattaatgggcttgcatctacaactgcacttgtatcttttttcggatggaatgataagctcgagttttatagagatggttcatagttgtgggactcgttatctatcttatctatctctatctcttgaataatggatggatttgttggaacagagattaagctgtgtttgtattattgatccatcagtttagttaagctttcaccgtcttctcagcttaagatttgcattacttctgtttagatctgatgcttgctctgttttactctcactgtggtaaaacagagacattatccttgagacttgtggaagagacattaacaacctctcactgtcggaaactgaggaactcccaatttttatacactttataacatacataatcaagcagggatacattactggtgttagacagatgcataagctaataaaagctctttcgatttctacaatctagaaaatttgaaaatcacacattaatttaatttatggcgccttttgatcaggagtcagctaaagacgacgacattcttctatctagctttcttcttcttgtcttgctcctccgtagtagtataatctgataagcttttagcaaacgcttccacaattcgttgttgagattccaaaatcatctttgtcctcttcatctctgtatccatcctcatcgcttctatctctctcgtcatctccattctcgtctgctctgttctcaccaacgtatctccaagcagctttatcgcactagctatctccaccattggatcattatcatcctcctccgtcttcatcatcatctctctccctcgtttccctcctccttcaggaattctcacaactctagcaccgtaactagatcctcctgctccgataccacgaccagctctcggatttgaactcacaccagcacttggactcgccgtgtatttctgatcaatcttaccgggaaacctcggtccaggctgtgctatactcactccagtcggtatccgaattcgaatcccgccgctactactactccctccaccaccaccagatccagctgtaccattcctgttaaagaacctcggcgtcgtcctcgctcctcctcctccgccgctgaattgatacctagctgtgtaattaccatcatcgtgatcatcatcatctccactttcgttaccttgtttaatctctggtctattctccatagcttccattcgcttaaaatgaacccaagacgatataaacctcgccaccggcacagatctagctctctgtatctcggtccggtaccttttccggagcttctccatcttgtgacggcactgaaccgcggttttcttaagaatcacgtcggggcagttagcaccaaccgcttctgcaacttcttcccagtgattcgcctttagatttccacggttaagagcgtaccatttgtctctgtacgcgtcaattagcgcgatcgtctcttccagagaccagcacggcggaggtaaccgcctagagttcttggacgcggtggggatggaggcgctcttcagatctgtgttggaagctggttcggttgacgcatcgtcatgagcggaggaagataatggtggcgggaggggagctaaaggtgatggatccggaattggatcgtggttcatcggagaatccggatcggacatggatcaaaaaattgaagaagaaggaaagaaaaagacagatcttgtgaaggaagagaaatggctgtaatgcgatggcttttcgcggcggcgattgcacgtaatatcgagaagataagggagagagagagtggaggagaggcgtatgataatggtgggtggcggaggataaggttagatagaagcgtagattagcagagttggtaataaagccttatgcggtggtggcggagggtggtgggggcacaccgtcgtggacgacacgtggaataataatgatatttggatcggtgtgaaataaaatagagaaaaagcggctgatgaagccaccaagccaccgtagtcatcatggttggaggctaacgtgagccgtgttatacgggaccggtaggtggcgttggtggacttagcgaaccgctcttgccgtttttggggctgattaattatgtttttggcgtctttcattttttgacttctcttttgcattcgtttctttttaggaaagttatttattaatatctatcatgagattattgattcgtttgatttaaggcttcaaaccccattaacacaatttgttggatgggcttaaacttgaatgggctacttttaagcatgcgcagcaaggaatgtcacggcaaacatcaatatgcgagaccagattcttctgtctcaagcaaggtttagctctcttcacactgcttcaggcctcaatgaaattagaagttgtgggagagctcatgagagttcagaaacgtgatcatgggttcagaaaattgagatttataaattaaagattttattgctagagattaaggggaaaaaaaacaagggggaagaattaatttcattagatttttagccttaaatcctttttagtagagcggaaagtttattttgttttctctctcgattggctaaaaatcccttattcctcgttgggtcgatttggtttggtgtgtttcctgtagttttataaatctgattggagataaggcagatctgaaaggatggttgggtgcttgcgagaaaaagcgagtcctattatgctagtacacttgttcttaacccgtttacccgtgagagcttctacttacccccaaggagacacgaacacagatcccgttttttagctttctcagccgctcctacatcacctagctgtatggtcatctcctacacccaactacgatcctgcggatctgttttgatcgatacttggcggcctggtgaaaccgaatggactacacactgctttgagaaccagttaccctttcgctattggtccaaatgtgtcttctccaatggcatgttcttctgtctcagtgaatgcggctatcttggggttttcgacccctctaaagcaacgtggaatattcttccagtgaaaccatgtccggccttttatcagtttgagtttgattacactcataacccagtgtttatgacggagcatgaaggagacatctttgttatttatacacactgatacaacaacatcccaaccgtgtttaaactgaattctaaacacaaggaatggcaagagaagacagatctaggtggcttgacaatatatacaagttggccttcctcttttgtaagagctggtctctccactgagcacaggaacaaaatatattcatctcgtcttgatcaatttgagcggtatggcttgtactactccctcggtgatgcttaaggctccgatccccctcgagatcacctagcgacttaccacatcctttgggtggagccacctcacaacaactttcatttgtgactttcatttatcttttgtatcatcaccaactttatttatgcaaggttttatttgaactatatatttgcaagtctttcttttacgttgtatactctctattatgagttggacaagtttctatttatccaatgcctagtcttttttatgggttaacacaagtgtttcagtctgatactaagacgcttcctctactatttgtcggatgggcttaaacttgaatgggctatcgttgataggctactgtttaagcatacacagcaaggtatgtacaatatcaaatatgcgagaccagattctttctgtatcacacttgttgagtggctattgtgtactgttttcaatgtttacctgtctcaaattcatatctttgtagacaggatattataatgtttaggctttgtaactgtaggagctattgtggagaagtaaattgcaaactttgatccgaggaacatgtgaggcatttatgtttagacactgaactttgtatagtatcatttacagtgttgttcctttcaaacaaggttgaccaggatataggtagttactactagtaactctgtaatttacctacgccatgtctggtttgcataaccgatcctaattgtaattgatgctgatcgatttttgactttttgttatagaattgaactggaactgatttgttcccaacttggttttgatccagtttggataaaccggttttacttcaagtacaagaaagacagagtctctcctaacgaagttcgtaacgtgttactggttatcgcgattctgatagctaaaggcctacagcaacttatcgacccgtgctaagtccacctggaggtgtttggcaagaagattactgcatttttttttggtgagaagaagactactgcattgatggatactgtcaagtaactaacttaaaaggaaacaaaactaaaacggtttattacgcaggaacaacaataatgggatcaaagagttggatttcttacagcatttttatcttcttaaactctatcaggtttttcacttctattgaactaatctctttacttacaaaaaggtctccctttctaccttgagctacaagtttcattgactgctgttgccttgacctatggatttgcaatggctacactttctcctaatttcggattaggcttgtttttcttggtgatctccgtggaattacccatccctagtctagttcggaaacatgccaagaaaaccagaatctatcctctaagaagcactacaacaaccacctcaacttccaattcccctgttttcttctacatatttacttgattggtttgtgttcttgagttgtgtatttgaagagactttgagtcaaatagtacttttgttttgttctgccaacaagttctctcacaagtcacagtctctcttagcttctttcaaattggctattttgaatgtgatttctttatcgttacactctgtctcactgctctgcacatgttcttttgttccctttatagaagaaccagaaacaacaaatcttattcaccaatcccaattattgtaccatctctacttattactaaagtaataacccatgtttctgatctgacatgggtaacatttgaatatcagacaaaacaaaacataaacaatcataacaaattttggttatttaacaaaaaaccaaaaatatatttggttccatttaactaatgacatttaaattctttagccagccagcctgtaaagattaatttcccatctgtccacatctagagaaagagatagacaagaacttactggttgattttgaattttcttatttattcttaatcaggatttgattaagacaagataagagtccctgccgactaatctctacatcatctacaactacacaattcatttttaaagaaagataaagagacagaaagagatttagatttgttttttggattttgttgtgattcaaacagcgagttgttgttgttgttgtttctgatgagaagcttcatcgtcgttgaaggtaatgagagatcttgatgatgggacaacaacgagagagagaggttgaagaagagtcatttccttttgaagataagagaagtaggcgttgaatgtgtttggcgtcacgtttaattcaaatcctaacccgaataagaaatccagctctagaaaattcatctccttcgtgcttattcctcccactttcgcgtaatacgcattgttgtagtacctgtgttaataataattaccaaatttataaggtttagcgaatcagtgtcatatgattaacttcataaaaattgaatctttatttcaaaggaagaaacagagcagccgtaaaccaggggaatgattgattgattgattgatatcattatgatttctgtgccaaacaaatattcttaaattttaacagttaaaattcaatctatggtttagaaagatcaaaacttttaaaaattaaatgaaaaaatatacttcttacgagattcagaccaaacataaaaaaaaaacagagcattcatgaaacaggggattgattgatgatcatgtctgaaattttctaactgcgatagtcaattctgagattgaccctcgatttaatgtttaaaacggaaagaatgtgagaaactacttacagatcatcgaggaatttagcagcgaccatgacactagtgatgagaagacgatggacgttaaaggaattgatgggaagtgaaggttgtctgtgagtgaaacgatcgagataaacgtaagcaacgacgaagcaagaaggactacaatttgcgtatttgaagatcctctctagatagctctgaatcgttatcgttggtcgactcagtccatgaaacaccgaaactctctgtgactgagtcgcgactcgtcgggtcagatcgtttgactcagcaactcgctctagcaatgaagataagaatgctatcagcttcgacattacacttggattctcaagttccgccatttttttgtgtgtatgacagagagagaaagaaaaaaaagttacttttttgtgtgatctaatgaagaagagtcttctctttgttctgctctgttgttaatggcgtgtgtgttaagttggtcgttatattgggcagttattatttattattttattttattttatttttgtaaataagtaataatgtttttattttatccaaattcaattttaggaatgtgtctcttttggattttaaattgtgttattcattagtagtcattaactcttctatcaccgtcggcggtggaaccgaaaagaccaaactatagtagtatttttgaaaatgaaaacattagtatatgcgaaatgtggggtttatatttcacaagttaatgattattgaatttgaaaacttaagttctaacaagagggaaacacaattaatgcgttaaacacaacatatcaaatcgacacagataaacgtaatatcgtatcctaatcaatatttataaaattatgtaatctgattttaggtaatccatagtttatctacgtcatgattcatgaaatatacacgttatatatctacaaatttagaaactatcagaagtaactgcggatgataacgcgaagttttatttacaattatatatatttgaattacaagaaaattaaacgattaaccattatgtgtcttaatttttggtttgtagtgtatggagatgggatcccatactcaccatgttacatgacatgtggggaaattttttatttgaattacaaagtcacgaatagtgatctcacgaaatgcatgtgtttctaataatgtgaatcaattcccatctggtaacatcaaatttaatcctttctttataaccccaaaaatatattgattgttagcagaaatatagatatgaataaataatagatcgatctaaatctaagatgccaagagggacagctaatttggacgcatttaggcaaattctaattaagaacagcaaacgcaaaagctaaagagcaaccaaagaaaaaagtgaaacaaaagaagagatttcacgtttaaggaaaaaaagaaacaaagattttaactttacaggacgatatgtcaacttgtgtgatcaactgttactgatttatcatcatccctttggaacgtttaaaatttactcgagtttatttgcttcatttgataatatattaaagtaagaatatatttatgaaactgtataaaacataataactgaatttaaaatggaagcatgtggactgaaaattgtaagaagtgtatataaaatttagtccttaaactatatcgtgttatacgttagaaatcttttttattgttaacaaccgaaattaattcaaattatcgacgttgagatctattgcatgcaaacgaaagttacaaggaacacaacgtcttggtaccatattttatttattttgggttttgtatgatgatagtactgatcgtatacttgattagtacctgaagttaatcaaacatgacagccaggttagattgggattggagtgatgaaaaagtaaagcatgtctcgtgacagaactaagaatatgattttacacagacgatatgattttttagtgtagatataatagtatatagtgtttttggagtatttggggatcgtcaataactgcttaacgtgtctctcgcttctcgtatctttttcatacccaatttccatgtgctactccatgtgaccatcccccatccttcaaatacgccttttttcctttagtttaattcatataattcacaacatttacgttttagaatacatttaatattgatttatagaataggcctagtctagtcgataattttgtcttgaaattatataaagatggaggaccacatttcttggttgcatgtacagttttaaaattccgaattcgtaagttcagtttttatgttctctatataagccaattctcttttcaagatatttatttaaatcagaccatatcaaatgtttttgttgttgaagattttatcagaccaatccattttaatttggtgggcctagctattatccatttcatcttaagttgcatacgacatttttgttacagatatcttctaagaagatcgagatgatacatacaacaatcgttcatgaaaatataaaagaaaccaattgtcgttgttgttggcttacacaaacgggcccaagaaccaattatttgatgccacgtcacgatcaaagaaagaacatcaattttttttatcaattttaaaaataaataaaaaaagaacatcatttaagcagctcgactcatatgacaaactaaaagtacaatgtttgtagtaaaactaaaagaagatcatttagtctctcatctcttcaacaatcgcttcataactatcttttgagccgataatgggcctaacatggcccgttaatttagtatttctttagtttccgaaaaccccagtggtcgaaaaaagtatagaaatgttgattaaaaaaaacattttttaccagaaaaatgaaagataaacccaaacaaatctaaggacatatctcttttactttccccaaaatctaattatagagaaactattgtaatgttgatccaagaaaaaacaaataatgatcataataatgttgaaatgaagataaaacccaaacaaatctagacatcagatcataaatctttctttttgtccctcaaggttccatgcatgatgccatgatgttgctgtaggttgagggaatcaataccctattatatatatatttcatactaaaatccaaaagaaaaagaaaactttatgtttctcctctttacttgaataaagtttattattccattcagaaaattatgtcctaatgtaatgagaaatgttgttaaatcgtgtaataagaggtggaccaatatatgtacaaaaagcgaaggatgtgtcagggcacaaaataggtggcttactcagtttactcacactccacttgtgtctggcacacatgataagcagcgagtcacatgccctgactcagtttcagctagttcgccactcccaatttaatttgccttttaccatctataaatacctacaagtaaccatctcaatgtatattcaaatcaagttgtatttctttaggcttctttaattacaatttttttgcactaagttgagtgaagaaagatgtcgtcgtcactagaatttgactttgttctctattacaatgttcactatgcatttgcatctttcaagaacgaaggtgatgatgacgacgatgtagtctatgattacgctccggctgcatgattcaatcatctacagttataaaaatcttcatcattacgggagagacagaagcttttctagctacccagataaccctaattagtataattatatagaccatgtgcgagtttgtagctaatctggcttgagtgttgttactacttgtagtttgtaatatcataataataactagtggtaactatattatcatcatgacctttgtttccatttttttttatggcttatatagtaaactagttataccggacctaaaatgttgagttgagtcttatatatatcttatcatttttgttgtgaaaatcttatgttaatcgacaattttaacatgttttgtttgtcttaattttcttttcttttgtttatttttgaacatcgaactcatttgttgtagagaaaaatcaaaagtaaaattttgaactccaaaattcaattataataaatttgtaacgactagacgtaaacttaacttcatatatacaagtataagttgtgtgaattatctttaattatcctcttttaaaataagatttgggagcatatatatgacatttttagtttattagagtatttctttttcatactcaagaaaaagagcctgcaccaatataatgtacatccttcatctgatacttaaatattttgcttcagaatcacttaacaaaaattagtttctgtcacatcgcgtcaaactaaaaaacgcattgaaagtttgaacagaaatgaactaccaatgtcaatatatattattacatatgtatactataagcaacaagtcaagaatatatgcataacatctgatgacatactcttgaaaaacacatgcaatatcaaatatgcaatatatcacacatctatatgtgcacatataactgtctatatatagatatatagaaagagatgttaaaaggaagagagacaatcatggtcaggagaagtggagtcatcagagggaatgtggttgtgacgaccttcgtaagtagtaatcaccattctacaatcttccgatagtcgctccactctctttttcaccctacagttgttgtgtgtgcatctgtaataactcctgtttatatgtttcattcattaatacacatcattagacataataattaaattcaattaaccattaaaaacgtgtgaatatgttcaaaaatagttgggaatatatgtgtagacatggcacaataaaaagagataaaaatagaaagggatattttttgcattcttaatgatgacagcacccgagggacgtacagacgatacatactaaaactatatgtacgttagtacgtacaataaatataattctaactatgaatatacatatgtataagataaacagtagtcatgtctagtacttgagctacggttccataagagcctaaagagagaatattatgatgcacctagctaaattaagttttcacctcagcttttacgaaactatcaatcatcaaccaatgtgattatacgaggatcactgctaattaaggacatgttatattaggaaactattggtaaagttaatgaagcctaagcagtcacatatatgtggtggtgatgataattaactaatttagtacctggggtgaaggctgttcttgacgactttctgaccatatttacgccatttgtagccatcgtcaagaacatcaacatcgcttttggtttggaaacagaatcttggctctcttagtttcctccttatcttcactttgttcttcatatctccacttccactatttgatctccacctgagtacactctaatgtcttagacacattgtttatactttataccttaggtttaatcctttctcataagtcttagtgtaaatatatagtctatagttctattggatcacaaaaaaaatgcaagggagatataaaagtttaattaattaatcagttattgaagaagaaaaaaagagaataaattaacatgaacaagaagaagaaatggattcatcttttaatccaacgatgtaaattaccaagaattagaatgagcatcattgttagttccacctccaaaattctcctgatcatcattaaccacctttgatcccaagggtcctccaccctacaaaaaatcatattagaccttccaaatcaagatcaataaatacttcaaataaaattaaacaagatctttttatatatgtatataaagaaagagagatcaaagacctgaagattattagaaaaccctagaggtgcatgagtagtagtagtggaggaagagttgtgaatggggaaagaaggagaagaaagagaagaggaagaagaagaagagaaaaaggttaagacattggtttcttcaaaaggaacgaggaagttcatattctcttgaatcgtcgtcgacgacgatgtcacttgttgtagatcgtaattactgaatactcttctccctcctccttccattgtttttaatctcaatctctccttgttcctttttgttgactattttgtaccaatttaaaatagtgtatgacactaatttatttctatataaattaataatgttttaaatgttactttgacggtttatcttctcttgctttcgtatagaaagggtagggcttcgtgtgtatgtccccacacgtgtcaaagaccctccaaacatattatttgtaccattcgtgtctttggcagtcaacttcatgtgaagtgttttaatgtttataaatcatatcgctaacaaaacaaaattcgattccattatatactcgaatatatatatttcttcgcataattcaaaacatcgtaaatccttgatatttatgcgtattgtggtcgaccaaaggcggcgatttttaaattcagtttaacaaaaaacaaattgcattttatgaatatatataggttattccacaacattctaatatcgtataaagaaatatatatgtacgaagaaatgtaaatacgaatatacaataagtacttttctgacgtactaattaatgatcagtataatactaacaacaaaataatcataccaataacgtttacaatacatcaattttattagataattaacgaattttactttcatttgtttaagcaagtaacctgaatcattaattaaacctaaccattccataatgaggccaaaagaaggtttggagtttggactgattattatgatcagctttctgaagcaacctaagaaattaaatgaaggacattgttcatttcacatgacaattttgatagagagagaaaaagatgggagagaaagaagttgtcaaggaggtaatcgagtgtggtggaggtacatcaaagcttccatccatctcaagatgtgtcctaaagctgatgatggaaacgacacccacaaaagttacctcttctcaaatcatgtcgaatccaccttcataatttttgttttgtaaatttaatcccaataattttatttgaataatttcattagactatatgtttatatcgtttattgaaaatcacaatttttttaaaaaaatttatgcatatgcaataatttataaaagtcgttagacatcaatcagaatatcaaacaaaactcatccatgtttttatttggcttttaacattcctcggtcgatgttacagtaatggctggtttgaaaaaaaagtgtatttcttacagtattgagaatttgatagttacacacaacaacacaaacaccccaagaaaagagccggccaacttcctccacaatagcaacacaaagcaacaatgactaatataacatttttttaatcttctttttgacaaaaccataaaacatgattgaggtggattttaattttatttttaatttaccggtccaatctactccataattaactatcatcataaggttcagaacacttgcttaaatagccattaaaggaattatactaccattagtttgttgatcttattcttaccgagttactgacaccaagagtactgttggtttttcaggtagaaacatatggctacggtagtttcaaaagctaaggtcttcttgtttgtttatgtatgaaaattatcggttttactctaaaagaatcatatataacgctttagttttcttttccgaacacattttattaagttgtaaatacaaacacaagatatagtcgaaacgtttagagttggaaaaatgatttgatcaaataaaactttatattaggttaaatgcaaacataatcaaaagatgcaaatgaaaagaggagaataattaattataagatcataggttaagacaaagagagaaagagaggcataataaaggttatatataataggggatgaattccatgcaacaatgattacacgtttcaatcaaatccgtaaggaattttccaaatttaatgatggtgagatttctaaggcatatttttctctcttgtaggtgcccactttgtctcctccttcattctcctttcgttttcttttcttagtttgttttcatactttgatgtctttgaaaattcatgtggagatgcatacacgagctcgtcacgtaccgttggctataacctaaacctaactacatagttctatatatatccactattttcatacaagttcaatatcaattttcattgaaatgagtttgaggataaaacaagaacaaaaaatataagttgggttcgtaaatacgtaagttatcaaaaaaaaaattgaaactctaaaatcaatactatttgtggatctatatccagcaaacaaaggaaaaggaatgtattactgaattccaaaataagatccagtgggcgacaaacccaagcccaattgtaattcaggcccaatgggcctacaaagcagaacaagataccaaattaaggcacaagttagttcgaaaaactttctccggcggaaacttacgccggcggcacaaactttgtgtcttgctcaagatgattgcgtcgaattttatgtaaacaattggctctccgatgttgtcagccatggatgttatgattcactcttcaagctttctcctcccttgcgacgaaacttgtgggacgagatacgctctcgttgttcttaaccagaatttaccacgattcactcctcttctctgggaacatggtaattatctctctattcttcagaatatataaatgaatctgttttttttttattacgaatattctgtgtagaacagcaaaacttcgtctctgtgctgatggaggcgctaatcgcatctacgacgaattacctctcttcttccctcacgaagacccttttgtcattcgaaacaggtctcagatttatgtctctatttctctcatagagaaaggtttcaggaagaagaagttgaaactggaaagttttgtctttttattttatagatagttctgagaattgtactttttaggtataagcccgatgttatcaagggagatatggattctatacgccgtgacgtcctcgacttttatgtttactgggtaagctctttcttcttactattattatgcattagatcacaacagtgtctgtatttgatctaacatgctttttctccagggaactaaggttatagatgaatctcatgatcaagataccactgatcttgataaatgcatttcgtatatccgtcactctactttgaatcaggagagttccagagtaagttcttttttttaattacagaggaatgctagctcgctgcgtttgtttctctgcaacattttcactatctgttttatgttagctccagattcttgccactggagcactcgggggaagattcgatcatgaagccggtaatctcaacgtcttatatcgatatccagacacaaggatagtccttttatctgatgattgtctcatccaactccttccaaagactcatcgacatgaaatacatattcactcttctcttcaaggacctcactgtggacttatacccattggaactccatctgccaataccactacctcagggcttaaatgggatctcagtaagtaacatcttccatcatcatcatcatcatcattatcagatcgatctaattattctggtttttttttataatcgtcttacaggcaacactgagatgagatttggtgggttgataagtacatcgaacttggttaaagaagagataatcacagtcgaatcggattcggatcttctctggactatttccatcaagaagacaggacttcctgtacaagaccataaaccttagtggcgccactctttagttttatacgctactattatattcatgatgcatcgaagaattacttcaacattattgtgttgatttgttttcactataccagcaaataacaatttattgccttaccaaacatcagctagtgttactacatttgtactagatagtatcaaatctaaaacagaggagttttacttgggttcttctgtccatcgtctcttcatttcggatttggatcgaacttctttaagattcccatccaaaccataatctctctccatcacaagattgattccttcatctgaataccatccaactccaatgcacaacactccatctttcttcacatccacgtatgcactcacaccacctggtagccacatcacagacacatcttgcatatctatcatctcttcctccccaaacgaaaccaaagtttccggtaagttccttctctttagagcttctgtgcagaggtacacaactggagtgctttcacctggctgttcgaattcggcttcttctccgtagagtggagttgcatttacttcaaatactttccatgatcctgttagttctgatggttgcgtgcgtttcctctgtgagaatggttttaactccaatggtgcgtcgttgtcactgagacataaaccgttaagggtcagagacactgacataccgaagagaatgatataaatctcacaagttggagttacctttgctcttcataatttgaaggactaacccacagttcttcataaacaccaactctcattatctgtatatctgcaccaccattggcgaattctatagtgtgaactactctcagtctcttatggcaacccttcaccagacactggacaagaagaaggaacaatgagccatttcttctctcttaaaaatacaaacttgagaaatcttaaaaagcaaaaatagagacatacctgttcaaacttgaaagtcggtgtgaggtaatagttggattcactcatctccccaacagggattgtaactggacctctggaatacgatccatcctgcatatcagccacatcaaagaccataacaacatcatttatctcagccaaatggagaatcacaactaaactagtagctcccatgaaatgtacaagataatagtacctcgaagtaaacgaggccgggtgcatctaccatggaatcctcttccatgacatcacttgctttcaagttaaaagactcaaacttaggcaaacgactatctacaccactctgatcaacaaaaacctcatctttactctcagaacactctccatgaggatttaaagtaacccaattgatcttcctctgtatctcagactctgtattagctccactagaaggagatggtaacgcttcaatcttagaaagagtataacaatcataaagactctcattcttcttcccaatttcaatcggttccatctctccagtaatcggcgagaacacagctcctacacctttccaaatcccacttacactactcgcaaatgttctccaaactggttttatcacaggctcctaacaaaatcaatttcaatcagaaattagctaacagacgaaaatttgagaaaattgaaatctgaaaatcgatacctgagtttgaagaacagtctcggattcgatcaacatcgtccctgaaaccaaaactctaccgaatttaccctttcttcctccacctaatctcttcccgctttttcttccttttggcttcaccttacgcttatccttctccgccatttcgttgtcaacgctccatatattctctttgttacctttcagacttactttccctttgtttcccgccggacggctatttccgtcgtttagtcttgatccctgcgcaacgatttttctcccgttgacattgtttcgtcgctggaaattgcagattgaaggagataacagagcattatgaaatccaaagcatatattgtggttgtgacatgaaagtggagaagaagaagtgaagcttttacagagatgaagaaatggtgattgcatcgttttctgaagaatcatagagaagatgatgatgagaagaactaagcaaagtgactcgcaagatggcgttgaaacatagaatgataactaaatgggccgttaatacaatcttaggcccataattatcaatatttaagaagtatatagtagaccgttaatacaggcttaggcccataacattcaatattttgggctcaactgtctaaatgtatgaattatgatcctagatgggaaatatgagtttgttcaaaaaagaatcagtatagcatcttctttacttttctttttcgtagtttttttgggaagtgaacttgtgattggtaggaaggttactggtgatcgacgtttcctttaaggccgacaaagttaatggaccacggggagttttataaaggaggttttctttctttctttctttagcttaaaaaggtgtaatgatgactttttcaatctcaattttaaaaactttttggtgtattaatattgattcatatacgtgcaatctggagatcaagacattgaatactaacaccaagacgaatttttcggattgatggtttttgagttttcaaaataagtatgttggaatggtgcattggcgaatgaagcattgaccagacaaaggtcattggaaagtagtttttttttttttttttgcgtaaagctaaaggaaggtaataaaatacagtacatgaaaacgaaataagtagtgatattaaatactttagttgacaaaattgacagcggaaaaaacattacatgaaggccataaactaagagctttgaccaaatctgaaggtaaatcaggtttcagaatcagaagaggatatctattccaactggtgcaacggtagttgtacctgttgtgtcactattgcttcatagtttcgtatttatttattgtttctatgatgctgatatttgataatatatagagatatattgtgtttgcgttaattggtttggtcagtcgacaacccaagatttacttgtttgttattcgttcatcaacaatcttatagttttctctgtcaaatattctctttaagtaattttttaattaggaagtttagggattttttataggtcataggtgtaggttaaattaggtttgacaatgtataaggtgactctataaaatattataagtttttctaaatgaatatatcattagttggattaccaatttgaatatttttatgagattttgattaagtacttgaagtgttacgtgaaaatatatatagttcatgttttatcatggcaatttttttaattatgactaaccattatatgaatgttttaaagaataattctcgtttctattataaattttggtatgaaatctctatttataaaaataatgtgtatgtttatcaacaaaaaagaagaagatatgtatatgttttcttgataatacccgtacatagaaaggctattactttgacttcaagtaaaggtgtagcaattatctatgttcttgcttttttccaagcatataaggataatcgttggaatctaggaaaacttttaacgcaactcaacttcagataacaaacgtaaattttaacatggttaaatattcgatctaatttgtatatatacttagcgacaccagctttcacttatataaaattcacgaataaaatagttcatatgatggtagctaaattttcagtactttagaaaatatgaaatgcaagtgaagtagaattcagataaccggccaattgaatagaaaatttgatttagttggatagaggaaaagaatgttctgaaaaagagtaatgatgtgcatgtgctcgcgaaagtttccatagtgttgatggtagcgaccagtcttgagttccattcacgctaaatcacgtggactataaagattacacgtaccataaccataaagctctataaagattgcaattcaaaaaaaaaaaaaaaaaaaaaagaattgtaataggggctagtttctgattttgcttgctgtaaatgtaacatttcctcaagttttgacatagtttttaaaaaacctccttatagggacatgtcacatgtgttggatgattgattaacaatccggtggaccagaaaacaatgagtaattatacggaggccggctttagttaaacttcacacatcaaaatatatggcccatccctcgccttttgcaattgtcgccgaccggcgcgtgacgatctacaaaatttcgattttaaactcagaaaaatacataatacaatatacgtcaaaattgcatctacttattctaatggtagttgaaggaaaaaaatcagaactctatgacttgtgttataccatatattacgacaaaaaaaaagggattaaaaagtcgttgacgtttgacttaagtgccaaattaattaaccaatgcttaatgacctaaccaaagtcactttttattttagtccggtatgacttgtgacggcgacgctgaaaacgattgaagtacacgcgcggggtcctccagcctaattgccacctgtacaccagccctgtccgtcgtaactataaaaatctcattttccttttttattttatttccaaacctccaaacaattaaagaaacggcaaaaatttatgctgaaatctttttttcttccttattctcctctttcgcttgatttcgccgtccgattatctctatcgccgataaatatccggcgtcactcagtagatcttgaagctgttgctttcttgctttgctcttcgcgcaagattctctttctctgttttcattgaggattcgaagttgatcgctatttgattcgattggttttgagttttcgatcctcgacggtgattgaattctcctctttactttatttttggtttttgaagctcgctgtatcaatcgtgacgttttttgtgattcgcattgtgtctgtagtagttgatcaggtttccgattggtttcttattgatttgattttaaaaattcgattgctgatgaaattatctggttctgcatttgattgttcgcaggatggagattttgaagtgaatcggaggagcgaataagagaaagtgagagatggatgatagagaaggctcgttcgtagctgttaggcggatttctcagggtctcgaacgaggaagcgtttacaattcatcatctggtattttcatcatctcttagcgtttcattgagaaaagcgtttctgcttctcttagtatctaagcttatctctctacaattgtggttgatgttaaaccttagtatatggcagatttcgtagtatagagttgtctataagctttgtttctgtgtggttttatagagttttatggattagagatttagactagtgtgcctatgcgtactattcctctgttgaaaccactgtagctccaataacactggagtttatttgttttgttatagctgaggctgtgcctggatcagcagcttggttaggccgaggtctttcttgtgtttgtgctcagagaagagatagtgacgcaaattctacgtttgatctaacacctgctcaggtacttgactttccactgttcgagttggaagtttacatttattgttccctacattataaataacgtgtttgtcctctttagattagctgccttacttctaagtgtatccaggtacctaattactaataccctattgttggaatttgcaggaggaatgcttgcagagtttgcagaaccgcattgacgtagcttatgatagcacaatacccttgcatcaggtacacttttcttgaggggttttaagctttcagaatttctcataaacaaaattggacttgaaccatcatttgaagatggtagaatattgtatcttttcgtcccgtggcctttttactgtaagctagcatcataaattcaaatgtaccagctttgatgattactttgttacttcgtcatatgctcttaggaagctctaagggagctgtggaaactttcctttcctgaagaagagcttcatggattaatatctgagcagtggaaagagatgggttggcagggcaaagatccgtcaacagattttaggtataacacggactttccttatcatttatgttacaggtatttcttgcatatgttctctgacttacagtgcatcatctggcaggggtggtggtttcatatctcttgaaaacttgctgtactttgccaggaactttcaggtatacctatacactacatatacaaacatttcatgaaaagaatgagctgattttcctttataaatttcactttccatgcatcataaattatcgatcaatcagttattcatgaattcacctcttatagatcttgctgatccacttatgtcacttagtttaaacggcacatgtctatatgctgcagaaatccttccaggaccttctgaggaaacaggttggggatcggtctgtgtgggaatacccctttgctgtcgctggtatcaacttaacattcatgctcatccaaatgcttgaccttgaagcaggtatacagccacatgaatttacttacctaccatgattcatgattgtgatagttgctattgacatctggagtcataggattgggaagcacataactactatagaatcttcttgcatgcattaggcagatgtctcatattgttcatagtctgtcattctgatgtatatacttttaaaatgtacagtgaaaccgcgaacaattgttggggcaacttttctgaaatttctttctggtaatctctcacacaatgctgtggtcttatcataatgaaaagcctttttccacacatggtgcttcaattagatgtggacactgatttagataaatgtattgggtatttgtgtaagcagagaacgaatctgcatttgaccttctttattgcattgcattcaagctaatggatcagcaatggctttcaatgcgtgcctcatacatggagtttaacgtaagtaatagtcgttacaaagcattgacattagtttggtcatttacatacatacatgcgatgctgatgctttgtcttggaatatattggatgacatagacggtgatgaaatcaacaaggagacagctggagagagagctgatgctggaagacataatgcatcttgaggacttaccctcctacgctcttctcaatcaatagcccttatgatgatattaaatagtaagaagagtttctaacctcaggataacacaaggttgctctactctctctctctcttcacttttcatcttcaacgctttcggttctacctcttcgttgaccttttcttgtgtttggtggttctaagaaacaacttcaacaccgagttgttacttgttatattaaaacaagaaaaagagtgtgagagagacggggagaggttgggataaatctcaatttggttgcaaggagtgtgtagctaaaatggaattgttttctaacaacgttcaggttttttagttactgtgtgggtgattgatcttattgtgtggggataataatcatttggtgatgtccacaagttcaaaagcagtctctgttaaagactctacacgaggttaaaacttcatttgtttgtgtattaaaaaaaagaagttactttgattgtttatagctgtgaaaattctgcgtgaataatagagacggccttcacaagcagtcacgagttattctacagcaacaaaataattattagatctacaaagccctactacaatcaacacgcttatactatagtctagattcttacactctggctaattgttaatttgatgtatcagaaaactgattagcgctctcactaatctgttattaaattcagttaagcacaataatcatgtcgaatacgaagggctgatcagtggctcacacatcaattcacacacaccttgataatccatacattgcaagccaacaccaacgacatcccgaccaccagtccaccacgtagcttattactattagtccgcttgatgcatcatttgatggcgtagttgaccctgaatcagcttcgtgtgttccatcagacggctgcgagtctggggtggaggagagaaaggagaggctacgaccgtaatgtcaccaagacagtgaccgggtgtaggacagatgaaatagtttggtcctactgtcgtcagatcaactttggtgtctccatcggaatggttctctgtcgcggatgagccgtctccattcatatgtggctttgtcaaccacattcacatccaccgtacttgaactctgtttcaaagattaacattagccacttacctaaaacgaaacagagttttcttgtacgataagttataataccaaccctgaaagtctttcccgcaacccaatctgtgtagtccacgcaattggcccattgattagcctctaattaagtcatagagactgcaggcctgcagatgggcctgggtcgatagcaatgaagcccataacaaggaaaagaccattcgttgccatcttgaggtttaaacgtggagagctattttaaattaaagatgtgaagaggaggaaataatggtaacggtgatggtttatataacaaagaggcatgagaacgactaatgagaaattaagcttaattaagggaatgtctgaaaagtcccctcttcttaattatttttgagttatgtccgtaaaggacactcctgattagggtcaaattccattggcattgctcatgtgttattgacaaggtactcatggtcatgggtcaaataaaaagtctttgacaatactatttataagaaaattagagaaacttatcttcatattatcatatataacttaagttctatcatatctaaagggtagttaagtttgcgtcaatataaggttttgactcttatggagagatgagttcggtccagaattcttcaaatatataaccaatctaaataaaaaatataagataagagtttttaatttaaaagctaggtacagctaatcgaatactacctatcccaagttgcatttgtttatgtgatcgtttaaaccatagcaacaactagagtttgaacacattgctagaaatcatttctttcaggaattgatcatatctcttagttgttgttgtacgtgattcattcttgataacatactatatatgtaaaatacgaagggatggtgtggaaaacaactgtacatgtgattccaaaaccgataaattaaaaacgaatatgaagaagagaacagatgataattacgaacgatggagtggttccacatgaacgaaaatgaaaattaatagtataatttattacaacaagagaataagtgaatgtgatgatgatgatgataacgataatcaaatgccgagataataaaaatcctacgaataatgaagagcttctgacgtggcacacaaacccaaattctcttacaaccaaaaaccaaaataatttaaaaaggcaaaagcactgactccaccctggctctctaaaccaattacatccacaaaccataacccaaaaccatcgagactcccaccaaaacgtaactcatcactcccttagacgcaccacttgcctttggtggaggaggaggagaagttgaacctgcaccaggtgtgggtgtggtgggtgtgggtgatccgccagacggaggtgattccggtgtggtaggagttcccggagttgaagaaggtggcgtgggagtggccggaggtccggcagaaccggctacgacattaacggctagcttcatgccgccattggttctgcagtgaccaggtgtagaacagatgaaatagtttattcctacagtcttaagatcgattttggtgtctccatcggaatggttctcagtcgaggaggaggcgtcgcagccatcatatccggctttgtcaaccacatccaccgtgtgggaagaaccatacttgaactctgtttcatatccccataaataaataaattaaaacctaagtaaagagttctccatacctaggaagattataagacaagagtcccaaattatctggttaccaaatctgagatttcttgtagaataagttatctcaatttcaacatggtagaaatttataaagaagtaaaacaagcaaatcaaaaaattgtttcttcttctttctttttactgtttctaactttctatatttaagaacctgagaccaaataaacaaaaaaaaaatcacacatttttttttttttggtattacgtactaaagcaaacttaatttaatttgaaccaccgaaaccaatattaaactacacttgggttagattaggttactacactttttgatgtatagcttgaatctatctgaaaattataaaagttataagtaatgtggttcggatgatgatttacctagaatgtcaccaaccctgaaagtctttccggtagcccaacctgagtagtccacaccagtggtccattcaatagtgtaagtcacagctactgcgcccgggacaatggtcagaactaggagaagagcagttgcggcggctacagccatcttggacaaaccattcattgccattttttgtttactgtagaagagagatattcttgtaaagattgtgaagagaagaaatggttatggtgtcattatataacaaagagatgtgagaaggactttaggaattaagtaaatggaatgtatgaaaaagtcgccgcctcgccaactcattcaacaacttcatcctcactttttatttttcgttttacttttttattcatttcttttgttttctaagacattgtcatgatgcgtaacaactctttgttcttatacattcaaactaaaaaaaaaaagaatggataattaatcgaatagttcgatggctttctttgctgtgaattatataaacccattatccttatgagtggcttcttcctatttgggtttttatgtttttctacgtaaaagtgtgctgagaacatgggtttgttaatatcactataatataagtatgatgcaaataatgtataattgtataactattgcattacttaatgaacatgttatagattctgcaggtgccaagattccttaaatttgtagcaaaagatcagctaaaatttcaatatttttctgaaacgcagttatttttaatgcctttaaaacagagtatttgaagtgtagattttaagctataagtttccttgaagaatttcagaaaaaaacaatcttaaaattttacacgggtgtatcacaacaattgtttatgtattaatacaaattgttttaaaatcttttgagttcatatagtattttctcacgcaaaaacaatctttatttcctatatcgtattttatgaaggttttgtgtggattgagtttgtacgtttgaacaagactttatcaataggactccttaattttaagattatctgttgaatcgcaaaaactatatgaaagcgttaatgtacaaaaatctcattattgtatcaatggaactttgtttaattagcaaggtgttgaccattgactaagttccttattcaaaagttttcagattggaaaaaatcgtcgaaggctttgggtcagaagtcgcacagaaaaaaaaaaagatgaacagagatattcgaaatgacattatattcaagctcttttagaaattaaaaaatgtaataaaattggggattaggtaatatgataatagtaggaagatgcctaacacgttctaaggccattctaatatatattttgtcaatgatcaaagatgggtacagatgttaggtgaaacaaatctttacaatattagaaaatatgaatacatacggaaagaacaattttgataagtatttgatttataaaagtgaaatagtcaatgataaaacaaaaaccaaatagtataatcactaagtattacctatcaatttatttgaccaaaacaaaacatatttaggagatcggaagaaagaatttagagaggacttctaaaggcggtcttgagcgtgccatgttgatctttgattatcattatcgtgtcatcctcatccattggctaagaaaggaaaaaaaaactaagagattaggtatttttataaaaataaaagcttattttcactgtcatgatcaaatttgttattgtaattacaactacatataaattgaacatattgttctgtttaaccacgtttgcaaataattacttttctaaagtaattattttgtccagatccatgacattagtgttattgttaagctatgcacgtcaaatgacaaaatattcaaattgacccttaaacggcttcctagtactgttcactactgtacatgaaatgaaatgatactttggaaaagagaagtaaataaatattaacataggaaggaaggagctacatctctactatttttattttataagctaatcagagcattccatgtcataccccactctcacctctcgggcgatttcacaaccactctcaccaaacgcgtgttgagcgcgtgtatacgttttctgtgggttctaacccaccaaatggcttgttttgaaacacactcgcctctttcaaaaaaagcctcgagtgtgtgatttcagtgtttttctcctttaattccaattcaaacccaaccgaaatcaattgaatttttcaaaaccatgtaaaccgaaccgaaataaaaacacaaacgacaaactattaattgtcacttccactattgatccaactccgacgaaccagattgataattttgattcgattccacacagataacatatagtccaaaccaaatgcaattcacaagagagccaaattattactctatgttcgaagcttttttaacttgccacaaatcaatttacaaaataagaaattgtgctcagaaatttcagaagaattctcgatcataactttatgcggtggtggtggctgtgaatagccgacataagttgctacggtgggtctcataagaaattgattgtgcgaatcagtagcttattgggcttttgtattaggcccataaaatcgatcggccttgaataaaaggaaaatgatttttgttattaggccgagctttttccttgtgctctgcttttttgtgtcatgtttctttacttgctctgtttcgggtgatctgttttattttctttgctagctgaacataattctgattgttctccattgtattttcctatgtttatgtgaaagcaaagaaacattggaaaatcacattatgtgctcattgctcatacttcatcaacagattgtttatctatcgtctcttccgtttcgatctctgcgacttgtgagagcacaagagagaaaaatggagaaaaaaaaaaggaagaagatgagacaccactcataggcttattctgtctgaaaacatgtagaagaaaaacaacacttcacattgtcaagtcccaacttccaagcccgttacaataaaatttggcccattagttttcgacccaaacggaaaaagctggatttatccagcagccgacatggaagtgacactgcttaatattgagattagacacaaaaagaaacacttgatagagttctaattcaaatatggaacaattaaaaaaaattctctgtactactctcggtctctagtctccacaatctcttacgaaagaatgatgtcacactagttactctctcctccaacggtagaggaactctgtaaccttcgacaagaggaaaaaccaactcatagaccttgttgtagtacagatgcattttaacatgcatgttatttttccaattctcaacaaggattaaaaattacttatttattcatatgacatatataaactaaatgatacagcatccttattcagtgctggtccatgaatctcgaccgatattcatccttcataaatgacgtcaacacacagaaatatgttagtattttctttttttgccttaaaagtggaaaccaaaatatctttaaaccttttatgaaatggcggtaaatccagtacgttaccagtctgatctgatgaaaagacagttttgcccctgaccacgaattatttgaaacttttattagccctgtcatatggactactagaaagatgcaacttttaaagaagacgtatgtgtccattcacttttatatactaattcacatccacaatttgatctgtcacacttcatttattgtaaagatgctgcaggtggtttccaataccgtaagcaaactaggaaaaatataaaaatgttgactttacaaaattgggatatttatctttctagaagaaattttaacaagtatatatatacgctatgcatgttgccatactctttagtatagtagtactaaatacataaagagcaaacaaaaaaatatggaggaaacaaaaatgagtttgcttgatgattcttttacaagtgcaatgacacttaccaattcaggtgtgcctcaagtccctgatcgctacgttcttcctccttcgcaaaggccagctcttggttcaagcttaggcaccagcgagactacacttcctgtcattgatctctctcttttgcaccaacctttccttcgatccctcgcaatccacgagattagcatggcctgcaaggagtttggtttctttcaggtaaaataagtcatgctttatcacaaatccagcaagttttgtgtttatttcatgcaaattcagtccaagcgtttccatgcttagtcactagaactaactctggagtgaatttatcacatctaccaatcatacttcggggatctcttagaaagacggctattgtcttcttgcatttatttcataaggaataaagtccctgatcagggcaaacaacgaaagaaaagacaaaatcctcaatctcagtcttaaatgagaacacaaaatgcatgcatgcaatgttttctctactctgtacgactgtacagaactaagagataaaggccctaacttttacttccctacaggttataaaccatggaataccatcatcagtggttaacgatgccttagatgcagcaacacagttcttcgacttacctgtggaagagaagatgcttctggtgtctgcaaacgttcatgagccagtcaggtatggcacaagccttaaccattcaacagacagagttcactactggagagatttcatcaagcattactctcatccactctcaaagtggatcgatatgtggccatcaaatcctccatgctacaagtaagtaaaacatttttaggccagcttcactgtctcaatatatacaaaacctagctctcttttttaaaaagttgtaacaaagctttgagtgaaaactgatattattttctgattcacacctacctttcagggataaagtgggcaagtatgcagaggcaacacatttgctacacaagcagttaatagaagctatctcagaaagcctgggactggagaaaaattacttacaagaagagatagaagaaggctcacaagtcatggcagtgaattgttatccagcatgcccggaacctgaaatggccttgggaatgccaccacactcagacttcagctcactgaccatcttacttcagagtagcaagggactccagataatggactgcaacaaaaactgggtttgtgtgccgtatatagaaggagctttgatagttcagctgggagatcaggtagaggtgatgagcaacggcatatacaagagcgtcattcatcgtgtaacagtgaacaaagaagtcaaaaggctatcttttgcaagtcttcacagtctacctctgcacaagaaaataagtccagcaccaaaactcgtcaacccaaacaatgcaccagcctatggagagtttagtttcaacgattttctgaactacatctcaagcaacgattttatacaagaaagattcattgacacaataaagaaaagcagttcctaaagatgatgatgatgatggccaagaattcaacaaggcaattttcatggctcgtcttttgaattatggatattgtagtccttatgtgcatccctaatgtatctactctatgcaacaattatgaaaatgatcacaaaactgtttatatatcacataaaaagcttaatgtaatgtcataagattttcctttattatttttcccctaatgcctttctcattagtatctctgtttcttgagatattggtgcttctaaatcagccattgtttgtttaatcagtatcaaaatgtaagcttttggatttataagcactctagtagttcataatttgagcagtagcaacaaaagtgcttatatgaatcattaagagacctttattgaatcagctatacatcaatttgaaaatttgggataacaacaaagtagtcgcatttacatcaaatttgagacaaaataagcaaaattttcaacagtatattcgaattctcacaaagtagaaacaacgtgaatgctttaggagtccaattagaataaatccaaagtctatcgaatttctcaaagcatgggatcgatacttacatgaatcaacaaaatatcacaaagtatcctccggagactaatcaacgtcgggagtaattttcctttaaactctcaaactacggccttggcctctcgattccggcggcgacttctcgtcgcgaaggagctctgttttttttctagctgtctctgtttttttttttctattatccgggattatcgagcgttggttatttattttaaccgtagttactttgtcatttaccgtttgatttttttttttttggtcggctctctctttttacttagaaaaatcatataatttaactcgttcgtaagatattgttggaaaaaaatatataacgtgtagcataggtctttaaactgctgtcaccaaatcaaaagataaaacggaaattatttcaattaaagagattgttttgttgacgaagaagatattagagatgtcactatttattattaattcaatttacttgctaaacatgaatatattttacgaattttagtgtaatactttttgtaactctttttgaaactcatctatatattgcgtatatatttttttgaactttcctaaattttcttgaatattattataaatgaaattatacaaatacattttttttttaattatacaaatacatttcgactgatagtattcatcaaagtaatcagtaacctacgtacttaccaaacgctaagatattaacagcctgtttgcggttaaaaaaatggcttcgacatatatacaacatccttaagagaagaaaaaattacactcgacataattaataactactgtttatagaaacaaaattttggcagaaaaatatagacatagcgcaaaatgctaatgccaaataccaatgttagcaaattcaaaatttcacttttaaaataaatatttatcagacgaaacaaacaagaaatgtaaatggcaaagaatatttatacgtaggtttagatccttccttttttaaacgcagtttactacttcgaacaatatcagcaatacaatatgataaaatcaagcactttttcaaaatttggctgataccttatatatctatataacaatagctctgatcttgcaaaatttgttactacatgaaaatttattaattcccacacatcgtgtagtaagaaaacaaaaacaaacaaccaagcaaaaccaataacaaaaaacataattagctgttaagtttcattctcacaaatcagtttttcggcaaagactagtataaatacaagaggattcataaactaaaacatctaccatgagagaaaaattaaaacaattgaaatatgagttccaaattccgaaaacaaacccttaaaatccttgcatttaaattcacactcaatctaaaacaaaactcttgtgttcttcactttgcaaaccattaaaataattataacttaaaatcattttggtgtaaaaaggatcatatatttagattcaaaaaaaaaaaggatcatatatttatgaacagaattttttttttaaaacaatttaaaaacgaacaaatcaatgaatcccaatgtacatattttttaaaaaaaaatcttggcaaaaaaatagccattgcgcaaactgcaaatgacatatcagagtttcattcttttttaatcaaccatttatttctctaaatttggcttaccttggtataagactagctctgatcacttggtcttgcaatgtaaactacatgcaaaattattaattcacacacgtacgggtgtagtaaggacagaaaagaaacaaaaaaaattaaagatagttatctgtacattgcgtactcaaattcagagtaaaataaataaaggacgattaaactaaaaaatttggataagagtgaaaaaaaataaaattaaaatctttagttccaaattacgcaagagaaaaagaataaaaacccttaaactccttgaattttaaatttgctaaaacaaaactattgctttttttcactttgcaaaacataaatatcacattgtatagaacataaaatcataatggcgtaaaaaagatcatatataaacgaaggaacattaaaagaaaaaacaaatcaataggatgaagtttgttgaagctaagatgcgaaatctccagctcggaattgaatatatatctgcatttgagcaagagtagtgtctaagtacgtacgtacctacatgcattcggtgtatataaatatatatactagtcttgatcatccattttcaagatatatgaataatttataagtgcaaggaaatcagcaggcgagcatgaaactatctcggtttcaacggcgcatagtacacaagttgaacaaaatcagctcttgttatataattagtataaaatataaatacatgaatgcgttttggcaacattatgcgtcattccaccaatagagttgttataagcatacaaggtcaacaaaatattttaaagactttttcagttttttgtattcatatgtttttatttatagtttagcccatttgccacgggaaatctggttccatacttgcatggtatattttatgatattacacacaaaaccggataaagattttacaacttgtttcgcttttatttaatatttttgtttgtttctttacataggaaatataactctaattgaactactttacataactattaatacatcctacttcgcgttttaaattgttaatgctatatacaaagaaccaaccaaaggcggttcgaggggagacgtaagagacagtacaagtttcgtctattttggtaaagaaaatcatatatacacagtttttgtcgctttgtagacactagacagaactttataacatgcaaaagtgagtatttaatgtatttgacacaggcaccgtatatagtagattctatttattttgttatgttttagaatcttcccaaaacaggaaacaacgtacgatacgatagttttgcgaataccactgtcctgaggcaagtacactggtcatactggtcatatttaattactttaacatatacggagtatcataagtaaaagttagcaatacatggtcagagaatattaatactcgtagcgatcaaatcctttgaactctgctttatttcagagctcctaaaagtatatccttatccactctgtttcatgcatgacgagaagcgttatttgacacaagacaatgcgccaattttattttattttttttctttgtataagcaaaggattttagcctaattttacactgatcttttgaaatatgcatgtgaaaaaatcaaattatattattacaacgtttatgatgatgaaacgtaataaataaattgaaaggaatcaaactctaatataaactcttcaaatagatttcaatgacttttcagcaaaaataaattcttaataagggctatcatgttcatgcatgaaatgttccatacaagattaacggtttttggttttcattaactaaaagactcaatgtttatgaaaaagtgctaacaatattattagttgtcgacaaacgcttcaaatttgaatattaaatcgttggtggtcatcatgagatgtaccatgtagtttgttaattttgagatatatagcgttaactcgctttcacattttcgactcctatttgaaacaaaatcatatacgggtagacatatttatggttttagtcgagtaatttccgccgactattttaccccaaaattagacgagcattggttcagatctttttttagaaaaatgaaagctaaatattagttctacacttttgtatctagttcatggttcatgatatcgtaatattcgtaaatatagtggcgcatcatgcaacgaatccaccgcttcttattaatgaacttttaatccaccgtttgttacaattttaaagagtaatatattggtgcatacatggacattaatcaaatagccagctgttatgattcagttgggctaaacttaagaaagaaatgatcaagtgggctacaaataatcgatgggagcccaaaagcttgttcaccttttgttttcagaggggatccaattgatttctcactcgtaaatatccaagagagttgtatttaaaacaaaaacaaattaccaattcttttttttttgaaatataaaattcattaataaacaaagaaaatatacttacaagacgtttagacatttttgaacagaaaactgggccagtaaaagctggaaattttaagcaaaaacagagtattttagaaaaagagccaaaacaaaaaaaagagagctaaaggtcagctataagtgagagatcaaaagcaaattaccgattcaaaagaaagattatttcagttttgaacttgagtaaaccaagcataaagctgttttagtctatatcattcaatatggttttatctctcagtttgatcttcttattaggtcgaacttgtgatgaaaccctttagcttgttcataaacatatctgactgcagtatgtttgacaattgacatgacaacaaaatatgtctgttcacaataaaaatatgttccaaaggctggttatcttcgagggagcaacaagtgtgatatcaagtatgtttatttctgaatgtagcttcccaaggttatggaactgctcgggcttagatcttatcttaccaaagtagaatttcctcagagggttttggtgctggactggggtttatacttgttaatgattgtatatccactttctcactatcaaactttggctaagctaatatagacatcagtatttaaaaacatctgcttaaacttaaaaaaaaaataaaaataaaaaactataacctttatctcttctcatagtttcttgctaatttaactgctgattttaaaatcagttaaaacaaattcgatacaatgcgaaaccaatacgctcaaattctttgtttggtgattattgagtaatgagttatgagattgatttgtagtggacggtggctacattaattatatagaacaaaatagttctaattgaaaattaaaagtacgatttgaatgataattgatggactttggtcagatacaaaagacggctggatttggaccagctctgtagactgatgtggtcatatgattgcaatacttttttatttatttgattaaataataaattcacaaatgtgggactcgtacggatctgtggaaagtatatacatgtattagtatcaacatttttttatataataccatgctattgctatcaaatatataccattattccattctaatatttcatattttgatggcattagaatagtattttagtaataatgttgatactaatacaacgaaaactacgttgcacttttcaaaacatcttgattcaactagtcattgtcttcattttcatatcttttcttgcatttaatcaaattgtgaactggtttccatcatcaatcaagtaacatatcatcagcatttattacttaaaaatatattcacatataaggaaaatatttttgcaattaattggcattacaaaagaaagaaaaaaatatatcatgtaatcatttgagactaaaggaaataaaataaatatatactatatcaaaggcaataatttaagtggttggtgaaatgatatataaaaagaaaatagtcaacaagaaaaagaatatgaggaaagtggaaactttgtttttcaacaattcacctttgttgtttgtgtctacttgggaaaaactctattaagtattaaaacaatccaagaaacacagccccaaacgaacttttttaatgataattgttagatattcggttcaaagattttatacaaaacttgaaaacatatcttgcaagtttcttggcatagttcgttttgaatgtaaatgcatttttcattcgctgaagagtatcaatgattgataatatacgagggaagtgtaatgattagaaagctgtatatgtttttaggcttatttttaaaaggagagtaacatagaaaactacttaaaggcgactgactcacacaaaaaaaaaactaaattcatttttttttcaatcaaccatgttagtttgttagaaacttaagtttaggtcttagtttaacaaacgcacgaaatttcgataacattagatgttttagatattgttgtaccatttacaaaaactcctattattactttgtaaagtaaaatccaaaagaatcatttacaattaaaaaattccgaaaaattaaaacttgagatagtacaagagaactattgaggccaactgggacatggaagaagaagcttctttattacccaattaagtaaatatcccaaacaattccattttgcatgtaaacttaatgtcactattccctaaattaaattacacaaaattgcagtgtatgttatgatgattgtttgatactttattccctcctagatattatcttaaagatcaacctttgtgttgagtaatttcgttgtataggcttgtggaatatatacttcaattcttatcagaccatagagtcagatcatttccacgaatccttatagaaacatttagttatgaaataaaacacatccgaaataactagctattagatataagaaaaaatttaaaaatattattgctcatcacagattttggaaaaatatatattcatctaatcatgttaatagtcgccatatatatacgcacattattgttaaattgaacaatctttgtaaaattatgtttgttttgaatattcttataaacatagagaaaattgcatattatctgtttgtaatgaaacgtatatttattatatatagaccgatatacaataaagtagctagtaatagtattgaacaacaattgatcaccaaaagaaagttgttagctggcttctgatggtttaacggctcagttatgacttattcgagctgcaccagatactgttagcttgctttagtcgactttttttttttttttaacaaacaaatgaaaatagtcgttaagaaggacttcattgttagctactaacatacattcattcatttgggttatattatgcatgtagaaaactcatatgataaaatgtgccgaatcgagcctaacaaacaggggacatggcagtaaatatagttataaattttcttacaccctattacagagaaaggtgaattttgttttttttgtcacagtgaaatttgtttatatattgaaatatttatacatgcataaactataaactatagttataagtgtaattgtctctctttgccctttttctttatttcaagaatggtagcttaagtatataagttttacttgtaaataagttttggtagtatatagaagaatccgagtagaaaactcatactaagtactatagagcatgagaaataagaaattcataatgtagtttatcgtatgagttgactggatgatagataccataaatatattaagttaaaagattctactaaacgaagaccaactgcaaagctacgtatatatttatccactgcgtaaactaaactttttctctacatcgatctctcaatctttggtcggttcactttacaaatcataaatatataagagtcggtttagttctttacaaaaaatcaacatcgatcaaagttgatgtcatggctatcactccattcttctctgttggcctcctttaaaatttacctcttaattttcttttggtatggaaagaagaaatactctttaatgttttccgtaacaacgtggacaaatggtcccgaaagaagaaatggccaatgtaaatgatattgaaatagtcccatcggaaaaaagagtgaagaaattaaacattataaagaaccaattaatggcttttgtggtgtgtagtattgtgtccacaaatatatgaatggtcacgttggtttgatatatccaaaacgatgacatttaaatcggggaatgtaagtaaagtacgtgtcataaccaatagttctaaagtggtgcatgcaatttttgtttattacaaaacaagaaatttgttcccaatcgattggaacaccaaatcactttaattgcttaagcactttgatcgtattcctaacgaagacattttccacgcgttccatgtgcatctcctcctcagtatctatggtttatcgtgtaaattaaaactcctttcttcaagttagttcatagtctacataattctttttactgcatataacatataatattctgtaagatatcaagaatctaaaagtgtttttattactagtgtcccacgtgggtaacatttgaaatgcattcaaacgatgtgataatgtgaaatgcttaaaagtatatagagttaaaacagtctttcagaaatcacgatggttatcaatacaatataaagaaaatattgcaaaacagctaagactctaataggatttataaatgaaaagaggctatatgttattaaaaagcacaagactaatatataaagagctacgacatgtgatgtgaaattcaaatagtaagtaactcacgttgcacttcttttattcgtcgttttgcccgaacaacacatcactccaacttatttaattggacttattctgttacccgcgatataggctagcaagataaatttcatcgcgacatttcatatcttgatcattctgccttattcaatggattcattcaaccattctctgctcatttggatatgatcatttacacttacattttatatttagattctaagtcgataactaattttaagattgttatatgttgcttttatacgtagacataaaacttgtcgttaattgtataaaaacaatatgctagaagcctagaagggcgtgggaatataggaggtgtatacttcgtactttccttgagcattcaaattcagcaattggcggcgaatggctaaagccgaaagtaccaaatccagccgatatgagccgagtcgagctggtgatagttcctcacgtgtcaaagcctttctgagccgtattgtttgagaactcccacgtgtccagtcccatcgaaaacgacggtcagatatttatttcgatacacacttctttctcttctcatatcatctcagccgtccatttctcttagtctcattatcatacatttacttcttctttttttttttggtcaccaattcggttaaatccttttttttttgtaaatataagtcacattaaaaaagagagtaaaaacgtgatgtcaaaaacacaactaataacgtagaatccattcatgatcccaaatattgatttcacattgtctttatggtccatgttagttaagtaaaagaaagaaagagcaaacatagcttatgtgtaccacataatcatttatatagtattgaaactttgtcaaagattgtactcattcttcatagaataaaatatacaaacccagctattgttagctttctaatttggtacatttattgcttttacatacacgaaaactacttgaaatcctacatacacaaacgagtaccaatgtgtgtatttgggtattagatataaattcatatacttatataagcactgtccacaattttcagagtcgagtcctttcattttcaacaatctctttaactccactatagatcccaacttttctcactataaaaggaacccatttcctctttccttcaatcactttatcttcttacaccaaatctatcttcaagacttcaacatactccattctctatatacaacctttttaagaaaactttgattaatcagatcaaatatttataaattaaaacacacacacactttctcaacaatgagattctctctttctcccgtacgtccgcatagtgtagtagtaccttcactaccaaaacaggacgtcgtttcttatataagtggtacgacgtcgaatcgtcaatgtcgatgtgtacttacacttccttctccttcagtttccacttcccgaccaccggttttacccaaaccggaaacctgggagagtttgctgctaaaccatgatcaaattccaggcgaattctcacccactggttcgagtatcccggttaagcttggccggagatggatggagtatcaggggcttcaaaattgggacggtcttttagacccattggacgacaatctccggcgagagattctccggtacggtcaatttgtcgaatcggcttatcaagcatttgatttcgatccttcctctccaacctacgggacatgccggtttccgaggagcacgttgttagagcgatccggtttacccaactccggttatcgactaacgaagaaccttcgtgccacgtcaggtattaacttgccacgttggattgagaaagcgccaagctggatggctacacaatctagctggattggttacgtggcagtttgccaggacaaagaagagatctcgcggcttgggcgtagagacgtcgtcatctccttccgtggaaccgccacgtgtctcgagtggttagagaaccttcgcgccacgctgactcatctccctaatgggcctactggagcaaatctaaacgggtctaactctgggcccatggttgagagcgggtttttaagcttgtatacttcaggtgttcacagtttgagagacatggtaagagaagagatcgcaaggctactccaatcttacggcgacgagccgttaagtgtaacgataaccggtcacagcctcggcgctgcgatcgcgacactagcagcttacgatatcaaaacgacgtttaaacgtgcgcctatggttaccgtaatatctttcggaggtccacgtgtcggaaacagatgctttcggaaactccttgagaagcaaggcacgaaggttctaagaatcgtgaactccgacgacgtcatcaccaaagttcctggagttgttttagaaaacagagagcaagataacgttaagatgacagcgtcgataatgccgagctggatacagagacgcgtggaggagacgccgtgggtttacgctgaaatcggtaaggagcttcggctgagtagccgtgactcgccgcacttgagcagcatcaatgtggccacgtgtcatgagctgaaaacgtatttacatttggtagacgggtttgtgagctccacgtgtccattcagagaaacagctcggagagttctccatagatgaagattcattgatccgacattcgtaactaatttaattttgtgcaaagaaacactaaaccgggaagaaaatcaagaaccgcgtaacggtttgattcggttaacaaatcaatttcgtgacatatctctaacttagcggtagaattagaaaagaaagtaaagtagaagacagctctaaagggcgaaaaatgaaaaatgtattgaagctcgtataatctcaaattgtttatatactgtatagtgtttttaaaaaaaattgccggtaattatgaaaatgtggtcataaatcataaaattttgtcgcacgagcatgtgctactaaaactcctaaaggcgtaaattgtcttaacttggacagaaaaggaagtgaaaagacaaaaatgtccctatctccgtccaaatatgagaaatgggaatgccccaatgatggtgccacgtaagcaccgaccgttcgaagaagttgactggatctctgtacttggcaaaaaagcttaaaagattcagttgcttgcaaaatctgaatgcccaatgagaacacgcatcatgcgccgtccatttatttaccgtatagtatttactttcctcgttaccaggaaaattcaccatcaacgcgttattttgtgggtgtgtcatgtctgtgttgttttaaaactctccataaaagttggttttatgttaacgtactactaagaaagaccataaaataatggccaagaaatgggatatatgattctcgtgataatgcgttattctatgagtaatataaagcaaactagtgttcagttccatgtgtattaatataaaagtatcatgttgtataagtaaatagaatatttcaaaataattataatatttctatatgtatgctaaacataattacatggttcattggcgtagagaaaataacattttatcatgttttgtatatatcttaatgcataacacattctcacttagaactatctattatctatttatttttattttataatattgtgtttttcatttaatataaaaaattcagacaatgatatatactcaaaataatctttcaaaaacacataaaattatcatcgaacaggaagggtaaataatagaagatcttttttgtttgtgtgtgggttaaatatatgacggactctaagcatatgattatgtagtcattgaaattagatatagttttcaatttttcatatagtcgttccttcttttctcaaaaagaaaccacttaactgagaagtgcacgaaaacggtcagcatcactgtttttgcggtgacttgaaagggagaatatatcgcatgcaaagatccaagccgtatacgtacatatacaggcacgtcgtagtctcaaatatatatgcacaaaagtgaatagatcgcataccgacccatacctaaaatgctagctttgaagctatacatagctttagaaagtgaccatcatcgtcatcgttacttgttactttgttagacccacaccattcctcgtccaaaaatctatcaaatatggagaccgccacatattttagattattaagcttatattgaagggttttatatttctttcttgcgtacatttctctttcgttttctctaatgatttaagttagattagagaggtcaataacgtatgcagttaaccttttccatttcccgttattgtggaaacctcagtttgactacatactccgaccactttttagtgatatttaacacaaaaagaacttttgaaaaactaatttatcggtgtgactttttttgttcgcttgtgcatttttttccaacactggtccataagtttaccatgtaacatatattagtatttagagttagtatatttctacaaatatgtgcacagctagctagcattacttggacccttaaaggtgacatgtattggatataggaaatcaggacccctttagcaaaaaaaaaaaaaagaaaaaaaaaagaaaatcaggaccatcttaaaactatttgttcctctctatataatggtttataatcataattaagatttaaagtacaaattatagttattaaaaaggttagttctcacagataataacagaaaatattttaagttaccaattttagcacataatatctaaagtttttaaaatactatgaatttaatatcaaaaatcttatataagtatttgatggacgctttacgcgataataatagaatcatgatttcaaattgtgattaattttttacgtaattcggtgaagataagtaattcttgtataaatttcactaatgttaattttaaaagtttatggaagatatgatataattgttcataaaacttgttataatgctattataagatatttttcttaaaaagacaagtaaattactttgttcgtcgaacacaaactaacttacgcttgatcaagctgtattctacaaaagttatacattattaatttatcattacaaaaattggaaaaaggttactttaacaattcaaaaatatatcgaaatccaaaaagatttatcaactccttttaaatttcacgttttacgtgaatcatgtgatataatcatatgcatacaaatgtcatctgagagatttcagccgacttttgaacaaggaccaaaacagcctacgccatgcggagaccacgaaaatagatattttattataaataaatggatttttttggacgtaatgaaacgagaagtggatcagaagattaattacataatcttttctatttataaatttaaactatttctttctaattcattaacaattttgatacatcaggacaatggtaacttatgttactataagacaatggtaatatctcaatagaagtttttttttgtaaaatcgcaatatatacatgaattaataatgacatatgatggtcatttggacataatataaaaatataaatatttggcaaaataaataagtaaatgaaggggagaggaatgtgtgagtgtgtgtgggtgtggatgcctttatgcctcctacatctcaacattgagcaaaattgcggctgcccaacaaccacccaaaagagaattagtcaaaattattaaaatcaatgcatgtcctaatctctctcacccaactctcaccttcatttcaactcccatgcatctttttggtcaattaatttattaatattataaatatattttttcaatgaattttgaaaagactgtgttgcatattaaaataatgcgttgtactattaagagtcaaattagaaaatgtacttttaactccaaattaatttacaacatcttagattatgttattttttttttttcaagtcttcacgtacgtggtgtggtttggagtaacgcgaagttggtccaaaagcagagagactctttatattaaaactagaaaactattaagaagacgcaatagtattatgcacgttcacatttcttggtattcttttacattttgttgtttctctggtcataaactaaattgactaattagccatcaatcattttttcttcagtgtttttttcaacaatggacttttgttataaaactatctgtttagtggttgttgctcgattttatccaattctgtcacagaactgagaaataacattaaagtaaataatcttctatactgaaccggtaagatataaaaatttatcaattttatccaattaacatcgaagtcccacgacgtatggtgtgaacagtataagataaaattaaatacttttagaggtagtcgtacgtgagtacgtgtataagacaacacagctgataactccccaatttccgaccaatgcattgtacagtattatgtattcattcgtgtgtgtacttttccccataaaataaacgatttagatttaactatataagaatagaaagactagagaaaaaataagagaagaataagaccaatgcaatgtatcatgagttgtccatttatttccccatccaaaattcacgtatattctttacacacaaaaaaaaataaaaaaaattcagttacattagtttatgtaatttttttaataaatactgtatattattaagaaaaagcttttaaaacgagagagctaaatcattgtaaaacgttttagttttggataccaatgtgttagtaaaaagcccaccaagcccaatagattttatttttgccaaaaaaaaaatcaaagaagaacgaagccttccttctccgccgtaacctccgccagtgaaaccctaaactcctctttccgatatttcactgttcatcaatcgctctgcgtcactcttcctagcaagctcctttaattttcctctcaatccaatcgtgattttgcatacccatcaggtttcaggttagtacgtagtcttaggagaaattaggtaatcagatcgatatcgctatttgttcatacctagattagtcagaatctgtaatcgaaattcgattaggatggtgtagttcaacgaattcatagatacagaatcacttcttcgtagttatggaaagctctttgtttaaaacctcttccgatttttgtatcagaaaaactgaaataatggtgtataagcgcaagtcaatggagaagaaaaaggaaggcatgggttctactattgatcaaaacctgagctttaagaatattatgaaagatgttgcactctttggtaaacactctcttcatttgttcgccattctatttggataatgcaagtttttatgtactcttcagctgaacatgttgttttattaaggttcttcgcatatgacatggaaggataagaaagcactggaggataagaaagtgactgcacttggtggaaaggtaaggtttttgcagtgatcgatatcttttctcggtcaagcgggttggttcgtgaggtttctttgttgttattgcaggcacaaaagatgcataggctaccgctgagtgtagctcgagtgcagatgaagaaacagaaagatagagaagagaagatgttagaacaggtgactattttaggttatgaacaactctgttcttttgatccgttgcaacggctagttttctcatgtattatattggcagaatgtgattcttggcagatttggtgggggtggaagtagcagtaggaaacccgcagagagaaagcgtacgccagaagagagagtattgaagtcaactggagggattttcaaaggcggtgttcttgatgttaagcatttgctacgttctggtccttcaagtagtagtgacagagatttcaagacgaagaaacccagtagggtcgagaagaacttgggaggaggaggtgatggaggaggcatcaagtctaagggaaaaaagaaaggaggcaaaaataagaataaaggaaagaagaaaggaggtggcaagaagagaggcaagtaatcgcggtagctctgtaacaagttttgaagcgtttcaagtatcattgtatacttcacaaggattactcttggaattcaacattacagtgaaagagctatgagttttgttacaaacatgaaatgttctttcggcagtatcctctcttaggacgagtctgttacaggtattgatcttgttatgattgtttttatcttctttaagagtattgtagaaatacagactcttagattgttatatgtgcaacttatgagtaaacattaatcacatactacaaaactatatcatgtgttttcagtcaacggaccaattcattcttcagacaatatgttaaatatttctagacatagtaatactttattaatgtagtcaagatccagataaatgcaagttcgtttactaggaaattgatttcttggataccagactaatatttttgatgataatttcaatttgaaattgtataacttttaagctttacttgtactataagagtatgaaatgattgtggactttgaccgagtatcaaaagaaaaagcgtgggtggatatctctctactagatcctaaattcctaataattagtttttgatttcccccaattctctaaactaaaagagtcctaaaaagctttgcgagttaggccacaaaagcgagaaatcatatgtttttactcggttatttaaattttcacgtcaataacgtttttgaatccttacttttttggccggaaaggcgattgaaaaagattatgctaattatacaaaaaaaatcccgccgtttttttatttgggcttctcatccacatatcttacatcaaatgattatagatagctgaagttgaaagtcgtggattagtactcaactattggtctccatccgaataggaatttgttttccatgaaatgatgtgatattaagtgctttatgttagtagtgccaaaaatacattgaattgatggatgattacaacactttacttcctagctggaatctggacccatttaggcttttcttttgcggcttcgccgtccaattctttccaccttgtacgtgtccctaaatcgtgacttgttgacaaattagggtggtgaagctctagtcactattagtacatgtctagttgtctacctcaaaactcgattacatatgtgtaaagtagttaatgacacttacatactagtcactagagaaggttaagtcttatattcgagcttctttgtattcatattaccggccacaacgtcaataactggtaaaccaactactagaaaagtagaaatgtataatctttgcaaacctaactgatttttaaaaaataattttttttgacaagagtgtgaatggttccagaatgcacaaagaaaaattacgggcctaaattatatatgggcttggtctagatcgggaatgaatttaatacttgggccactttaaatcccattacctgtcaagttctatttacatttagatgttctggatctgtaatctttttggtcagcaatttttacagatagtgttgaccttagttctttcgataagaaagcgattggtaaaaaacttacgtttacaaaactgtctgcatgcactataaaatatgagatttgcagttagccaaattccacaattttaattcattttaaactagtcatagactcatagtattagaccaataaaaccagacttattgaactaaatggagaaatattctgaaaatgaaaataatgatgtcagtgaggaggaaagaataaagcataatgtgatgagaatggaatcagaagagagtccaaaatttaagaattgtgtgttgctttatccctttgtactgtttcgatacgtctatatattttgtgttcgaagtttcaaacccttctttatttttcttctccttagtgcttttggaaaaagagaaggctcagattcaagccccacctataaagataccatatagttagcaccccacattcacacccattaattccacattgtatccaactaatacacccacataaaatttaatatcaataatcattacctacgggattggtattttgtatatggtttgccatttgaaaaagacacttacagaatttggtaactatgatataacttcaaacgaatattgatatcattaatcaatggttgacaaaaaaaaaaagattatgattaaataatagtcatacaaaactgcatgcgttttaaaatctttctataaatgcattcacatttcagctcaacaaccttaaaaaatttatgtctaaagattgatgattctaaagaaaccatcatttctagttttgtacatagatttacttagaaccaatgaacttaaaaaagatggctagttatatcaaaattacgttcacaactaattacaattaatctttaatagtattacataggagttacattttgaataaactcatgggaatattttttttctccatgaacattgtcagagacaagatttgtcttaagagttagaactacaggatttgatcgatactatatatatttctaaggacactaaaattcgtcttaagcgattccaaaaacaagaaaatgagaaaggaaagtaaaaaaaaaagggacgagacactgcatgtgttttggaccgtttggttagagtgataaaagataaatctgtcccaaacatagatcccctcaatccacgcgcagtctcacctgatccgtattcaccaattcaccctcgtctcgaaagccttatttccgtctatgaaggttatttccgtctattttccgacaactatctctgttgcttataatctttgttttcctttgttcttttgctcggagaattttcaacttcattatagttagtgaagatttttatacattattagcagtgtttaatcttcccaaaattctaatataaaattatcgtcgcagcttttatttactttacagacaaataaagtatcactcacgaagcccaccatgattagagcgtcgaggtccaacattgttttcttaatcaaactatactattcttattgctgaaattaagacaaatattatactatgaattaatacaattttttttttatgactcgcaaaacactgtgtccactaatcattgctttcaagcacataatgtaaactgttcctatataattattggcataaaaagagagcagacaaattagtggaattggagagacaagattaattaaacaagtgatcttatcttttcaagaaactcaattcattgccatatgtgtcattgtatcaatacacttctccctaaatgattcgtttgataaaaatttataactttatcaccaagtctatattcattttaaaacccatgcaactctcatcataatgaattc

SEQ ID NO: 376 - DNA, 85534 bp, Arabidopsis thaliana
aagcttcttacctttcatgggttgagaaattgaaggaagctgcacgatcaagcaaggatgaaaaaattattgagttgggaaatagaaagaacttatctgaggaaagaaatctgagaattgaggctgccaggaaaaaggcagaagagaagaagttagccacgtggggagcacacggttatcagtctttgtccgtggaagaaccgattttgcctgatgatgttgattccagctcagatgcaggatctgttaactttgtctttggagactgtacaaatccatcaactgtctctcatgagccagcaatcatattcaggtaaaacttcatttcaattgttcatctaaaaaccaaacctctaaaacttccaaatattgattttatggcagctgtgttgatgactctggaaactggggacgtggtggaatgtttgatgctctgtcaaaactgtctaatactgtacccactgcttatcaccgagcatccgagtttaaagaccttcatcttggagacctgcatctcataaaaattgatggtctgcaactttttttttttctatcttcctttcattttctaacaacatcaaagagttctcatgtattttgtgttgtgtagacaatgatgaccaacaaaacacacaagcaagcaagcctctttgggtggcagttgcagttacacaatcttacaattcgaggcgtaaagtcccacgtagtagcatttcaattccagaccttgaaagttgcttagccaaagcttcattctctgcttctcagaaatcaggtacgaacttaattactttctttctttaaagtttcatcatatttggaattataaacaaaagtgctcccaaagagcttaacacttgtgttgtcatttctggtatggtaatgttctctcctcaaaaagcctcactccacatgccacgtattggttaccaagacggatcagaccgatctcaatggtacactgttgagcgtcttcttcgaaaatactcctccatcttcaccgtcaaaatattcgtgtaagtttatatgtgtcgcccgtcttctttcttttgaataatccaaagcaaactcatttttgttgctttcttgtaggtactattatcgtcgatctccctgaatcacacaatgggatagtctttttgacgctgtaatataatttgcttttggttgtacatgtaacggtgtcgtttgtatgtagaaggaagacttgtaattgggcccagtagtggcccatattaatgtataattaaataatagcctaatcttataattcaatcttgatcactgagccaatttacacgtgttgcgtctctagtgcctctggttccacgttggtcgtcaaaattgaaatcgcgtttctattttcttcacgaggtttcttttccccgcggcttaggacaatatgatccgaatcgttgaagaaactgtctccttgtgtctatgtttcgttttgatcccacattcctaaagctccaggtaccttttctacgtttcccgaattctgattagttgattcttcttcctcaatccgttcttcccaaacttgttgccgatttttggatccggtcatcaactttgttgtttatttgtcatcaatgcaaaaattgagagcgtctgtgttttcacttgcatgttatcaattcctaatgttgtttgccgtttcattaaccggattcgagactcttcccgctggatttctttttttcacgtcttcttttctattttttatggatttggtattttgacatgttaagcaaccttcgttaatcagtttaaaatcggtgctttccgaaatttttagaagaaacatggaagcttaaaattttgaaattgctatttggaaaagctatcatttcataggcttagtctttgtaattcttctttacttgttgttcattggcatgaatatatgaaggattttatatttgattgtgtgtttgtttatgttgttagaaattgatcaaaatgggagaagctggtcaatccagagacggagaatctgtcacgcctcttgttgtaagtattgtggcttccttttctcactttttagataatactttcagaaactatacttgctttatgctctcatcttaatggaattctgtttggagtcaacttaacgttctcttggtttctatatcaacggaaacatataagttgattaaaatggggttaaagaggatattcgtaatttttggttctttatgcattgagactaccattctaatatcagtaatttttccatggccagggcggtggtaatggggacaatgcggttgcaccacaagtgtttaattctttaccagctcttaatgaagctgcttcttatataactcaagcaacgtcttacttagggagctgtttttctgactattcaggtaccctttctttctatctgttgatgtcgtactcagtatgcaattccacgttcatatgctaggctttacttatggaaaatatgcttagcagatatttatggtgttaggatcttatcgtcaccgtaacataattcaggctttgcttagcatctgttctttcaatgctttcttcagtagaatatggtggcaaggatactatttcccacccccatgagttgttacgatcaacttccggagttgacgggaattccccagtgagtgtatgcatttcgcctggtgaaaggttttcaacttcttcagaggcatctacatctgatgccaacagcccgtcgagggaatctacagagattctgccacaggcaacaaatgcaatagtgacttcgaatcggttaaatttaaatggaatttcaatgttccaagggtacgtgtactttgtattacagatacaaattccccatactagtagatatgtaaaatcttaatactatgaatatgtgaaactgaagcaatacaataatctctatacactactacttcttgtcaagttttcagcatttgggtgattgatctattttaattcaatcaggctcattgagcgggcacggaggactgttcgtggctcggcagatgacataggatggttacagcgtgccccggagatgcctcctgttgaagatggaactgataggttcaataaaattctggaagacatcgggtatgaattggttgtagttgcatgttttgtgtgctttgtggccttttcaatatgctgtttaacatcctgttttttactaaatggctgcgttgatctggtttttatatccaggcatggtgtacacaggcttccaaatacagtggtgtacttattggttccaggtagcaattcttattctttgctgccagccacttaaactacattactgtatattaggactctcaaaattagttgaattttttttaggtcttttcagcaatcatggacctctatattttgtggatacgaaaacgaaattctcaaagatgggtttggcgtgtcatattgcgaagattcacagcgaggtaatcataactaactcaacttagtacagttacatttggtgtatagcatactaatatatggagaaatgtttatatatcagtcctcggttgagaaaaatgcgagagagataaaggaatacatagaggaactctgttggggatctaataagcgggttctacttcttgggcatagcaaaggaggcatagatgcagctgctgctttatcactatactggcctgaactaaaggataaggtcgctgggttggtactggcgcagagtccatatggtggaagcccaatagctacagatatcctccgtgaaggacaactaggtgattacgtcaatttgagaaagatgatggagattctaatctccaaagtcataaaggtttgcaacattcctgatctaacaaagtcatttcagttgcattatatcagcttcttgtgattgcctgttaaaatccttagttaggtggaaccgagaaactagggataaaccaaaacttattttgtttctggattctattgctctgctgatctttctgatgaattccttggaacattgtgaagggtgacattcaagcattggaagatttaacatacgagagaagaaaagaattcttgaagaatcatccgcttccccgagaactccccacggtttcattccgcacagaagctagcattagcccagcggttctatccactttatcacacgtagcacacgctgaacttcctctgacaaaccaagccgcaaaactgccagtggtaatgccacttggtgctgcaatggctgcttgcgctcagctacttcaagtcagatacggtgaaaagagtgacgggctagtgacttgctgtgacgcagaggttcctggttctgtggttgttagacccaaacgtaaactagaccatgcctggatggtgtactcttccttgaacgaggttcctttagaagctgatgctgctcaagtttgtgaagcgctcttaactttgcttgtccaagttgagcaagagaggcaacaaaaactcgcaacaaaaatcgattgataaaccaaattgttttatttctactttcgtcttgagacttcaaattactgtatttgtttctatctttttgttttatttcttactaatttactatcaggtttgaatcacacgataacaaaaaaattattacaaacggtagattttatatttataagactacttaatttgcttctttttttttcttttattgttgattaatttttattagaagattagttatgtttttctctctattcctttaacgaaccgtgatcgtgcggctcggatcgttggagattctatggacggccgatgcttatatactgtaagtggaatatgtaattcccgaaagtgccctccagatgttcacaaaattacgccatcgtactcgaattaacttcaactctctcttctctctctctttcttttcactcttgtttttgtttctgtgagtgctgtgtgtgttctcggtttgtaatatctaagtcgcacaaagatcagacaaagtctgtttgcgtttgatagcattagagtctgatcgaatttggaagacctgtgagattagggtttctttttgtttgtttttttttattccgaaggagagctgcggagcaattggaattacctcggttaaagcaatcacgtagctttggatcgtttagggttttctcattgggtttgggggatttgtattcgagcttcctcaaactcaatctgatggtgatgtgagacaaggcttaatcctgttaattggcgattctagggtttttcaatggcgagcacaggcgagcctgaccgtaaaaggcgtcactttagctccatatcaccttctgaagctgcagccgccgtaaagaaacagcctttcttttggccctcctccgaggacaaggtttctttcttcttcatctcccccttgtgcatgccctttacatctattctcttacttatccaatcaatcatagctttccagctattagagattcatatactgaatgtcttttgtctcgaatttggtctattttggaattgggattctctctcttaaggagtttgttttcgtttgatacagcttgatactgcagttcttcagttccaaaatcttaagctatcacaaaagctagaggctcagcaggttgagtgttctattcttgaggataaactctctcagatcaaggaaaaacaattaccatacaactccagtttgaagactgtccataagtcttgggaaaaggtaacactgaatttgctttcgattctaatagaacttggattagatctctttttctagagaactaattaatgcttgtatagcagcttacagcttcagtggaatcatgctctgttcgtgtgagtgattcaagcagcggagctcataggtttgtaaacaaggagggtatgaacaacttaagcccgccttttcttcgttctgttagtgctaggatctagtttagatttggttttatatgttacaaatatgactttttgaaaggttaactttaaattgctacacagatgggtcttctccagccgtgaaaaacgatttcatcaaccggctacttgaaactggtgctactgagagctcctcatccaatatctgctcgaatcagatggaagaaaatggagtgaatacgtcaagccagatgacgcaaaccttgtataatctagtagccgcgacagaggatttgaggtgtctgaaggatgaattatatcccacagttctcagaaccaatcttggtaaaggtatgacttccactgcgatcaattgtcagctcttgttatggcctttataacattttagtattaacccaggtcctatgtggaattgctttcttttctagatttgtgcggtcagctagctctgagtgagttggaatcagaaattaaaagtttcagaggggatctagatgatgtacttgtgaagttcaaatcactttctagagaattgcagagtcatcgcgatgctgatgctaaagttagagtagacctcaaacgaataagaggtagctacttagtctcgtctcactcgactatatactgttaaaatggattttttaattggcattgtttatatggatatagtattcatgcatcaaatgtaaatttgtaatcatatacgtggcttgacaaaaaaaggtcctatatacatgaaaagctactgaaatcatatctcgcttttgattgatgaggataagtgtaagtagaggtgatcaaattgtgaatcttccaattccacgcctgtgtatttatgtccagcactactcagttgtttaatagccatgattggatttagatcatagagattaagattgaagagagagatacattaagactggaagaaaacctctatggtagagccagctgttaagaagacatgtagctgtggaagatatactcattagcgaactgatgggtgtacaaaacccttctgagacatgaacttcttagttttcttttataccatttacccatatttatatatttcggtagattttaggagatagagaagctggtaattctttgagaatgacatacatccacataagtgaagcatcttaattttgttgataaattacccgtttaccttaagatgtaagatttcaatactgacagtagccacagttaagaaattcaaagagttaaaatttattttagtttacatgcctgcttttggattaatgcttcttgactaccgcatcaactgatattatactttatttggtctattcgaaggggagctagaggatgaggttgtggagcttcagcagtgtaatggtgacttgtcagcattgagagcagaaagggatgcaacagctggggcgtttttcccagtgttgagtcttggaaataagcttgctaccagtgatcgggagagggataaacaaagggatctgcaagacatggaaacagttctgaaagagttaacggtatctttgtttttctgatttgttttcattggtaattctttaagttttgggttgataacggcctggtttcggtaggtcctggcttcaggcaggctacaacagctaaaaaatcttcatgaggagaggacaaagatgcttggaaaaatgagtaatttacaggtcagtgtattgatccaattggggtatttgtattagtttgtctctgtatggggtttgatatatgaaaatttgtggaatggtagcctcttcctattgctaaaactgatgtaagagttttctaacagaacaagtcaaagtctgtgaggtgcatctcatcttctcaagcctgcctttctttgaaagaccagctagaaaaatccaaagaagcagttttccagtatatggctttacttgagaaactgcaggttatatctggtttgcgattttcattttgtatctatgtttataaaatttacgttgtatatttagttgtgaagctttcctccattcgaaaatttcaggttgaaaaagatagtatagtctggaaggaaagggagataaatataaaaaatgaactaggtgatgtttctcgaaagacgtctgctgttactgattctagaatggcttctttggattcggagatacagaaacaactggatgaaaaaatgcgaatcaagactaggctgggaaatatatcaagagagcgaggtcacaaattgattactttgacttccaattctgtatctcccacccacacctgtttcactttggagtctgattaagttattcgtatgtcaggtagaaaagaaatctttgcagatatgaaggcattaatttcttcgttccccgaggaaatgagttccatgcgtagtcaattaaacaattataaagagactgctggaggtattcattctctgcgggctgatgtccagtccctctctggggttctatgtaggaaggtgggaaataatgtgaacagtgattgatgcttattgttacagtttatgttatgcttacttaataagcttaattggtgaacagacaaaagagtatgaagcattgcaattgagatcagctgattatgcttctcagttaggtgacctgaatgctacggtatgatgcaatgtatctacctttttcagtgtactgcccatgacttatatatgttgacagtgttcatattggttattgttactttgcattatttcttggaaaaagtatagtgaaaaggcggattagcaatttaaatcttgttaaatgtctttggttggcaaagtggtagttgttatgttctttactttcaattgattggagtctgtcatgcaggtttgtgatttgaagaacagtcatgaggagttaaagttgtttctggacatgtataaacgtgagtccactgatgcgaggtaagcacaactatatataacgatatctaagatttcaattcttagagaaaagtttccttatcttccccttctcactgtccaaatatatagtataacaacaagtgctgttattaatcttgccttctgactgaactatcgaatcttgctgaaagtttgttgttaatttttcttgcgtttctgaagaaacttatgttcacattttcaatttatccatgacagcttttaatatctgatctatttttacagttccatctgataaaaactcttttggatgtgttaggatttgtttatcttcttatcttgactgaacacattattataatgcggttggtatattgccttaagcatcactgtcgataatgtgctatggcagggacatagctgaagccaaggaacaggagtacagggcttgggctcatgttcagagtttgaaatcatcccttgatgagcaaaatctggagttgcgcgttaaggcagcaaatgaagctgaagccgtttcccaacaaatgttggctgctgcggaagcagagattgctgatttaaggcagaaaatggatgattgtaaaaggtaaataagtataagtagaagtctgcaatttatagatgcaatcacgcagttcttccataggaattctttgagagttttttgtttgacaaggataagtcttttctgtttcagggatgtcgccaagcattctgatatcttgaaatctaaacatgaagaacatggaacatatctttctgaaatacaggttggcttatgaaatttcgtgtttctttgttcttaacatattttaaaaaccttgatgttgcgtatcgatttacagtaactatattcttttagacaattggaagtgcctatgaggacattgtaccgcaaaaccaacagcttttgcttcaagttacagagagggatgactataacatcaaggtatcgtgtccaaactcttctagttcctctatctgatctatctctgtgacttctcacttactcttatatctagtagtgttacatttattcagagattgatggatcgttttaatgggcatggaccaatttctgtggttataccttgtatgttttgctagaatatcatgaaaaaaaggatggtttgttacttggatcagacaatgagatgtaattttttgctcgcccattgttgtttcagcttttcttggaaggcataacttctaggcagatgcaagatactctgcttatcgataaatacatcatggataaggatatacagcaaggcagtgcatatgccagtttcctatccaagaaatcatcaagaattgaagatcaggtatatctgtgtgtgcccgtatgctcaaattgtaagcctccttattgtgagactttgactaaggtgtttttctttttccttgcagttgaggttctgcacagatcagtttcagaaactagcggaagataaatatcaaaagtctgtttctcttgaaaatctgcaaaagaaacgtgcagacatcgggaatggcttggaacaagctaggtcaaggctggaggagtcccattctaaagttgagcaaagtcggctggattatggggcattagaactggaactggagattgaaaggtaaatcaattgctccctccatcttctctatcctaattaatagtcataaacaagtgttagtgatgaaggtatcgttcttttctgcgtatatcaggttcaataggagaaggatagaggaggaaatggaaatagccaaaaagaaagtttctcgtcttcggtctctcatagaaggatcatcggccattcaaaagctccgacaagaactcagtgaatttaaagaaattctgaagtgtaaggcctgcaacgatcgcccaaaagaggtaaagagtcactgctctccattatttagatctcagcaagacgctcaaatcatgatcccttgaatcttttagtcaactgcgtgcgtgattgctgattggttttggtctttggcttaacaaactaggtggtgattacgaagtgctaccatttgttctgcaacccatgtgtgcaaaagctcacaggaactcgacaaaagaagtgtccaacatgctcagcaagttttggaccaaatgatattaaacctatctacatatgaccgcaccaaaacactctgagcatgatgatgtatgatgaaactgtgaaacacacacaggtactttttctcatataggataaacattagatctctctgtaattattactctcttttattgggaaaggtcatgaagaataattggatatggcaaatcagagtttttgaggaaccattttgggattttgataatgtgatagagaataggtaacactgttagggtttatgtctttggtgatacttcctttttgtttgtaatttggaacatggtttccgcaattgatttttcaattaaatcttcttttttgttctacatttgtgtatgatccaaacgtttgtgatgtagtgttctaagattctcaatttagaaaacacgaggcaagattttggatatttgtaccatttgcgatgaattgcaatccaatttgtttgttggcatctccaaagacttcgatccttgggatcatgattcgagatggtctttcacaatcctaggtaggaattacaagtatttttggtggatctccaatgaccttaaatattataagtgaatttagtactagtgtttctctctgtaactacggtttgtaaaagtgggttaaaaccaatagttgaaaatgtaagaaaaagactaaaatcatttcatgcattatcaattttgagctttaacatacaacttcggaatgtaccgtaaaagtattttagatggcctcaataccatgttttcccaataatacttgctcctttagccctttacatttcaagtattgcaagtgtttcctcttcccgcaagacatgatcattggtatttgccgcacatgttctttttctcttttctttcttttaaaaaaatggctgagaggtgaaaagaaagagttaatttatttgaacaatatgctcttaattattttcttcttcgtattgttattctcttctgctactgctttgagtttggtctttctaattgcttgctttttcttttcttggccactttattcccaaagataaagatcacatgttttagctccattctgcttctatctctcgggatctatatacatatacgtctgtatatcactaatttgattaaaatatcaaaagtgcagattgtggtagaaatatgttgtttgtgttacaaacaagaccattcattataaattataatagtaagaaattaaatacgtttcttatagtaaggaaattcatgactatattattatttaacaatgcaactatacataagaatcgttagcaaaatatttagtaataagttttccttgttcctattttttcgttgttatatttacgaacattttgacacattatctatatatattatacagtggtttttgtttttgtttttgaggtaaaactgtaaaagagaaagaaaatagcttaaaccaacaagaaataaaataaggtcacgcacataaataagtaaactaagaccaacaagaaaatagcttaatacactgtcaacctgcatttttctcttttaaaagcataatattgacgaaagaggaaaacaatcatacacttagtatcttaattacttttcctaaagcactacgactccattttcttcaattttatcttttttgtggaacttgattttttttttttaatacaactatacacatttcaaatctttttcattttactctatattttatttggtaacaacaacaaaaaaatctgatcttattagtctattatacttgttgaaattaattaccttgaaaatagtgtcacgggacaagatcaatttcgatccaaataattcgaatttatgataaaaattaagtttgtatactattttcaacattttcaatataattagctccctcttggtatacatagggttccttttcctttgcttttttgaattagatatattattggttttacacattgctagtaaaaaagaagagataatatatctatagttgtaccgtccaataatacggaaccagtggcaaatatcgtagtcttaagaatataaaatggactgattaagagtctgtccatagttaggtttgcatgccacaagatgccaaacaacaaattcaccttcttgtatcttgtcagtcaggtaatcgtccaaacaatccaggtacatacaaaatttaatcaatgctattttgattggtgaaacactaaaactgaaaccaaaactttttatggtttatcaaaaatatatttattagatgactcgctctttctttgaatatctattaatttgctacacttctaaattaaagttaaaactgttttaaaacgtatagtccgcgactacagttgcaaaaaagaaattcaagtcattgttatcttttttttttttaaatgcatgtcaggtaggaatattatatatatatatatatagtatataatcccatttcaataacactcagaagtttccaaaaaagaaacacaaatggtcgattaggaattgtggaggatacgtatgaacgtacctaacgttgtatacagaacgcgatataaataaagtaattgatcataggctgctataaattggagacttaaattgtctacatacattcaaagcttaaaatcatgagaaaatagaaaattaacccatcaattaattattattaccatgttttgagataatgatagtgagctcactcgtacacccactatgtttctatttaatgacctgtcttcaactatccctacgtctcaccaaatcaacatatatagtacatgtatattcgagtattacaaattttcaagggcaattataaacctaacctttttctcccttcgatataaaggtcgagttccaatctcaaaactaaacttaaccatcgaatgaaacacttgatatatgagtataatacgaattttgttgtggacgataaatctatttttgaaagatgtgtattgtataatgagtttgattcgtttattttttgtttgtttagtactaacctatgtgtgagcaaatcgtttcatgtagtgggttttcacctattttgccatttactgttgttgtatgttatgagtcttatgacaaaaaaaagaattattaaataaaattagttttatatataacaaagttatttgtcactctcaaatctaagggtccaatatgtttgggaatcaataacagtcttaaattgcctcatagtggtgaacaaagtaaggtgttggccaaaagcaatcaccttattacagttttatatcctttcacttttgacatatattaaagaagtggacaaacaaacaaagttaaaaaacactattaaaacactaaaattaacaacaaaaaatgttaaagttgtagataaaagaaccaaagacatcatcaccatgtgactcatgttattttccaacacctaagtttgatttgttttatatataacaattaaataatttatcaaaagtttgtcttcttcactgtcaattttcacaatcatcatctcatcaaaactcatacactatatatgacatattaatccgaaaaggaaaaggtagttataaaactagcccaagaacgtggattacgtgtgactgcgttaattaatgatgctctttacaaatatgcatcttagttaatgttggtaataattaagtatgtactaagcgaacaatataacgatctttgtcaacaagtgaaatacatttaaaatgcaaattttactaattcaaatagtaatcgataaatggacttgagagagagagagcaaaatccttagtaattgcggttgccggtaactagatagaactagtttgaagaaaaggatgtactaaatcactaatatgtactccatttgtacctttttatttgattgtttagaaaaaacacatatattaagaaaagatattaaatgttgattataaatgtattatttttagtgttttacagttttctataactttaaaccaatgataattaactatttttcttgaaaattacaatttatcaatactaaccaataaatattatatggaaaacttaaaaaatcaatcttttagaaacaatttttttttctaaacaatcaaaaaaaaaaaaatagagggagtatatgttatttttattactgattaactaggctaaaatgtattgatattgacagaataagtatttgataaatgagaatgtttgtgaataaatcatattgaattctaacaataatagggtctaaaaaatactctcaaacgatttttgtaaggctacattatattattctgcaatatttcaacatgttatcaccacatttatattacacaaacacgattttgctaggaaaaaaaaaagaaattgtttctttacaaaaaatcaatatcactcaagttggaaagaaaaaaaaatatcaaacgtaaatagagaaaatgaagaagaagtaaatggcaaactaataaagtgttagtgagagctctctcgagaggggtactttagtcattcagatagaaaaaacggctcttcaagccgaaacccagcatcggctccacaaagctgccacgtggacgagtagtagcaaaacgcatcgtttcgtatcatcatctcattctcatcggtaaacaaatccggcaaatcaaacagcttctcttcctcactgtctttgtccgtacacgccgaagtcgaagcacacgaagcttccgaatactcttgactctgagtcgtcgtcgtcgtgcttgtgtccgaagaaaacaactgagccaccacggctcgactcggctcggcttcaactatttcagccacttcagaattactcacatcgttgaccgaatcttgccagttaacggccgctaaagaggcggcggcttgaatgtctttaggagaatttgtgactggacgaggaagctcgccggctaacttgggaaaattgaggtaagccgttgtacctttaatggctaaagccgctacgtcatgagctcgagctgccatctcagccgttggataagtcccgagccagattcttgatttctttctcggctctctaatctccgacacccattttccccaactcctcatcctcactcctctatacgtcggatgtttatctccaccgttggtctttcgccgtttcccacctccaccgttttgatcatcatcgtcttcaacggagactaacgatgacaatgatcttcgagatgcttttcttttagagttgtcttcctcaatgaagttagaatttgttgatgacgaagaagaggaagatgtagtaggtgaagaggacaatgaggcggaagcggtgatggaggaggaggaagatacggcggggatggcggaggagataaaggtaacttgagaaacactactctctatgttgatttgtcttgccattgttatgagagaagaagctttagagagatggttgcacaaaaatagatgtgaagtgggctgtattaatattcctccacaatcttttttttttctttggctttttcatattatatggaaaaaaatataatgttttttctttataataaaacgaaggaggcagtatggaatggggtccatagaacaaaaaagatattattgagattcacagtttcagcgaaccagttttgttccatgtgaaaataaattgaaacaacatggttttatttattatgtacatacacaacaattttgttattaaaaggaaaaatattatgtattttattgagggaaaaaagaacaaaaattaattgcatggcaagtcgtttaaactttttttttttttacttttagtctaatatggcccgaccctcgtgcatgtgcgtcacctcttaacacatgaatttcccatcttctacttttattcgtccaaacaaaattggagttagtgtcacgtcgtcatttataaaaatttagcatctattctaatttctatttctcgtagagttttttctttttcgtaaatatgttagattggttaaattaagaaatagagtacgaatacaatgccaagactcggatagaacccatacacaaatgttgtttcggaattttcattatcagactaaaaattttaagtatatattaatctatatactatacgtaattaaaaaaggttaaacgataatgggcgattttaaaataattaatttaaatttgaaagaacattatcaaaccccaaccccaaaaccctatattattggggtctattaaaagacttgtcagagtttttgttttctaaattaaaagaacgtcacttttttcgagtaaataacctagttaacgacttacgacagtaactaattatgtccaaataatcaaattacatgtcggctcgaggtatttgtttacacgtgccgtaaataagtcgagtatacactaggagtaataaaataaagaaacacaagattcacacctagcctccttgaccaaagcattaagccatctctttcaattaattaatttcataattaaatgtcattaagctttttgtttccttctcgagaggaaaaataaaggcatgaaagcataattgagatggctgtccacgtcattagattttaattaatacgaatgggtctaggtatttaatataaaacgtacacgtaccatatcaaatttatgtgaaggaatatgtatagaacgtaactatatatatgttattgtatctgtgtaagactgttagtacgtcatattcgattcggcgccattataattaattaggaaaccactttacttgatatttattgtatatatggccattggccaccacaataaatagaaaatactccttccatttaattatttcccccagttgttattataaaagaattcattgaacaattaatgaacgacattattaacacgtatatgtaattatgtgtacagtatatgtacatatacacatgcaggcacagattctctatatatgctcatagttgtgaaataaatcgagctagtagcttagtactgtccacttcaggaaagtgtggctattgttcatttagaatctttttagttgattgaggaatattgaccccattagtcacactgatctgcaggttctcatttgttttattatatagtccaattatattttatatgatattgtcattcatccttcgtgattataattgacatcacggtgtgatagactgatagctgcgatgatggtacattgtggtaaaatcatgaaatgatgaaaatggtatacagttcaaaaacgtttttatatggtaggtacataatagtagtagaataatgaaaatgatgacaattgtacaggtgaataacgtttttatatttcaatcataaaacgtcaaaatatattagaaattgacacaagttggttttcgtcgaaaaaacagaatacttatatttgtcaatgatttatattttaatattcgtaattgatcctagcattttgggtagtagctggaaaattctgatatgcgagtttccatattcaaaacggagaccgacttttatatcataacgactagtttctttgagtggtgataacatgtgtgtgtgttttgatcattagagaatattggtaagagaacaattaggaattcaaactatcgctaagtatgaactcaagtagtaagagttatatatggtaggtgtattttggaaataaattaggaataatttcggtatatctctgcaatatatagtttgaaaatatacgacggtaggtttgaaataaattaaaacacaacgtagctgattgagctttttctatttgttaaacaactgtgattgagtttgatagattaaaaacaagttttcgtgtatatatacacaattttaagttagaatcatacagatagatacaaaataaaagtctaaaaaaccaagaaagagagagcagagattgtgggaaaaatctgcgagcgatatacgatgattgatgtgagatttaataattttatataagtcaatgggcacacatggcgcacatgccactcgtttttaatcgtacaaaaataaaatatcaaagacttaaagaaaaggagaaccactatttttattttttcaacaaagaaaaaaacaattagttaaaaggaaaacacaaatagaatgagaaaattcctctaatcttcatgttacattattcatatcatcgatcggcgaagagttaatacggtgtcagcatgcaaccaaaactggtagtaaagaaagaaccaatcaaatgtcgccatctggttaatactagtgtgatcaacggtggagatcagatctcaacgacgttgtatataaggatgttttttgatagaacttttaaagatattgacagtcacatattatgctaaaaggtaaaaaggaaaagaaaaaatctgtgaatgtaaccatacggtaaggggaaaaaagtggtcctaattcatcattctaaattccttctatttcgtggaaaaaatggattctgtatttcttcatatataaactatatatacattgatatatcgcagtgtgaataatatactagcatataatgcatcgatacgtagacataaatcaaagtacaaatatgcatataatgcatcgatacgtataaaaggggtaagggagaagcggttcagaaacttaaatatgatgttccctctcactcttttgttcattcaattctatgtttccctcaaaaagaggtaatcgtattaaattaaaataaaatataaattggaaaattttccattagctagtaggcgatgggcaagagtcatgagagacgtattgcttttctcatagatccagcttggttttattttataacagctactactagtattgagctactactttgtgttgtttgatagtgcaacttagtttacctgttcccctttgagtgcgaggaactctcgcagaatttagcaataatgttttttataaactctgtcttcattgatttagatgaattttgcaatacaaagttgagacaataaaattagcgagaatctgattttaaaatagaaattatcaaaaatgtcttgtttgtatttcaaagttcaaattcacattttttttaagtatattgttatatgaaaatgaaaaccaacaaaataataatgaagttatttactgaaatatctttgcaaaaagccatgatacttttataaaacgtttgatgatgacaaagtttttcagctaaaaacaggatagtaatccaagaaaatgtttttttctttgtggtatttttctttgaaatcataaacgtacctattatagtttttttggtaattgtggaagttcgttgagtggtaacatccctttgggccacaccaattcagatcctccaaatcttgcttttggtccgactgaatatcattctagttataataataacacgattgtaattaatatatattaagacccattataatttcaaaatatttatgaaaacatgtattgaaatttctgtgttctatataaaactaaggactctctgtttcttcttcttttattaaactgcaggactcggtgtttcaaatgcaattttttttgttcttttcctttttatataaaatacataaacaaattagtaatgtaaacgacttttcttttaatataattgaatgataagaaaatagtctccaaaagtttttaatacgttacacatgcacattagtaataaattgatgattactaaaggtttctttcacgttggatattttaacatttgatctaatcccgaaaccgttggattacatagatttggagtatttattacaacacaaatgtttattaccaatttattttgaatttaaaaccagaaaccttatactaacgttggtaatcgacatcaatattttcaaatataaaaaaaaatagttacaaaaataaaaaacagagattaagacctttcatgaatacctttttgtcatagtgaaaactaaattaagatttatatttataaacaaatccagtcatgcaagggaaaaggtatgtataatgtagaggaagaacaaaattaagagcgaaataggtctacatcacatcatttatatatctattagtggctgccctacgaattgtctttgtctccataattttatttgtcatattaaattgcatctttaaagagacaaaatttgattatgatccactttttttttttttttcttttctcctatttttccacccccgaataattcttgaagtttctgcttctttatttacttttcattattatatgtccatctttattttggattatatgctcgctcttgtaacttttgcgtttttttctacttggaaaattaatatttatagtcaatgaaagttaaatactatagataaccaatgaggtgtccttcatccatacgttgggtataaatgaatgaataatgtattttgtcacatttagacccccaccactattgtgagaattttgtaggtctctaattgatatgttttttttttcacaaaacgaatccaacaacaggtatatcgctcatagtttaaggtattcgaaaccgttaaaaaaaagttaacatggcaagtatcagtatcacctgacaaaataattagttgcctatgattggaaagaaaaagaagcgccgaaattgtagtttggttaagattgtcttgacagttgtagctccgacccaaatgatatataggggcagacttaaagcccaatgggctgatattatgatgggctctagtaactgttaagaaacctgaggaaacttgtgtgaggaacatcagatggtccaatgtgttccgcgttggacttttgtttgtttgttattcttcacctcctgacagcataattctttgctcggaagatgatttaaacagaaacatataaaggaatgaaaaaagttgggataaatttccctaaggcagaagcaatataaaaatgcttgaattagatagcttcacactcacgtcattttgtgatcttatttataaatccctaacctcgtggtgtgaaaacccacgcacaattaaatatatattcaaagaagaaacgtgcctttaatccaaatatcgttagttatcacttctatatcagcatacatggccaaggttcgaggaaaacctaaatttgtttaattatgtttttatcaaagaattcatttatcttcttcttttcttccacttttgtaaattgaacaattttttttaaaaaaaagcagaattatctctgattatcataaaatttagataaatgaagtttcaaaatgtcttcttacttgtaggagaagcaaccgctgatggaggatctagaacaaggaatacagctaagtacgagggagaatgaaaccggatctggtaaagtgggtagatggagcgaaggatttcgtgatccattggtttctaaacacggaacagctgagaaagcaaagattgtttctgtcacgactaaaccgtataaaccggattcttgctatgaatctgagatttccggtatatggccttcttcgtttagcaaagagtattgttgcatctatagagtacctaaccggttaaggagagttaatccagaggcatacactcctcagatgcttctcatcggtccacttcaacattctaagaaagctaatgcccttgagctttccaaaaccgatttaaggtacgtgtgcatatattaaccatacagaagaagaaaaaggctggtttctgcttttatgtttgcgtttgtgtgttatagttacatttataacatgctagattatagtgtttatgtggaaaatatataatatgttacattgttcagatatttggactatatgaacatggagcttcacaagaagaagtaccttaatgctattgcaaataaatatggggatcaaattatcgaagttttcaaggagatcatagaaacaagtgagaaattcgttagagaaagctacgccgagtcaacggactggatcaaacctcaagatttcgttgatatgatccttctcgactcggtgttcatactaggggtctttattcaggctgaaactactcaaaacatcaagaagaaagaagaaattcttttccatgaagaagatattattttccaggagccttgtctcataaccactattttagaagacctaatcttactcgagaaccaactcccttatgtccttttagagaaactctctaaaccttttttcgcaaatcttaaaaccaaggaaactttccgtgacattatccttcgagcttttaggttgaaaggagagatcaaagaaggaacgaatttccgtcattttacagatttgttcagacgtgtccgtgtggaaacactttgtttgacaaaagaacaaatcaaaagcgcaaaggataagccaccggagatcataaagagtctgcacaacgcagacaaactagacagtgctggagtggattttgtgcgtctggaaagaaaaaacgatttatcgttggtgataactttcgaacgcggaatcttggaaataccttgtttcttagcggacgacaacaccgagaggattatgaggaacttaatggccctcgagcaatgtcattaccctctcactgcttatgtttgtaactacatagctttcttggattttcttatcgacaccgaccaagacgttgacttgctcgtcaagaaaggtaaaaactctatacaaaatatatatcttggttttaaagattaagttattagtcagacaaatttatgagattcctaattaacatatcttcacattttccgttacaaggagttataaagaactggttaggacatcaagcatcggtggcggaaatggtaaacaagctgtgtttagggcttgtggattttggatctcactattacggtatagccgatagactcaacaaacactacgaaagccgtcgcaatagatccatagccacactccggcgagtttactttaaagatctttggaccggaactgccaccattgccgccgccgttatcctcgtgttgactttgattgggacggttgcttccgtactccaggtgacgcagaaggataataattctccaccgcctccggctatgttccgaggaccgtagattgtctcttgttatatacgaaacaaacaatagttgttttttttctccaatgtttaatttggttttctctttgctcgactttgttccacaaataatgcttctttttcatattttctttatttagtccatcatggctaacgtcatcttttgattatgtatcttcaagttaaaattctcagaaaaatctctcaaaacattttctccgttaaaacctccaatttttttgtttttatataaaatattcaagttgaaacaattttcctacaagaacgtttacatttttttccatattctcatgtaaaccttccaactaattaggttatctacataaactttcaagttgtcaaatttgacctcgatcagtagtttattaatgtttaacgataattatatttaaaacagtaaacggtcattaacgatatttttcgtttatttagttttcaaaatttataaaaatccttttaaaaaaaaatgcattctatatatagggtttgtaaataattatttttgtgtttcttattataactaacacgtatattttttaaaaaactaaataaacagaaaatatgtcgttaaatgtcgcttaccattaatcaatcattgatcgggctcaaatagtaaacattgaactaaattaaattatactctgttatatatatatatatatatatatatatatatgtgttttttttttttaatataagctataataaagaactagttgggacgctcaaaatttgtatcgtacaaggttaacaagctgtgtttagggattgttgattatggctctcactattacgatcgacatagcccagaggctcaacaaatactacgaggatcgtttcaactttatcagaatacaaaaaaaggacatccttcgccactctcagtctacttcaaagacctttgggctttggacaggaactgccaccgttggcgcagtcgttatcctcgtgttgactttgcttgggacgttggcttccgttctataagtgacacacaaagacaaaaatcacactaatgaaatctctcccgaaaattgtagattgctagtttgctactcctacttgctatatacacgaaatcaaacgagactatgtatattattattacaatatattttcatccattctgcagaggcatacttaaaaaaaatcggttactttattttctatataataaattttcgtttctaatatcaaatcaatgattcaatcttagtgactaaatatagtagtcaatattcagagccatcctccaactcattttccttatctaaaataaaatgcaatatatggatttaaaattaacataatcacaaaaagatatctaaaaatcataccaaaaaaaagaaaaacataaaatgaaataaaaaaaacaataactagatatagtcaaccacttaaaataaaacatattactttaacatagtttttgtcaacaacattgaaatgaaataaaataggtgattacataccatatgggagactagttcactccctttattcataaaattaaaaacaacaacgaaacttattcaagaaaccacgaaaaggtttcacttaaacttaagcattggcgtttcttggtctctgactaacaaacctcctgcagtacatgggacgtccgtagacagaaaagcaaaccttttcataaggccccagcacgaaatctggtatgaaaggagaattgaacatcaccttcccgaacaagccttgcccagcaaccttcgctgttggcgtaggcttgtgcacaaacacctccatcacactccccgggtacatcctaatcatcatcatcacacatatacacataattgaaccaattgaatcatataaaagatgtaattaaaaaaacaaattgttcgtataactaattaataactattgtatcaagaagcgtgactgtgagatgcaagtcgagatctattagtacaaactaaaccaaaattgttatcaatctatagacatcgtggatgtgtgtctactacaacatagccaaccttctatgatgcaagtcgagatctattagtacaaaactaaactaagatctttatcaatctatagacttcgtagacgtgtgtctactttctactacacatagccaaccttctaagatgcaaggtaaagtaagtttcacgatagtgtaaaatcgccttgtgacaaatcatttgcactacataaccaaaaactatcatccatttaatagattttatgagttagggttacacttgccagttgaagtaacagaagatttggtattctgtgagaggaaacccgttggagaaggtgacaaacagagaacgtaagtccggatttggattatacgcaagcgcattagcattgagcacaaatcccgccgaagtactcatggaggccgtcgctctaatctcttttcttcccactccttttaacaccaagagaaacgaaattcctttttttttttccttcttctatatgctacgtctggatgcaacggttggggttataaggaaaaaaatatcattgactgcatagtatcaaaagattgaaataaatttatttcacatttcacggtgagtgcatgcatgtacaacgttttagaagaaatataaatcatttcagctgttattattattttctcattttaaaaataattttcggggttttgttgaattatgtctttttgtaaccgaatctgagtaatatatatttctacatatgcatcatattttttctttagatttaagagataccagctgtacatagtattcaattattaatacaatatctccagttgtattttctttattttgcttgtgaggccaattttaaaaaatcagaaacaacatttgaagtttgcttcttttcaaggaatcaaataagattattacacgcgttcgtaatttatacaaactatatttgttaatcaaactgcatgaagtttacaagtaaaagttgcaaaaaaaatgtcataataattcttgtgattcagaccaataaataaaacaaaaaccagtagctaatcacctccacaaagacggagcatgtgggaagttatacataatcaatctctcaaggtcaagcttgagattagtacataatatatacaaacacattctttgaacaacatgcacaaaaagcttcaccaatggtcaaatctcaaagaaaaattataagaagaagactcccacagtccaaagctttacatttcatagtttagttgcaaagcaatgtgtcccgcgttgcattcccagtagtcgcgttaactctaatgagtgaaagacaaaacaaacatacaaacaatataatcacattctgctgtgagtttcagacagaatataagatatagattctaagagataagagcagcagaattttacccatccgcaactttgcaaaggtatactcgctgatcatctcttagagggacatcagtgaagtctaaatccaattcaaatttatacacacaaacgtatcaaactttatgtgaagctcagaggtaataaagagatgtgcttattgttattatgaaagttttcttttcttttttcacctgcgcctgtaatgtttgatcccttgaatgatgtgtttccagtaacagtcgctccttctaagttagcgttcgttagattcacctgcaagatgtagcatttttaactattatgggccattaatgtcaaagatctttttgttatccttagctttatacacatttaagatcatatagcaacacgtatatgtaacatcgaatacaacctttgttacatttgccaaggagaaatctgcacctcggagatcagcttccgataaatcagcacctggattcaccatgataagagtttaacatccatgaatgagaagtggtctctattattacagttcttctactacctcaataaagaaaagaaaataaacctgttagatctgcatcaaagaagctagcacctaacaactttgcacccttgaagttggcttgccttaggatggactggcgaaaataccatcaaataaaaggatgattaatatggtgttcatgatgatatataacaatctataacttcataatgtataccgttttgaagtcctttctataactgcataatgtattaccgttttgaagtcctgcctgataagagtctggccactgaaatctttgccagataagtcctgtcccctggtgactccttgaccatagggacctccaccctttcggtttcatccaaatccagaaaataaagtgagctatagagaagaacatcttatgatatcttagtcactagaatatgaaatccatcaagaactaagataacatttccaagaagctttgttgctacagacacctaaaataattcggaggccatatatacaatggtaaacaaagtaccatactaccattagcttgacagtgaaactacagggcaaactgtttcaacttatcattctagttgctaacaaagaaagtgcctaatcttaagactcaatggtttccaatttagataggatgataaaatttccataaaaaacgaaaggtttgctcacaataacttatctatggtgatctgatcatcacttgctttaaagtttcgaccttttataatctataccaattgtgtactaccactatatgtaagttcctttatttactttcactacagattcaagaatagaattaaaaggagataagtagaacaaaaggttaccttaaaagcaagagcaggatcaacaaagaagagagaagcagagacaagtgcaaatagacttctctttgaaacctcttctcctaatgaccaaaccacacttctcaaaggactggtaaccacttctttcccttcctgcccaaaaacagaaaaacacaaaaaagaatattgtctgaatctcaacggaaatataaaactggatcttgtctaggtcaaacattacctcaaaatcagttttcttctcaatgtatcaacaatactagtatcaactatacatacaaacatgaacatatgttctaacataactacataagatagaccacaaagatcaaacatgaatcagttcctacgaatcttcactaaacaaaagctagaagtgtaatcaactactaaattcaaatttggctctttctttatcacaaccgttttttttcttctttctcaaagcggttcagaggaggttggagaaaaaattttggaggttacctgtgactgtgagcaacgaatgggacaatgagaactacgagaagacggagaaaagagagatggtttctgagagatgttgcagcaggagaacaacgagacgttgctgagaattaccatttttttttttttttcggcttcacgaatccaacgagtctctttgtttcagtggataagccaaaagcgactccttgtggataaaatttgattttgaccggtgtacttgagaaaaggcccgttttaattgagcttatttaggcccaacacattttgttaagtttaacccagataccaccagtttgacttatatgcaaatattaagacttttttattgtttgtagattctgaaatggtttttagtttttgattttggaaaaaaacaatttgttactcattcaagattataataaaaatgatttcctaaaaattagagaatctagatttaaagagattttgtcaattctttcccaaaatccaaaaaccatatttactagtttttagaattaccatttgaatttatttattttatatatttttccatttattttatttcttcttttgtgtaaaatccaaagaccaaaaccaaaaatctataatctaaaaaccacttataattgatattacttaaaattttgattaaaaaaaaaaagaacaatatgaaggccttgagatcttgagcgatagtacatttcaaatgaaatttttagttttgttcataagtctaatatagttaaatagatatcgtcttaagaaaagacgaattatccatcactcaagttctaattgtctctctaccaattttagtgcaatgaaatctaatttctcaaacaaagcgagatcacgtgcaattcacatggataacagctggacacccacacacaatccaaaacgcattggatcgaggctgtgtgatcataacatcatgagaggaggctaaggggtataaatgtaattacgtagaagaagctcgtgtcgcatcaaatgattggtgtccggtgagagagaggcaaagagacacgcgcgggggtggtgcgaaggtaggacaatgggaacccgtctattatttcacttgtgggattgacacgtggatactcaatcacgtgacttcccacgtgaaacgctggcgtatctaatttaattttaagtcctttgtctgttttttttttctcctcactccattctttacacatcttagtcacgtggctctcactcgctatgtctcctcgctaactttttttttgaatcttgaaactttctgctttttaactttatttatttattttggatttcgtaaagattgttcaacggaaatacgctcgatgctgttgttttcagtccttaactatgattaatattagggttcagatggttacaagttgcgaatccgaaaactgtcaataacaaaaaacaaaacagcattcaattgtgttatagtttcatatacgattcatcttgtgaccgtcaccatttaaaacttataccatagtaaagtcttatttcaaaagattttaatttggtaactagctagttgaactatccagagtccagacgttttgagatatattttgtctaggatttatatatttgaaagaaaaaatttgtcgaacgatttgatctaaagacatcttttttctatcggatcaattcactagatatttcgtcgactttttaaaaaagcaccgataaggcggcaagttcattctgatataattcaattcagtgttcgatcgatcaccttagttcttataaatgctacttagattatgtatgcctttatgatctctgtttataaatataatttctgcatgcatgtgaacagctgttattctgaaattctaatatcttacacacctttccagcgtatccctatgttttagtgttcaaaacgtagcatatgttattattaatacagattgcacggatagcaaataataaattataagaatcaatcaaatcttggaacggaccaaaataagtgacgggcttcccacgtggacatgtgtaatgatttcgagtaaattgttagatacgtcgatacaatcatgtggtacgtgaaaatatcataattattttgtaatgattaaattggctcagcaagcaataacattgatggatggactaaacagtagaactatggttgaatgattttcttttctttttgacgtcattgatagtgagtgatttatacgaataaaaatatgccgatgagcaacagatttcagttgttagttgttaccgtgtcaaaaaaaaatgttgagcaaagatcaaaatttatatatattttttttgctaataacagaatataaattgatactttacattaatatatgtataattataaatgcacatggttatggacacacacgtgggaccaaattgtgtatcttctttttaaaaatgtagatgtatcaaaattattgaactcttgaattaagtaagtatgataaggatttatattcatgcatgattacctcagaaactctcgttgttggtacaacatgggctttggttgctttggccggttttcaccggatcctgttcgtagctgtctcttaccgaactgatatctttaaattaattccctcgccatacagttataacaaaactcaaaccatattgtaaatatactcatatccacaatttaactcatatttacgtgtattaatatattgagttttttgttttgctaaagatcttatcgagtatcttctaacgttctcttctttaaattctctcaacgatttaaaaaaaaaaaaaaaaaaatcacagcgatttttacaggaaaaattacgcgagagtgagcgcgtggaattgttaggaaccatcgagtcggaggaggagagaagtatccaatgattaaagagaagtgaatgtctggtcgtggaggaacaaaaattacgccgcacgagtgtggtcactggggaccatgttctgccacgttggcaacttcccacgtgaaccccttcccatttcccacgtgaccaccacttcttctatttcctttgaatctcttgctttacttcttctacactctctcccacaccattcacacgcttcattccagaatttcacattcttaaatatgcaatgtactgaaacatcaatacatcatcagctcttaaacatatttcaaccaatcgtgaaaacaaatgaattaatttgtacgaatttcacggagaacgaagatgtagtaacgatatattttctttttcatattagttacacttcatgtagttttatcatgaaacattcatacaaaaatatagcatagccatgtaacaaagcagaatcatacatacatacgttttctagacaaaaagacaaataaaaaaaacacttgtctgattttccttaaaacattcaagaatgccaggagaattggggaaaaatagattacagtataagcttagaaacaactgtatataattaatgaacatgggttatgaattgtaacttgcaacaaactttacattaatatgcatgatacggctcatatatcataaacccatgctaacttagttcaaaccccttattcatttatcaataaatacatactttgtagctttgagcaaaaaagcttacaagaaaatttaggaatataataatttgtttgtataactattgttttcagagtactatactatcaatcaagtcaactaaccaattaggctccaaaataaaatcaattttctaaacgtaatttaccaagaaaagtttataagaaaggtcaaagcaagttataagagtcaatgaaaagaccgcattgattgaagatacataagaagtcaatatatagtcattaagaataaatttgaaagtaattaatttgttttgaaaaagcgtcgggcgttatttaactttaaaattaattaacaaacgagacctgtcttgtcttgtctgtaactctcaaagaaactgaagtagtaataatgatggcattatcaacaactttgaaaacaatagaaaggaaacataaaccaaaaattattgtttcaatgacaggaagtagccgtaaactctaccatccactaatgttttccaaatgtccgtttgctatttgatttagccataaaattcaatggaaaaacttgaatattgcttttattagttgaccaaaagaattactcgaaggatagtttttggaaaagggaataataaattaattgaagactaattagatgcatgttgggttcacggggtaactctagagtcttaaaaccccatgcagtattaggctctgtgttatcaaagacgacatcgttttctgactaccatacccattttgagcccaacgccattctattcagttccacgcgttcttactcacgtttgttctacacgagcgacgctactttaccatatacatctgtcttttcttgttaaaataccatctcatggttttaagaaataaaaagagtattcaaacaaagatctttgttatactactattattgtttagtagatctacaaagcgtgtgcattacttcccaaaataatttaataatgggttttataagctaatcaagttcgaaatatgaattttcgagaataaaaaatgattgattagttaagcatcatttttaaaacgttgtaccataaccaaatacagtacttattactgtcaaagacaaaaaaataactgagattttaggtattaaaatgttaacgtttgttattgacttttaggacgaaaatgaacaaaaattcatttgtcaaacgtattgaaaaaattaaacgcattggagttgaatgacttttttttttttttttttttaaagagagaggagcaggtaacagtatatatcatcattgaaattacaagggtctttctgacacaagtcatcattgaaaccccaagcaccccacataaccccttctctctattaattgtctacatatcaacttctgtgtatatatatattagtcgtgtctttaaccccattatcactacatcgattttctcgagaaagtctttcaaaatccagaaaagaaaagttctttctgttgaggacaatgggggaaagagatgatgggttgggtttgagtctaagcttgggaaatagtcaacaaaaagaaccatctctgaggttgaatcttatgccgttgacaacttcttcttcttcttcttcgtttcaacacatgcacaatcagaataacaatagccatccccagaagattcataacatctcttggactcatctgtttcaatcttctggtaatacttttctatttctcgttttaatataatgtttttttaagcattaaatgtgttgaaattctgttttatgtgcataacttcggatctatgtttcagatccgattcttttttaaataaagatatttctgttttagtaatttacgaaactgaagctaaaaacgtttttcgggttttgatgtactctagggattaaacgtacaactgcagagagaaactccgacgccgggtcatttctaagaggtttcaacgtgaacagagctcagtcttcggtggcggtagtggacttggaagaagaagccgccgtcgtctcgtctccaaacagcgccgtttcgagtctgagtggaaataaaagggatcttgcggtggcgagaggaggagatgaaaacgaggcggagagagcttcttgctcacgcggagggggaagcggtggtagcgacgatgaagacggcggaaacggcgacggatcaaggaagaaactacggttatcgaaggatcaagctcttgttctcgaggagacttttaaagaacatagcactcttaatccggttagtggcattttgtgtaatttttatctaacttataaattcagttaattacattttcgttatttgtcacttcttattgcatggacgtttgtaattggcttctctctaaaagactaaaattggtttttttttttttttttttaattatcggattgggcagaagcaaaagctggctctagcaaaacagttgaatctaagggcaagacaagttgaagtgtggtttcagaaccgtagggcaaggtaaagaaattatctttattttctaggggtattataggaaatttggtttcacagaaccttagtaattgctatgatggggatataattgtccttttatgacccaaaagcgatttcagttccctgtcctaaaagaaaatcctaataagatctctgcctctgtactgtcacatggagtttcttactttttactacagccttaaagacacatgcatgcgtatgcgtacaaataaaatctacttttgtccttttttgtttcttatcagttttaaacttttatttctgttcacttcactaattaaggtgattttgatttattatttgtacgtacattaggacgaagctgaaacaaacggaggttgattgtgagtatttaaagagatgttgcgataatctgaccgaggagaatcgacggctgcagaaagaagtgtcggagctgagggcgttgaagttgtctccacatctctacatgcacatgactcctcctactactctcaccatgtgcccttcttgcgaacgtgtctcctcctctgccgccactgtgaccgctgctccttccactactactactcctacggtggtggggcggccaagtccacagcgattaactccttggactgctatttctctccagcaaaaatcaggtcgctagggaaggagtatcttcggtagttttagcttagaataaagatatgagtatgaaagtttcaaagattagcttctatctattgaaaatgaaaacaaagattagtctcaattcaaagggttcaatttgaggctctaattctgaatttgttttaacctgtaaaaggattaccctttttagaattcagttttgtgagtatatttgattgtttattacctctaaaatcatgagagagatcttctaggggttgtacgtaataaaacattaatgggcttagataaagattaaccaacaaaaaatcatggtgggctttttgccggcattactctgttatgcatagatgttctttctcctcctttgttgggttataaaaccgagagacttcgaaacccaccgatggtattgggatccatatttccaaactgtctgtctgaggatgtggatatttgggtgatgttgaaactctcaagtcattttatatgaggaattttcaaacatcagttttaatgaaacaaagaatgttccaattggaacataaatatcataacaaatgaaattatcaataaatagaagtaataaagaatcgtaatacctaatcaatcaaattattggttgggtccaaatgagcgtctcgtcaagttactcgagcctcctctttttttcttttctttctgccttctttggtttactcgtcaaagtctcatctcactaaaaataagtttcatctaaacttctctaaagtattttctatgggggtgaaaacgttaaactgaaagtgtagtgaagaagttgataaaaaaggaaaggagttgtacaaagggatgcagattcctatattcaacatggtcgacatatatctcctttctttctaatttcagtactttcaaaagagtaacttttaagtttttattaaagaccagtctcttaatgttcaattcaaccaaaataatataaacttataattgtatatatatgaaaatcaaactgttttcatgagtttgtgcctaattgaatagatttcaactaaacctcaataccagatttaaatgcacaatattataacaattgttcagtgtaacatttttttttcctaaagcatgaaaaagaagaaacaaacaacaatggctgaattttggatcataacgtttttatggttgagataaatgaaattctcctgacaacattttactatttaatggagtaacaacaaagagaaacaatatggaaataccaatctgtattaaagttaacactaacaaaagaaaaaatcaatagtcttaaaatgtaattgcggtaaaatatattgaaacattgtaataatgtataatggtattcaaatcaataaaaatgcagaaaatcaaattgtaattaaaaggtaaaaaagataaaaaaaaaagggaggtgaattaattctgctgcctctctctctatcatattcgtatatatgagctgtgttttcatcacacgaagccctcttctctcttgtctcttctcctctaagccccgacctggaattttccaattccttcatcatcatcttctctctctatctctttgtgccgcacgaataaaggaagagagagtttaacggaattactttgagactttgagagaggtcttttggtttcttatacagttttcgggtttggcttcaattctctccgaccatcactctctcttctttatcctctcttcactttcaaattcccattgaccttcttctcatcattgtgagtttaatgtcaatacaaatctattgacgaagaaaggtcagagattttgcttctctattcgagggtttttgcgttcgttgagctctttgaattcggttttaatctaatcgtatcgtgtaatgtgttgttgattcgatatggttactaggttttgaaaagactctgagccttccaagtatctaaattgcttaaaatcgggggacgaaaggtttggttgtgtttgtttgctattgaagatctctgtgtcttcgtttgattatgcccttttaaggaatttgtgatcagcgttttaaaggttgagactttagagatatataaagcctgaagtttcgatttttatttcggtaagctgcaagaggatttgttgctgttttagaggattatctgatcaaaggtaatgagtcgtagggtacggagaaaattggaggaggaaaaagggaaagataaggttgttgttttgccaagttatcctgagactagcattagcaacgaggaggatttagtagctcctgagcttcttcatggttttgttgattggattagtctgccttatgacacagtgcttcagttgtttacttgtttgaattatcgtgatcgagctagcttggcatcgacttgtaagacatggagatgtcttggtgcttcttcttgtttgtggacttcattggatcttcgtcctcacaagtttgatgcttcaatggcagcttctcttgcttctaggtgtgttaatcttcattacttaaggtttcgtggtgttgaatcagctgattcccttatacatctcaaagctaggaatctaattgaagtaagcggcgactattgcaagaaaataactgatgccacattgtcaatgatagtggcgcgacatgaggcacttgagagtctccaacttggacctgacttttgtgagaggatcactagtgatgctatcaaagctgttgccttttgttgtcctaagcttaaaaagcttcgcctttctgggattagagatgtgacttctgaagccattgaagctctggccaagcattgtccacagctcaatgatctcgggttcttagattgtctaaacattgacgaggaggctctgggaaaagttgtatctgttcgatacctctctgttgctgggacatcaaacataaaatggtcaattgcatcaaataattgggataagcttccgaaattaaccggtttggatgtctcgaggaccgacattggacccaccgcagtttctaggttcttgacatcatcacagagcttgaaagtattgtgtgctttaaactgtcatgtcctcgaagaggatgaaagtttaatcagctataaccgattcaaaggaaaagtcttacttgctctgtttactaatgtttttgatggacttgcttctatattcgccgataatacaaagaaaccaaaggatatctttgcctattggagagaattgatgaaaacaaccaaggataaaacaattaatgactttatacattggatcgaatggattatctctcatacgcttctacgaactgcagagtgtaatccagaaggattggatgatttctggctgaatgaaggagccgcattgctgcttaatttaatgcaaagctcacaggaagatgtccaggagagatcagctactgggcttgcaacttttgtagttgttgatgatgagaatgctagtatagactgtggaagagctgaagcagttatgaaagatggaggtattcgccttcttctagaacttgcgaaatcatggcgagaagggcttcagtcagaagctgcaaaggttacttcttcttctttttttttttgcttgtcatttttcatactggaattttgatacttttgactgggacacactaacattgttcttttatctgattttttaggctattgcaaatttgtcggtaaatgctaatattgcaaagtctgttgctgaagaaggaggaatcaaaattcttgctggtttggcaaagtcaatgaacagacttgtggctgaggaagctgctggtggactatggaatctctctgtcggagaagagcataaggtaagtcctctaattatctataatattcttgttgttactcttgattttttaggactcattttttgttgttttctctattagaatgctattgctcaggctggaggagtgaaggcactggtcgaccttatatttagatggccaaatggctgtgatggagtcttggtacactttcgctaccttgaagcttcatctttttcttttgtttctaaatcaaacaaaacctttctattttataaccaaaacaaataccgtctacagttattttatcattaaaaaacctactaaaaacggataaatcctaggatgcttatgtgaatccatttgttaagaagtggtcgtttcgataattcattttttaaagtggcgcttgcgataatacttagttaaaaagtgtcatttttggatatttcccttctttctatatggaggatttacctaatttgtgtgattaggaacgagctgcaggagcattagcaaacttagcagcagatgataaatgcagcatggaagtcgcaaaagcgggaggcgtacatgcccttgtgatgttggctcggaattgcaagtacgagggagtgcaagaacaggtaaattccgtttctttatttttacaaaatttctttgtgagttgagtttgtggtttaacggtgtttttattttccaggctgctcgtgctttagctaatttggctgctcatggagatagcaacaataataatgctgcggttgggcaagaagcaggtgcattagaagctcttgtccaacttacaaaatcgcctcatgaaggagttagacaagaagctgctggtgctctatggaatttgtcgtttgatgataagaatcgagaatctatctctgtagctggtggtgttgaagctttggtatgcttccagtttgtttagtatgattacactgttcctctgcatatataaggggaattgatcacttttgttgattattttaggtggcgctcgcacagtcttgttcaaatgcatcgacaggtcttcaagaaagagctgctggtgcactttggggattatcggtgtcagaagcaaacaggtgctaaatacatctgaatctaagtttaatgcgttctgtttatagattgtcacgtgatatgtttaagatcaatgcagaagcaacataaggacagaccatcttgctttaacatatcacacatgctgatactttttattttgcttgcaccaagttgaggcttttgttacagagaagttttaaaggagtttcttaccaatttattgttactgtcactttccttgataataatcctaccattgctctttttgatctccatcagcgttgcgattggacgtgaaggtggggttccacctctaattgcacttgcacggtctgaagccgaggtaagaactttgagcatagccaagccatcttggataatctgatataaaatttcctcaatgtgctggtttttttcccaggatgtacatgaaactgcagcaggagctctatggaatcttgcttttaatcctggtaatgcactccgcattgttgaggaaggaggagttccagctcttgttcacttgtgttcgtcttctgtctcaaaaatggctcgattcatggctgcattggctttggcatacatgtttgatggaaggtatattaatatataacttagttaataaacatcccaaattcaatccgactctcacggttttcgatctgaattatcgatctgcaacaggatggatgaatatgctctgatgataggaacttcttcatcagagagcacatcgaaaaacattagcttagatggggcaagaaacatggctcttaaacacattgaagcttttgtcctaagttttatagatcctcacatatttgaatctcctgttgtttcatctacccctactatgctagcacaagtcacagagagagctcgcatacaagaagctggccatttgagatgcaggttaaatcttttcgcctctatctatctctatcagcggtgtcttgtgtttgattgaaaactgatttgaaatttttaaatgtattgttttctttgcagtggtgctgaaattggaagatttgtaacaatgttgcgcaatcctgattcaacactcaaagcatgtgctgcgtttgcgcttcttcaggtatgtaaaaatgtgaaaacaaacattgtgtcgtgttctctgttggttacaacaactgatgcatatatcttatctttttgtgcttgctctaattcagtttacaataccgggtggtcgacatgcaatgcatcacgtaagccttatgcagaacggaggagaatcgagattccttcgttctgcagctgcttctgcaaaaacgcctcgtgaagctaagatctttacgaaaattctcctacgcaatctcgagcatcaccaggcggaatcttccatttaagcctcttagagaaaatgatagttaaaagtcccgtttacttagaaatacgtctgtatctcaaatacgcaagaagccaaagccatactgcaaaaccacaaactctcaagatgctttatcagaccaagaatgtcctctctgtgtgattacatgagactattgtgttcttctttatcgtgttttgagaattttcctgtaataacaggtccaaaggattcgaaggtgctgtttcttctatctcctatcttgttcatcgttcctttttggctctgatcatttcttgtgccaagatctattgacgatattaccctccgctctgttattcccttagataaatcatatgtgttgtaaattaggcccaatgacatgctcatgaaaatggaaaactaaacagagcttctgtcacttgacgtttcaggttttcaaaagagaaacattaatacagagcggagggtaattttgtgtcgattcatatttttcacagagcaaaaagtttccttcagcaagaatcaattcatatcagaaatacagataataatgagaaaacaccatttttgaagaagccgatacataaagttgaataaatcaattcgatttcatttgtcaagaaccggaactggacccatatcaaaccggttttattgatcttcctttgtctttccgagagcatggggagtgcagaaaatgatgacatggacatagagtgagcaaaggagataatatctactacatagcaatgtgtaggatgacttacatttagggtcaagatgaggaagatttcaagccagagagatggcttaaggatggcgtgttccaaccttaagaaatacatttctaataaaacctgagatgttttctttctttgactatgtatgtaggctggtccaagaatctgtcttggcaaagatttcgcataccggcaaatgaagacacttattcacttctttcgcttcaaaatggctgatgagaagactactgtatgttactagagaatgcttactcttcgtgtccaaggaggacaaacacctctaaaaaacttttttttcatatcaaataatatatggaagtataatcaattaaaaaaaacacatttttcccccatatcttctgttttgtctttatataatttgattacgtggtacaaaagaaagttgaggccctaattcatattgtgcgactttttcacccacaattactacatgagaaaacatcaaaacgacaaaatcggttacactcaacgttaaccttcgaggtaaaagagagggttcagaatgtttcgttggatgcgtgtaaaatccgtcttgacttttcgtgattgttgaatcgtctatatatgacttcttagcgggaagattgaaaaaatcagacaacaagacgaaacaacttccaagccaaaaaaaaaaaagtgaatcaatggagattttgacgagcatggcgattatagtagtaacaacgatcttcatccttctgtctttcgcactctatctaactatcagaatcttcaccggaaaatccagaaacgacaagaggtatactcctgtacacgccacaatctttgatcttttcttccacagccacaaattatacgattacgagacagagatcgcgaggacaaagcctactttcaggttcttgagtccaggacagagcgagatattcactgcagatcctcggaacgtggagcatattctcaagacaagattccataactatagtaaaggacccgttggtacagtgaatcttgcggatcttctgggacatgggatcttcgctgttgatggagagaaatggaaacaacaaaggaagctcgtgagctttgagttctccactagagttttaagaaattttagctactctgtttttcggacaagtgcttctaagcttgtcggttttattgcggagtttgctctctctggaaaatcttttgattttcaggtacgtttcgaaactgaccaaactcattatttccgaatttggaaactctaatgatgtctttttgttatatgttttgttttgaggtaggatatgttgatgaaatgtacattggactccatctttaaagttggattcggtgtggagttaggatgtctagatgggtttagcaaagaaggggaagagttcatgaaggcttttgatgaaggcaacggcgcaactagttccagggtcaccgacccgttttggaagctgaaatgttttcttaacattggatcagagtcaagactcaagaagagcattgctattatagacaagtttgtctatagtctcattaccactaaaaggaaagagctttccaaggaacagaacactgtgagttctctaaagtttatcctcttaaagattgcatttactgttggttaaacctttcgaataatgtattgcttgtccttagtctgttagagaggacatcctatcgaaatttcttctcgagagtgagaaagatccggagaacatgaatgataagtacctgagggatatcattttgaatgttatggttgctggtaaggacacaaccgctgcatcactctcttggttcttgtacatgctctgcaaaaacccacttgttcaggagaaaatcgttcaagaaatcagagatgtgacatcaagtcacgagaaaacaaccgatgtaaatggtttcattgaaagtgtaaccgaagaagctcttgctcagatgcagtatctccatgcggccttgtctgagactatgaggctttacccacctgtgcctgaggtaaaataacctgcgcttaaaggattcttctatgtcctgaacatttcaagagctaatcaaaccaaataatggggatttaagttttttcttttcttatctttcttggtccttccaaagcacatgaggtgtgcagaaaatgatgacgttcttccagatggacatagagtgagcaaaggggataatatctactacatatcctatgcaatgggtaggatgacttacatttggggtcaagatgctgaggaattcaagccagagagatggctcaaggacggcgtattccaacccgaatcacaattcaaattcataagctttcatgtttgtacactctcttgctgacaaactaagggatcaagagtaaggtattattttctaatatctgagatgttttatttctttggctgtgcatgtaggctggtccaagaatctgtattggcaaggatttcgcataccggcagatgaagatagtatcaatggcacttcttcacttctttcgcttcaaaatggctgatgagaacagcaaggtgtcttacaagaaaatgcttacacttcatgtcgatggaggactacatctctgtgcaatcccgaggacaagcacttgagtacttaaccagaacactttccatactttcatagtgcctccatgagttttggtcaaacattcttaatgaaggtggaacaagacaccaagaaatttccatgtaataaataatctgcttttatagatctttggatgactcagctatcatatattatatctgatgaacaagacacaatattgtataattttacagccacctagtacaaaaaaacagcagataacaaaaaagagttcactcgtggtccatcttattgcgtgaccatggcaggaatgggaacacctggtcttgcgatccatcccttgcgagatctgtaagcatcgatggcctctaattgtagcctcgcctgcggagcacttagagtatactttcttgcctgccaaattaacatacatataatcatttgaaccaatagcacagccgagtttttcttacagttagaaacaatagcgagactatacctttggaacaagagccaactttggtggagcttgcaccacatcaccgaatctaatctgttcatctctggggaagttttcacggagggtatctccagtctttccttgattcttcttttgcttcttggcctcccaatacctgcattgaagtaggaccatttcgatctagccataaaactcaaacacataacaaacaaggatttggctattaagagaaatgagtaaggcttacagttacacaaaaacaatccatatttttccccaaagcaaaaagtttcaaataaggagaaaacaccattttgaagacgccgattctaagattaaagaaaatgattgcaaagaagatgagaattcgaaattggaacaagaaaggtttacacagcaagaaaaacttaacactcggacaataaagtttaagagagcgaaaaatatacatcacaagaaacccagcttttctccctctgacctattgcatgagagaccatctgaaagaaaataataatgattacttgtggatcattaatctaagaacgtcagagaacgattcaaccaaagtacatattaccgggtaggtgcattcccaaggttttttatgttcagcagtaaaggaaccttgaactccttggcctactagatacctttggaacatcagcagctgggtcatcgaggcgttgcgtcgacgggaagagatggtgccactggtgcgtggggaagtggatttgagaccagagaaagctggtatccaaacgcagttttcagagccattgtgagaggaaagctctcacaagcgctagagaacatgtagaagacattgatgctctctatggttaaattgaaagagagagagaaatgaagaaatggaagagaaagcttctctgcaacttattttaggagactgttcctattgagaaagagtatatgaaataaaccaatgagatctcttagaatgccactactaactcttatcgccccaagtatttcataatgagtagaagcatttgatggcctaacatgaaactgtgagttgctttcaccagttgtatttctcctcattcatgtgcataagcaggtctccgagaaccaaatgtatgcttcgccgatgaggatgggttgtatctcctgatataaactccgaaacgatataatttatctcaatcaagctacatccaacctctttcttggcttggttcttcctcatcacgtttttcaccatcccgaaatcgtcccatcttttatctgcagcgtacaagttcctcaacagcacataattcccatcgttctgaggttccaattcgactgccttcttcagaattctctcagccctttctatatctttgtattgaccacacgcagacaagaaagagcttagaataataccatttggctcaaaaggcatgttggtaatcaaatcctctgcttcttttaggctccctgctctgcctagtagatcaaccatacagccatagtgctcaattttagcattcaggcccatttctctcatcacgtggaaccattttcttccttcctccactaatccaccatggttacaagctgtgataaccgcgagcattgtgatctcatctggcttttcttctatcatcattgttacgaatagatccaaagctgcacgtgcattcccattcaaagcatacccatgtatcatagcattccaagacgctacttgtttctctggcatctcatcaaagattcttttcgccttctctatctccccgcatttcgaatacatatcaagaattgctgtacacactttcaccttcttatcgagctttttcctctgcacaaaacagtgacaccattcaccgagactgagagcaccagtatcagaaatagctggtagcacactcaaaatagtcacatcatccggatctagcgaggtggttgcctgcatttcctgaaacaaccttataccttcttgaggttgcttattctgacagtatcccccaatcattgtgttccaagaaactaggttcctctctggcatagcatcaaacaacttcctagcggcgtctatgtccttaatgttgcagtaaccgtgaatcatagtggtccaagtgatgacagttttatgagtcatctcatcaaacaatcttctagcagaggtcatatcaccagatttaacaaaaccatccatcattgcgttatatatcacaacgtccttaacatgaggcatctgatcaaagagcttactcgccaaatccagctccccacacctaatatacccagagattagagccgtccaagaaacctcacttctgtgaggcatttcatcgaacgcattcctcgcacatcccatcttcccaaatttagcatacatatcaacaactccagtcgaaacatacatatctgcacaaaaaccaaatctccaaatctggctatgcaactgcagaccttggtaaacacacatactcaaagagcatgactttgtcaaagtcgtgaaagtaaaattgtcaggagcaaaacaagtctccttcctaagatctctgtaaagagcaaacgaatcaggatactgacgggtttcaagataggccttgatcatagagttactgaggaaactgtcgtctctctgaggcctttgatcgaacaacttacgtgcataaccaattccaacagccgaagcagaaataaccaagaatttggtgaagatctgaacgttcgtctcaatggcgtggcggagcatgaaagcatgaatttgaagaagagagaatcttccgtttcggtgacattgttgaagaagattaaagcattttctctcagtcggattccataaccgttgagtctctcgctcgtataacatcatcatcatcatcttgtttgcaactataataattcatattttagttaaatatatagccttggttattgtagtcaaatcaaatccgaaccggaatcaatttcggtttggttttggttcaatgttcatgctaagaaaacagagcaaaacactatgttgcagcctgctggtgaattctgttataagtttataaccaacagaaggctaaagaatcattgaaagatccatgcaaacaaatctaaacacaaagtttgttattgcaatgtgtacgtctctcatggactgtaatgcgagtaaatgctcaaaattggagctcaatatcatgaagggatatacttacttcttcttgccttctttccttttagaccacaaaaacaattcatatttttcccaaagcaaaagaacagtggttacttttagaacatgttaaaacaaataaataatggagatgtaaattgttttcataatatgatttgtctaacatgtaagaactttcagagtttcaatcaagtctctaggcttgtggaaactagatttgttcgtctacaaagaaaccttatcatgtacacaacaagcaacacgattgctacagctcaaaacagacaaaaacagtaaacgattcagctataaacacatatttttatcttcacttgaatattagtgcaccaatagagccttctgcttcattctcgtctctaataatcatttctcctcaaaatcgacatcaatgatttgggacttaggtggctttttagagtttcccttgctattattattgttgttgttgttgttgccatcttttgagaagaaatcgccttgtggttgccacactatgttcccacatccctcacatctgatgatttggttcttgtaccctataaactgcctcttacatgctgggcattctccctgtgcagacccaaacgtgttataacaaagctttgaaacacattttgtttcataaaccaaattgaagaatgcagagaaagaacagagttttattagctataccttgatgacaaagttgttggcgactgcaccaatgagaagagggccagcaattggaagaacccaagtggcgattattataactcggaacagccatccagagagagcaaaccaaaggaagaaaatagtctggaaacgaaaatcaaagcatatccaacattagaattctaaactcagccagtaagattcactcaaaaccatcaaaggtactcaatgaaccccatgggatgatattacatagatacaggatcacattcacaagaagactcacagcaaaacttccaccaagcggtgtattcaagaatgcactgaattgcttcctgtactgtaatgtaaaacaacaaggaaaaataaaattcatcaatggccaaaatcacagaacatataactctacaaaaccaaccagttactttccacttatacatgagaatgattcaatatatcacagtgtatacataactaagaagtagcttcttcgatcgaaatagtgaaatgaagtattattaccttagggaaatttctactgaaatcggcagagacagtcctaacacgaggagtaatcccaaactcacgatcaatctcacgagcacggtcagcggctgagctagcagcggagctaaagcggcgagaaacagcgtattggcgatcaattcgctcagcggttttcttagcctcaaaaacgaattgctcgaatccatcgttagcgcttctccacgcgtctctccatgctttacctgacttaacgttatcagccaaacggtcaaagtcgccgcgttggaaagctttcacctgtaagaaagaagaggcggcgcgtgggtgtggataaggtgtggtgatggtgaatctaggtgatgtggaaggccacatagaaaccggacaagggaggataaatcccaattctctgtgaactccaaggaaggagaaaccacaagtcttagaagatgaattgagaaaatagaattatcagctcgaagatcctgggctcgtttgagaaaattgttctttttgattggttaaacttgtaaggctataaagagacaaattgaaaacctaaatcacttaaccggttaacaagacattaaaccggaaataaattaaataaaaccaaattacatatcatgttggtttcttctcttgcaacagatgggttccatgcttctatgtgtgtcttttgtatattttacatatttgatttctaagatttttaatgactaaactcattcagtaatctgatacaaaaccatgaacatgaaaattatcgattgacaataaaagttttatctaaaactcttcaaataacaatatatatgcaattaaaagttttcttatatgaaaacaaaattaaatggacttgcatatttatttacaacttttttacatattatatgaaaggatcgagatactatataatataataaggaatccaaaattgaatatttgggccgtaattaccgcattaatgggcagacaaaacataacaactaatgggccggaatcaatgttaggttatgggcctcaaattagaaatttatgttaacgtttcataaaccctaagagatttcttagaagtagtcatcttcttctctttagacctttttttctgcaggggggctctaaagcaaaacccttttcctgaaatcgccgtcgcaaattagaagaatcacctacaggtttgccgcttaatctcaaagtcctaatcccatctcgttcgtttggtgttctctttgttatgattttttcatatttgttgaaatctagactaatttttgagtagtataattgaatatctgttcattgaaaccgtgtaattagagaaaaattgaaactttgtcttctgcttcttagctcttactataagtaagcgactttatttctgggaaagtatcctctttttttgtttgtttgttgtcaattttgtggtctgagtttcagttttacatgtcttaactttgcaacagtcttttgtagggttttcaagacgaggcaatatgagattggagaagtgttggttttgctcttccacaatatatcctggtcatggtattcaatttgtccgtaacgatgccaaggtaattaatttggcataaatctttatcaacctgctttaattcacagtaaatagtttgcttgagttttatattacatagtactcttagattctatatatgtgaatgtctccttgctcgtattctctagcttaaatgaacaatttttgatatatgtcgttatttgtgtgagtctttagctaaaaaaatgaccattttgtatattcttacaatatgtttatgtgtctttagctaggagtttagtatataagaggtttacaaatgttctgataaaaatttgagcataaatgttaatcaaaacaccttattgtttgtatgtcttgttatcgattagctttgtttcttatgcgttattgtaattcacttacaagcatggtatcttctcctttgcagatattccggttctgtaggtcgaagtgtcacaagaacttcaagatgaagagaaacccacgtaaagtgaaatggactaaagcattcagagctgcacacgggaaggacatgactaaggtacgtgttcatttgagcaaaagtttttctttgtttccttggggttgtctagttgatgctgaccctcctgcttgtctttctttgtttactttaccctaaaaggatacaacatttgagtttgagaagaagagaaacagacctgagagatacgacaggaacgttacagagaatacactcatggccattaagaagattgctaagatcagaaccgcaagggaagccaaacatatcgaaaataggtatacattccttcttcttcttcttctagtctcctgcaaatccttgataacactgcttgtatgattttaaaactagactctgtttttgattatgattgtttttgttttttgtatgggacttaggttgaagccaaacaagcagaagaaactcaatgacgatatgaaagaacttgatcagaacattcatatggtccaggctcccggggcacagaagatcaaagttgatgtttccgaaaagaagtctgttcaaaacgaagccatggaagagtgattctgtggtaacaatatgatccgtctaaaagcctctcacttactctgatgctggtgtcatcttaaagaacaagtcttctttagtttctcttaccatttgtttttggaagtctttaaaaaaaaaaaagttttggtttttgtactgataaaacggctttaagttgctatcattttgcaatgtattattatgtgtcttttatcatgcgaatggttaggagacatccatagcatcaattatctcaaagtgcatttgcaaatcagcaagtctatcagaaaaatagaacctttcacagacctgtagtttcccaccggaattctcagtttcagctttgagcaaacgaaccaactcatctttttccttgcgaatccagcctcgcagctcatcacaccactgcctaggagttccatgaatgacaatgcgtagcgagtctgcacctcgtgcaaggcgttgggagattctctgcacgacattgtgatcagtaatgtaggcaccagaagagttcagtcctacatctatataatgaacttcagaaatgctgttgaggaagctttctttggaggctggaatgatctgaatcttttcatgctggctggtagattcttctaccattgcagatgaagttttcgcaaagttggtatccaaggaactgatctcactcatgagctggttcatcacaactccacccttgctaaatccaagcacaatagttttgggacagtgatgaactgatgcaatctggtctatcaaacacacatcagtgccttccttcaatacctcatggaggcaactagataagagggagacaattgatgaagaagctgggaagccaactggggaataagattttggtgctcccatgtgattcactgatggaacaaagtctttgtagatagcaaatggtccattaaagacagaagcttcaacaacccaagcattaacagagttgccaaatttagaaacaatgatttcagctactttctgcagatcatagagcctctcaatcacatgattcccagtgtcttgaactttgtcaccatgaaagaatattgcatttgcagaaggcacctgttgatcaaagttcagaatctttgatcgaaaagctaggatctttatactgaaagttaagaatatagaatatataagagaaagtgtcactcacagttagagttttggaagaagaaaggcaaagagatgctgcaaccctgtagtagttgctagtagtagcatccaacggaatcttcaaaacgccggaccatcgttccatgatcaaacaaactctgaaatcaattcttcaaaaacaaaaagcaagttaatcgattaaagttgttactttgagaacattcatttgggaactttgacgaacactggtgtgcatgccaagcgacaaaggctgcgctaaaattagagggggcgaaaagtgagactacagagagaaaacgtgatcatttaccttacagttgagaaacactcacgatgtgtgtccgagaaatgtgttgaagctttgaccgtgtaaggaactgtgatacaacagcttccactctacaagctcgtggtgaggaagagctcctccaatatgccaagcgtattccttctttaatagtagcctatctcaactcacactatcttcatatagcagatgcaggacttgatatccaggaacgactctaaatcagacctgaagacatactagaatgtgtcacattcacagaataaccccatctaatctaacaatctcaattcagtttctatcgaaatatgttcttaagtggatcaagagacccagtaataataatacaacaaaacatgtaatgaaacttggatcacagaacacacaaatcgtcaaaacctggaaaacagggtacgagacgtattggtcattgctgtgagacttggaagcgagggaaacaaagagagatttgagatcatcgagcttcttctgagtaaaagctctgcaacaaaacacaaacacacaattgataagatcgattttcaatgtagaaattagagagtgaaagtgagattggttccgatgaagacctggaagcagaagtgaagcgatgatcaacagaagacgaattcaaattcccattttcgccggggttttttctctcctcggttctccggcaggtttcgtcgtctctgttcttctattatttttgattgatcttccacttcttcaaaattacaacttcaaccccttaaaatctaaatattctaaatgtaccccattacttttaatgcgttgatctcgaagcagcagagtaaaatataaaagttgtgagttgaaatcacacaaagaagagaaaataagaaagataataaaaggacgaggcaaacacgaagagctcacaacgagattcatgctttcagatttcaactggtaagtctaatcgtttttcatgtttaactgaagcagtagattgttctttgtgattttgagttgtggtgttttctctttttcccgttgttgaaatgttgtgaaaatttatgtccagaattgttgcttcacactatttgctgattcggtttggtttgcattggttttgaaattaaaactgatttcggttcggtttcattggttttgtggaaaaaaactaaaagagtcacgcgatggagaatttggagagatgtgcgtcgataaaaaaaagcatgaattggaaaagggtttacccacagaatcgctttcactcgctcaacgcgctctttctgcgattcggtacgaaatagagccttctgattggcttaaaaactctaaaaaaactcaaatagtatacatgttgctagctcttattattatatgataaagttttgtacttgcatctttttttcagtcaccgaaagttggaatttcgtttgtgataggatctaaacaagtatcaaagtctacaaatgctggattaagcaagttaaagacttgtgattcccctgtatcttcaacaacctcgtcttccaaaactttatccaaagacatctctagatagccatagcaagccgcagttacattatacaggaaagataccacttaaggctttgcattccaaagaaaatatcactgtcactttgtttgatatgtttgttctgtggattgttaacatttgtttatgcttgagtgaggtcccagacaggaaatcaaactcatactatgcatgtagctagtgttgttctgttgaccctataaagcctttacttttactctagtcagcttatagttgcattctttagcttagttctctgctttacacactttgcaacctagtagaacttttctcttatgacacccatgatcaatacattggttgacaataatgaaagtggagttgtacacctctcgcagctgctataacatcttttctttttatcaagtgatttttatgttcagtaatagcttactgtttcattaactctgacaaattgtttattattgcactgtctgaacacttaaagatgaacaactgatcataatttcacatatatctgcagaacctcattgacctggcagactgagagctcaaaggctgaaaccagtggtttaaggcgcaaggaaaggtcttatataaataaagctttcccccaagcgacaatagttttttgaatttaagaaccttttttgcaagttggatcgttcttttgcaaatttgtaggtacttgttatagtatttgatactcttatttactttctgttggtgacatgcatagtgctgatttcactctcttatatatttaggatccaaacataaaacacatatataatcaatcaatagcttatgcctatggttagtcttaacagtttgactattgttcatgagtttctataactatcataaatgttggttctgtggaatggatattgtttcttgatatttctcttgtcctttcttgtagatcgtgctttcgggcctacaacgactacaagccatgtctatgatgattgctgctcagcatgttgttaatgatgctatagcggggatcaatggtatgttctaaacaactttttattagcctatctagttaagactttattcgaatatcttcaaatttctcatgatcatcaacacaaagcaatactagtgaagcatttaaggagggcttaaccattatgaaagattcattaacacacccaatacaacctcttccccaaattccaaatctgcctatcccgacaatgggactacctccattgccctcaacattgccacaaccatctctaccaactcttcccacaatatgttgtattttggaatattgttttgggtgataatctaaatattcttatatagggaaagaaagacgtgttctggattctatgatggtacttcgtgatatcattattagtttcacaccaagagcagactttgtgtttccatcacattacataccatcatgacaacccatcaacttcgacttccacatcatgtaatgactttgtttcaaacggaaaccggaataactaactatataaatgtctcaagataagcctatccaacttcctaaaatcttccaatgctgacaattcaaaccactcaacaattccacaaatggaaaaagactagccgtgacaaaacgataataaaaacacaaatcctatgtatccctacatgatacatcctactatcttaattcttaactaatgggcatgctctaaatagactagtaagcccatgattagtagaaatataatacatcccacattgattgttacttgctctatttgaaatcttttttttcctagttatataagaaaatagattattatagaagttttactatggaaccgaatttagaagaaaaaaacaaacgtcaatatttaatttccatcacattacatatgatcatgatcaaaacctgttgagtcatcgatagatatttcatacagcaaaactcgttggacaaattttgcttaatcttaaaactaattatatccgattatcagaataagaacattctgattggtccattaataaactaccatcgaagtaaaactgatccaccgtgaaatccaactccggtacaaccaaactagactcgccgtcatccacgtggctttccctcttctgctccgacgttaactgatcggagactgacggttccggcgagcgacggcgaggcctaatcctaaccggctcatacttacaagaaccaatcaaatgcggaaaattcagcttagctttcgatcctctgagctgaaacgccgctcggtcgtacgccaccgccgcgtcctccggcgtctcgtaagtcccgagccaaaccctagctccgttcttcttcggatccctaatctccgccgcgaatttcccccacggcctcctcctcactcctctgtactgcatccccttctgcctcggcgcgtgtgagccactcgccttcgtcgccggaggcttattttcctccgccggagaggtaacgggaggaacggagggtgtccagccggagctaacggcatcacggagagtgttgtaaatagccatgtcttgagaatcgtcgacacttaacggcaagtcgctccagttatcgtttaagataacgttgctgaaactcgggttacggaagtacatccgtgagttaacgccgttattaacggaatcagatgagctcataatggattcttgaatgcttctgaaccgaagagaaggtttttgatgagagtgtgtattttagagagtgagagatgttttcttcttggagactaatgaagtgaagagataagtagttgtgtatgagtttataaaggtatggaatgagagaaagtccatggaaggttctttgaggttttgatttgatgatagttgttacgttcttagaagattcgttttcttctttttttctgttctttttttgcctcgttcttaaaatagaacagcgacaaaaatattagttatttatttttgtttggacttttggtctttggtctttctttttcagtaatatttgtctttttttctatagatgatcttgttcttcgatttctttttttgttgttggctgttctttgatattttgtaacccaaatcattataaaatgataatccatatatacttgacgattttaaataactgattaagaaattagttaaattcactttttgtggcctatctgtactcaccaaaaatccatctataataaagttttttgacgaacaaaaatcaatctacaagatcttaaaccttttttgttaaaaaagaatccaccgatttaaaaactaagaaactgtataaactcatatatatctttggatgttaatcaaataatgtttagtgctatatacacataataggttttcactcgatcatcttttgccattggttgcttaaatagagtcaactttgtaaactttgtcaagattcatcaaagtgaacaacaacaacaacaaaaaagagagagagagagagagagagaagagcaaatataagttattgaaaacacttgaaacgcgcaatacaacagtggaagtcaagaaagctatggaaaattacaagattcgtttagtcgttaacgacgagtctaacaaagtatattagtacataatacaaaattttccggtatgaaattgaatataggtagttagttactcaccaataaacaaaagattagattcattcttcgtttatgttttttcaggaataaagtataaatccctccaaatttaaaacattaataagcaactcccattaaaaaaataaaactaatcggaaacaacgcaattttcacgtgctgaatgtaataaaatattgttaagtctgacgtcgaaaggttaagtcgacccactgtgactgtcaaagacacgttttcttaattgcgactttcgttttattctctctaatcgttcctttcgttgcaacaacatctctacacagacaaatgcaaatcgtttaaataattatattcagtattttaattatcggaatataaaaacgccagtcctcttgtttacgtacaaaataacaaaaacgtcgtgcacatatacgtgggaaagatgacgtgagaatattctactaggttttttgataatgggccaaggcacaagtaggtgatgccttgtggaaaagcccgttaaagtcggcttaatcaaaaatcaagtggagtaataataagaccaacgtcctacgcaacgatttggagtcttatcataaagcaccaattaatccacatggctgatggctgctttggacattaaaaagacgaaatgtgttattaaaatggatgttttgtttcaactatggtttactattttgatttctttcaacataagtctttatttaaagaaaatcactgtagaaactattccttgtttaattagttaaatactatagctgagaagattatagagaaaacactaatccagtcattaattaacgtataaatgaaaaaagtgtatcatagtataaccttttatcgttttacctatatgatccctattccctaggacttggcttttcttttttgttatgaaatgtggggattttttgttcatgtagttcccagctacatgttctaatgaaatgaataaagactaatctcatgcttgttcgttaatcatatgtataagtgatataaggtgatgattacaatctaggacctggcctcgaattgtctctttttggcatgaaactggtcggtagaatttatgtaaaagtctatggggtccgttttcatcggattccctgagagataagagttaggatctgacaagtcatcatttctctcttctttgtctgaagcacatggatggggttcttcttggtatagactatagactatcaagcaatagttatgccgactcttttaaacgaaacaaaacacacgaatgccaaaatcagttcagttttgggattagaatatacaaaaaagaaagataacattttggatcgttgattggttttagattatagtaccgtttgggaccacaaaaatgttcatatagtatagatgtacccaaaaatggcagtgacattgacattgacattacgatctattagttgctatgtgtagaaaaaggattccgagaaacctagcagtactagtaccaaaggagattatcttaaataatttcgacttggggctttccatgtccttacaaaagttttggttccatggaagaagattttaatctccgatacaaaaaccaaacaagacctaagttactataagaattaaaccctcactcttgatctattaaagctagaggcgtggttacaatatataacgacatagataaaagactaaaaatggctactacggaaccaaatcttggaagctttagaaaaactcaaagtctagaaatttaccaccagatttcgtgtctgctgctgctgctgatactgctggtggtcccatcatccttttgctattactaccaaacccaaccggatcaatcggtccatactttggtggcggttcggtctccatctgtctcggtacttcaggtggagtgctacaccttatcaatgcccaattcacaccttcaaagaatggatgctgctttatctccgttgctcctctctttgtccctaacctgttctttggatctttcaccagtaaagcctgtatcaagtccctgcctgcatagctagttgctggtgactcggggaatttcaactgttcgccgactacattgaacagagtagctcgatttcctgatcctttaaacggggttttcccatataggagctcatgcacaaagataccaaaagtccaccaatccactgcgcttccatgtccttctcctttgatgatctctggagctaagtactcgtgggttccaacaaaggacatggaccgtgtgttaggttcagctactagctctgggagagaaccagagtgtgatttgaagaaatccgcctgggttttacgggacttgttttttttgtttttgttagggaagatgctgcgcggtaagaagcatgagggttgaatgatgcaagctgatgtaggctccatacaagcaggttgaacgcagaatgcgcctcgtctagatggatcggagtcgaatgttttgatcagtgttggcgaaaccgcgcacctcaaggagagatcaaagtctgaaagcattatgtgaccatcatctcgaaccagaacattctcaggcttcaagtctctgtaaacaacaccgagcatgtggagatactctagtgctagcaacacctctgcagcgtaaaatctgtcaaaaacacatccaaagaaagtgagataacgacgaataaatatagctttgaaaacattgtaagcgagagagaaaacataccgagcagcgtactccgagaaatgcttcccgggttgacgttgccttagagtgtgcagatcacctccaggacagtattccatgaccaaacacgagaatctgtcagtctcaaaatgagtgtacaatgtcggtagaaacggatgatccaatagttgtagaatatccctctcggtctgagctcgattcaacttcttccggtcctcaagagacgctttatccatgactttcacagcaaaatggcatcgagttccgcttaattcagccagatagacactcccaatatcaccacaacctaatcgtttcagcaacttgaagtggctcattcccaaaatcccatctcgggttcggatagccaagatagcattccaccaaggatcattccctttgtgtggcttattaaggcttcccgtgaaattgctccagctgctctcttcgcttaggccgctactatcacttgctctgcttgcactggtcttggtgctttcaaacgaatccaaaaccatactgatactcctgtcaaagtagttcttgtccatactaagcacaacatcgctccgctgagtagtacttgttgcagaagagctattagcaatactcatagcccgagccaaattcatactttcaacactactgctatgtgggctcacattggtactgggaggcagagaagcatcccaaacacattctttgtctgaatctggtggtagcagagagttttcagtgttctgcgatgcacgagccacagagaacggggacagcgatgtagcaggttcctcaactatgctttctgcaggtgaaagtactctcgggcttggcttctttggaggcacacagagcgaaatatcctcgataaagggtcctttagtagtagacatgctcttcatcaagcaaaccgaatcaggtttgtttttctcgctgatgggcacataaacagttgttattagatccatatcgtcaggctctggaggatgactaactccacggaaggagctagaaccagcttcctcagacatatcattgcttcccttacaagtaacatcatcatcagcagctccaatttcttcaatctccaacaaaggatacttggccttcatcgttctaacagacgatacaacaggctcaaactcctgaaaatcattcatgttaccaccaaactgagtcatcatcatatcttccctatgcacattcagaacttggcttagttctctccccaatgtcgtagttggattcacagatcttcccgtgttgtatcgagcagctcgttccctcaaactctccaaatgcatacccggggcatctctagtttcaaagtctaagtatggtcttcttgataagtgaccagagacaggacctttactaggaagtctcttgagctcagcaactctttccatttccagcattcatgcgatttttaacaccaaacacaaatctctctttccctacaaaagcaaataacgtaaactaaatcaatctccaacctcaattaacacaagctcactagaaagatactaacaaaacccactaacaatttcgggaccatatttagaaatcttgtcggcaaatatatatatatatataaacacaacaacaacaacaacaacagtaacacgtgatttgggaataagccacaggactaattcttacttatggttttcaagacaaagaataagaacacgagtgtgtggtttgtgtttgtctctatgtgtgtgtcctaagattattatccattgttcgatctgagattttgcagaaaccttgtcgagaaaacaggagttcactttctggagtgattaaagaaaacattcatagggattattaaactttatcattcaacagaatcaatcgagaaatcccaaatagaaaacgacaaaggaaagagatttcgaaatcgtcactaaccggtaacaaagagaggattatcggcgagattcccgagatcgagaggtttttccggtacaatgtagccgatacagagagagatttcaacaccggaaaaatgttccaaaaggaagaaactttctctgtgaaaatcgaattggagcagagattaggaagataaacacaaaaaaccctcaaatgagagagtctttgggatttgggaatggtgagagagctcaaaggcttttgctttatgtgtgtgtgtgggcgctatctagctcctgctgctgcgactactgacggtaacggagaaagctaaaattaaaaaacaaaaaatggcaaatagagagtggggcccagagtatgtagggtccagtaattaaagtaggacctacatgtgttccttgtttaacctacaatttacaaaatttgtttgagacgtttcttcttcttgtttatgcttttagatcaaaggttttttctttgagagattccgtttatcttttatgtcgttaagatcgatgtctttattcattttgttagcttgattccacaatctttgattagacgtatgctgataaatttattagatggacaaggccacaaggggtatagtagtatcaaacaatagttgatcacatttaaaacaaaaatgaaatacatattttgttgttgttgttgttgtgagagagaagatgaagaaactattccttttgttgtgtaataaaatatagaaaaaatgaatagtgaaagaaagagacaaagaatcaaagccttgtggatttgtgaaataacacttttttgacccaccagcgcataatattgattagctttttttgttatttttctacccatttcccatcacttttcttttcttttttctttgccttttgtttttcctatactcaagattttgtcttcatttgaacatgtgttctttgaaatctaaatgcaacttgaacaacaagtgaaacagaaagaaaaataatgagtggtgtaagtgcaatagagaatgtaagaagagtattacaaatacgtacactcatcactctagaattcattatgatgagagttgcatgggttttaaaatgaatatagacttggtgataaagttataaatttttatcaaacgaatcatttagggagaagtgtattgatacaatgacacatatggcaatgaattgagtttcttgaaaagataagatcacttgtttaattaatcttgtctctccaattccactaatttgtctgctctctttttatgccaataattatataggaacagtttacattatgtgcttgaaagcaatgattagtggacacagtgttttgcgagtcataaaaaaaaaattgtattaattcatagtataatatttgtcttaatttcagcaataagaatagtatagtttgattaagaaaacaatgttggacctcgacgctctaatcatggtgggcttcgtgagtgatactttatttgtctgtaaagtaaataaaagctgcgacgataattttatattagaattttgggaagattaaacactgctaataatgtataaaaatcttcactaactataatgaagttgaaaattctccgagcaaaagaacaaaggaaaacaaagattataagcaacagagatagttgtcggaaaatagacggaaataaccttcatagacggaaataaggctttcgagacgagggtgaattggtgaatacggatcaggtgagactgcgcgtggattgaggggatctatgtttgggacagatttatcttttatcactctaaccaaacggtccaaaacacatgcagtgtctcgtcccttttttttttactttcctttctcattttcttgtttttggaatcgcttaagacgaattttagtgtccttagaaatatatatagtatcgatcaaatcctgtagttctaactcttaagacaaatcttgtctctgacaatgttcatggagaaaaaaaatattcccatgagtttattcaaaatgtaactcctatgtaatactattaaagattaattgtaattagttgtgaacgtaattttgatataactagccatcttttttaagttcattggttctaagtaaatctatgtacaaaactagaaatgatggtttctttagaatcatcaatctttagacataaattttttaaggttgttgagctgaaatgtgaatgcatttatagaaagattttaaaacgcatgcagttttgtatgactattatttaatcataatctttttttttttgtcaaccattgattaatgatatcaatattcgtttgaagttatatcatagttaccaaattctgtaagtgtctttttcaaatggcaaaccatatacaaaataccaatcccgtaggtaatgattattgatattaaattttatgtgggtgtattagttggatacaatgtggaattaatgggtgtgaatgtggggtgctaactatatggtatctttataggtggggcttgaatctgagccttctctttttccaaaagcactaaggagaagaaaaataaagaagggtttgaaacttcgaacacaaaatatatagacgtatcgaaacagtacaaagggataaagcaacacacaattcttaaattttggactctcttctgattccattctcatcacattatgctttattctttcctcctcactgacatcattattttcattttcagaatatttctccatttagttcaataagtctggttttattggtctaatactatgagtctatgactagtttaaaatgaattaaaattgtggaatttggctaactgcaaatctcatattttatagtgcatgcagacagttttgtaaacgtaagttttttaccaatcgctttcttatcgaaagaactaaggtcaacactatctgtaaaaattgctgaccaaaaagattacagatccagaacatctaaatgtaaatagaacttgacaggtaatgggatttaaagtggcccaagtattaaattcattcccgatctagaccaagcccatatataatttaggcccgtaatttttctttgtgcattctggaaccattcacactcttgtcaaaaaaaattattttttaaaaatcagttaggtttgcaaagattatacatttctacttttctagtagttggtttaccagttattgacgttgtggccggtaatatgaatacaaagaagctcgaatataagacttaaccttctctagtgactagtatgtaagtgtcattaactactttacacatatgtaatcgagttttgaggtagacaactagacatgtactaatagtgactagagcttcaccaccctaatttgtcaacaagtcacgatttagggacacgtacaaggtggaaagaattggacggcgaagccgcaaaagaaaagcctaaatgggtccagattccagctaggaagtaaagtgttgtaatcatccatcaattcaatgtatttttggcactactaacataaagcacttaatatcacatcatttcatggaaaacaaattcctattcggatggagaccaatagttgagtactaatccacgactttcaacttcagctatctataatcatttgatgtaagatatgtggatgagaagcccaaataaaaaaacggcgggattttttttgtataattagcataatctttttcaatcgcctttccggccaaaaaagtaaggattcaaaaacgttattgacgtgaaaatttaaataaccgagtaaaaacatatgatttctcgcttttgtggcctaactcgcaaagctttttaggactcttttagtttagagaattgggggaaatcaaaaactaattattaggaatttaggatctagtagagagatatccacccacgctttttcttttgatactcggtcaaagtccacaatcatttcatactcttatagtacaagtaaagcttaaaagttatacaatttcaaattgaaattatcatcaaaaatattagtctggtatccaagaaatcaatttcctagtaaacgaacttgcatttatctggatcttgactacattaataaagtattactatgtctagaaatatttaacatattgtctgaagaatgaattggtccgttgactgaaaacacatgatatagttttgtagtatgtgattaatgtttactcataagttgcacatataacaatctaagagtctgtatttctacaatactcttaaagaagataaaaacaatcataacaagatcaatacctgtaacagactcgtcctaagagaggatactgccgaaagaacatttcatgtttgtaacaaaactcatagctctttcactgtaatgttgaattccaagagtaatccttgtgaagtatacaatgatacttgaaacgcttcaaaacttgttacagagctaccgcgattacttgcctctcttcttgccacctcctttcttctttcctttattcttatttttgcctcctttcttttttcccttagacttgatgcctcctccatcacctcctcctcccaagttcttctcgaccctactgggtttcttcgtcttgaaatctctgtcactactacttgaaggaccagaacgtagcaaatgcttaacatcaagaacaccgcctttgaaaatccctccagttgacttcaatactctctcttctggcgtacgctttctctctgcgggtttcctactgctacttccacccccaccaaatctgccaagaatcacattctgccaatataatacatgagaaaactagccgttgcaacggatcaaaagaacagagttgttcataacctaaaatagtcacctgttctaacatcttctcttctctatctttctgtttcttcatctgcactcgagctacactcagcggtagcctatgcatcttttgtgcctgcaataacaacaaagaaacctcacgaaccaacccgcttgaccgagaaaagatatcgatcactgcaaaaaccttacctttccaccaagtgcagtcactttcttatcctccagtgctttcttatccttccatgtcatatgcgaagaaccttaataaaacaacatgttcagctgaagagtacataaaaacttgcattatccaaatagaatggcgaacaaatgaagagagtgtttaccaaagagtgcaacatctttcataatattcttaaagctcaggttttgatcaatagtagaacccatgccttcctttttcttctccattgacttgcgcttatacaccattatttcagtttttctgatacaaaaatcggaagaggttttaaacaaagagctttccataactacgaagaagtgattctgtatctatgaattcgttgaactacaccatcctaatcgaatttcgattacagattctgactaatctaggtatgaacaaatagcgatatcgatctgattacctaatttctcctaagactacgtactaacctgaaacctgatgggtatgcaaaatcacgattggattgagaggaaaattaaaggagcttgctaggaagagtgacgcagagcgattgatgaacagtgaaatatcggaaagaggagtttagggtttcactggcggaggttacggcggagaaggaaggcttcgttcttctttgattttttttttggcaaaaataaaatctattgggcttggtgggctttttactaacacattggtatccaaaactaaaacgttttacaatgatttagctctctcgttttaaaagctttttcttaataatatacagtatttattaaaaaaattacataaactaatgtaactgaattttttttatttttttttgtgtgtaaagaatatacgtgaattttggatggggaaataaatggacaactcatgatacattgcattggtcttattcttctcttattttttctctagtctttctattcttatatagttaaatctaaatcgtttattttatggggaaaagtacacacacgaatgaatacataatactgtacaatgcattggtcggaaattggggagttatcagctgtgttgtcttatacacgtactcacgtacgactacctctaaaagtatttaattttatcttatactgttcacaccatacgtcgtgggacttcgatgttaattggataaaattgataaatttttatatcttaccggttcagtatagaagattatttactttaatgttatttctcagttctgtgacagaattggataaaatcgagcaacaaccactaaacagatagttttataacaaaagtccattgttgaaaaaaacactgaagaaaaaatgattgatggctaattagtcaatttagtttatgaccagagaaacaacaaaatgtaaaagaataccaagaaatgtgaacgtgcataatactattgcgtcttcttaatagttttctagttttaatataaagagtctctctgcttttggaccaacttcgcgttactccaaaccacaccacgtacgtgaagacttgaaaaaaaaaaaataacataatctaagatgttgtaaattaatttggagttaaaagtacattttctaatttgactcttaatagtacaacgcattattttaatatgcaacacagtcttttcaaaattcattgaaaaaatatatttataatattaataaattaattgaccaaaaagatgcatgggagttgaaatgaaggtgagagttgggtgagagagattaggacatgcattgattttaataattttgactaattctcttttgggtggttgttgggcagccgcaattttgctcaatgttgagatgtaggaggcataaaggcatccacacccacacacactcacacattcctctccccttcatttacttatttattttgccaaatatttatatttttatattatgtccaaatgaccatcatatgtcattattaattcatgtatatattgcgattttacaaaaaaaaacttctattgagatattaccattgtcttatagtaacataagttaccattgtcctgatgtatcaaaattgttaatgaattagaaagaaatagtttaaatttataaatagaaaagattatgtaattaatcttctgatccacttctcgtttcattacgtccaaaaaaatccatttatttataataaaatatctattttcgtggtctccgcatggcgtaggctgttttggtccttgttcaaaagtcggctgaaatctctcagatgacatttgtatgcatatgattatatcacatgattcacgtaaaacgtgaaatttaaaaggagttgataaatctttttggatttcgatatatttttgaattgttaaagtaacctttttccaatttttgtaatgataaattaataatgtataacttttgtagaatacagcttgatcaagcgtaagttagtttgtgttcgacgaacaaagtaatttacttgtctttttaagaaaaatatcttataatagcattataacaagttttatgaacaattatatcatatcttccataaacttttaaaattaacattagtgaaatttatacaagaattacttatcttcaccgaattacgtaaaaaattaatcacaatttgaaatcatgattctattattatcgcgtaaagcgtccatcaaatacttatataagatttttgatattaaattcatagtattttaaaaactttagatattatgtgctaaaattggtaacttaaaatattttctgttattatctgtgagaactaacctttttaataactataatttgtactttaaatcttaattatgattataaaccattatatagagaggaacaaatagttttaagatggtcctgattttcttttttttttcttttttttttttttgctaaaggggtcctgatttcctatatccaatacatgtcacctttaagggtccaagtaatgctagctagctgtgcacatatttgtagaaatatactaactctaaatactaatatatgttacatggtaaacttatggaccagtgttggaaaaaaatgcacaagcgaacaaaaaaagtcacaccgataaattagtttttcaaaagttctttttgtgttaaatatcactaaaaagtggtcggagtatgtagtcaaactgaggtttccacaataacgggaaatggaaaaggttaactgcatacgttattgacctctctaatctaacttaaatcattagagaaaacgaaagagaaatgtacgcaagaaagaaatataaaacccttcaatataagcttaataatctaaaatatgtggcggtctccatatttgatagatttttggacgaggaatggtgtgggtctaacaaagtaacaagtaacgatgacgatgatggtcactttctaaagctatgtatagcttcaaagctagcattttaggtatgggtcggtatgcgatctattcacttttgtgcatatatatttgagactacgacgtgcctgtatatgtacgtatacggcttggatctttgcatgcgatatattctccctttcaagtcaccgcaaaaacagtgatgctgaccgttttcgtgcacttctcagttaagtggtttctttttgagaaaagaaggaacgactatatgaaaaattgaaaactatatctaatttcaatgactacataatcatatgcttagagtccgtcatatatttaacccacacacaaacaaaaaagatcttctattatttacccttcctgttcgatgataattttatgtgtttttgaaagattattttgagtatatatcattgtctgaattttttatattaaatgaaaaacacaatattataaaataaaaataaatagataatagatagttctaagtgagaatgtgttatgcattaagatatatacaaaacatgataaaatgttattttctctacgccaatgaaccatgtaattatgtttagcatacatatagaaatattataattattttgaaatattctatttacttatacaacatgatacttttatattaatacacatggaactgaacactagtttgctttatattactcatagaataacgcattatcacgagaatcatatatcccatttcttggccattattttatggtctttcttagtagtacgttaacataaaaccaacttttatggagagttttaaaacaacacagacatgacacacccacaaaataacgcgttgatggtgaattttcctggtaacgaggaaagtaaatactatacggtaaataaatggacggcgcatgatgcgtgttctcattgggcattcagattttgcaagcaactgaatcttttaagcttttttgccaagtacagagatccagtcaacttcttcgaacggtcggtgcttacgtggcaccatcattggggcattcccatttctcatatttggacggagatagggacatttttgtcttttcacttccttttctgtccaagttaagacaatttacgcctttaggagttttagtagcacatgctcgtgcgacaaaattttatgatttatgaccacattttcataattaccggcaattttttttaaaaacactatacagtatataaacaatttgagattatacgagcttcaatacatttttcatttttcgccctttagagctgtcttctactttactttcttttctaattctaccgctaagttagagatatgtcacgaaattgatttgttaaccgaatcaaaccgttacgcggttcttgattttcttcccggtttagtgtttctttgcacaaaattaaattagttacgaatgtcggatcaatgaatcttcatctatggagaactctccgagctgtttctctgaatggacacgtggagctcacaaacccgtctaccaaatgtaaatacgttttcagctcatgacacgtggccacattgatgctgctcaagtgcggcgagtcacggctactcagccgaagctccttaccgatttcagcgtaaacccacggcgtctcctccacgcgtctctgtatccagctcggcattatcgacgctgtcatcttaacgttatcttgctctctgttttctaaaacaactccaggaactttggtgatgacgtcgtcggagttcacgattcttagaaccttcgtgccttgcttctcaaggagtttccgaaagcatctgtttccgacacgtggacctccgaaagatattacggtaaccataggcgcacgtttaaacgtcgttttgatatcgtaagctgctagtgtcgcgatcgcagcgccgaggctgtgaccggttatcgttacacttaacggctcgtcgccgtaagattggagtagccttgcgatctcttctcttaccatgtctctcaaactgtgaacacctgaagtatacaagcttaaaaacccgctctcaaccatgggcccagagttagacccgtttagatttgctccagtaggcccattagggagatgagtcagcgtggcgcgaaggttctctaaccactcgagacacgtggcggttccacggaaggagatgacgacgtctctacgcccaagccgcgagatctcttctttgtcctggcaaactgccacgtaaccaatccagctagattgtgtagccatccagcttggcgctttctcaatccaacgtggcaagttaatacctgacgtggcacgaaggttcttcgttagtcgataaccggagttgggtaaaccggatcgctctaacaacgtgctcctcggaaaccggcatgtcccgtaggttggagaggaaggatcgaaatcaaatgcttgataagccgattcgacaaattgaccgtaccggagaatctctcgccggagattgtcgtccaatgggtctaaaagaccgtcccaattttgaagcccctgatactccatccatctccggccaagcttaaccgggatactcgaaccagtgggtgagaattcgcctggaatttgatcatggtttagcagcaaactctcccaggtttccggtttgggtaaaaccggtggtcgggaagtggaaactgaaggagaaggaagtgtaagtacacatcgacattgacgattcgacgtcgtaccacttatataagaaacgacgtcctgttttggtagtgaaggtactactacactatgcggacgtacgggagaaagagagaatctcattgttgagaaagtgtgtgtgtgttttaatttataaatatttgatctgattaatcaaagttttcttaaaaaggttgtatatagagaatggagtatgttgaagtcttgaagatagatttggtgtaagaagataaagtgattgaaggaaagaggaaatgggttccttttatagtgagaaaagttgggatctatagtggagttaaagagattgttgaaaatgaaaggactcgactctgaaaattgtggacagtgcttatataagtatatgaatttatatctaatacccaaatacacacattggtactcgtttgtgtatgtaggatttcaagtagttttcgtgtatgtaaaagcaataaatgtaccaaattagaaagctaacaatagctgggtttgtatattttattctatgaagaatgagtacaatctttgacaaagtttcaatactatataaatgattatgtggtacacataagctatgtttgctctttctttcttttacttaactaacatggaccataaagacaatgtgaaatcaatatttgggatcatgaatggattctacgttattagttgtgtttttgacatcacgtttttactctcttttttaatgtgacttatatttacaaaaaaaaaaggatttaaccgaattggtgaccaaaaaaaaaaagaagaagtaaatgtatgataatgagactaagagaaatggacggctgagatgatatgagaagagaaagaagtgtgtatcgaaataaatatctgaccgtcgttttcgatgggactggacacgtgggagttctcaaacaatacggctcagaaaggctttgacacgtgaggaactatcaccagctcgactcggctcatatcggctggatttggtactttcggctttagccattcgccgccaattgctgaatttgaatgctcaaggaaagtacgaagtatacacctcctatattcccacgcccttctaggcttctagcatattgtttttatacaattaacgacaagttttatgtctacgtataaaagcaacatataacaatcttaaaattagttatcgacttagaatctaaatataaaatgtaagtgtaaatgatcatatccaaatgagcagagaatggttgaatgaatccattgaataaggcagaatgatcaagatatgaaatgtcgcgatgaaatttatcttgctagcctatatcgcgggtaacagaataagtccaattaaataagttggagtgatgtgttgttcgggcaaaacgacgaataaaagaagtgcaacgtgagttacttactatttgaatttcacatcacatgtcgtagctctttatatattagtcttgtgctttttaataacatatagcctcttttcatttataaatcctattagagtcttagctgttttgcaatattttctttatattgtattgataaccatcgtgatttctgaaagactgttttaactctatatacttttaagcatttcacattatcacatcgtttgaatgcatttcaaatgttacccacgtgggacactagtaataaaaacacttttagattcttgatatcttacagaatattatatgttatatgcagtaaaaagaattatgtagactatgaactaacttgaagaaaggagttttaatttacacgataaaccatagatactgaggaggagatgcacatggaacgcgtggaaaatgtcttcgttaggaatacgatcaaagtgcttaagcaattaaagtgatttggtgttccaatcgattgggaacaaatttcttgttttgtaataaacaaaaattgcatgcaccactttagaactattggttatgacacgtactttacttacattccccgatttaaatgtcatcgttttggatatatcaaaccaacgtgaccattcatatatttgtggacacaatactacacaccacaaaagccattaattggttctttataatgtttaatttcttcactcttttttccgatgggactatttcaatatcatttacattggccatttcttctttcgggaccatttgtccacgttgttacggaaaacattaaagagtatttcttctttccataccaaaagaaaattaagaggtaaattttaaaggaggccaacagagaagaatggagtgatagccatgacatcaactttgatcgatgttgattttttgtaaagaactaaaccgactcttatatatttatgatttgtaaagtgaaccgaccaaagattgagagatcgatgtagagaaaaagtttagtttacgcagtggataaatatatacgtagctttgcagttggtcttcgtttagtagaatcttttaacttaatatatttatggtatctatcatccagtcaactcatacgataaactacattatgaatttcttatttctcatgctctatagtacttagtatgagttttctactcggattcttctatatactaccaaaacttatttacaagtaaaacttatatacttaagctaccattcttgaaataaagaaaaagggcaaagagagacaattacacttataactatagtttatagtttatgcatgtataaatatttcaatatataaacaaatttcactgtgacaaaaaaaacaaaattcacctttctctgtaatagggtgtaagaaaatttataactatatttactgccatgtcccctgtttgttaggctcgattcggcacattttatcatatgagttttctacatgcataatataacccaaatgaatgaatgtatgttagtagctaacaatgaagtccttcttaacgactattttcatttgtttgttaaaaaaaaaaaaaaagtcgactaaagcaagctaacagtatctggtgcagctcgaataagtcataactgagccgttaaaccatcagaagccagctaacaactttcttttggtgatcaattgttgttcaatactattactagctactttattgtatatcggtctatatataataaatatacgtttcattacaaacagataatatgcaattttctctatgtttataagaatattcaaaacaaacataattttacaaagattgttcaatttaacaataatgtgcgtatatatatggcgactattaacatgattagatgaatatatatttttccaaaatctgtgatgagcaataatatttttaaattttttcttatatctaatagctagttatttcggatgtgttttatttcataactaaatgtttctataaggattcgtggaaatgatctgactctatggtctgataagaattgaagtatatattccacaagcctatacaacgaaattactcaacacaaaggttgatctttaagataatatctaggagggaataaagtatcaaacaatcatcataacatacactgcaattttgtgtaatttaatttagggaatagtgacattaagtttacatgcaaaatggaattgtttgggatatttacttaattgggtaataaagaagcttcttcttccatgtcccagttggcctcaatagttctcttgtactatctcaagttttaatttttcggaattttttaattgtaaatgattcttttggattttactttacaaagtaataataggagtttttgtaaatggtacaacaatatctaaaacatctaatgttatcgaaatttcgtgcgtttgttaaactaagacctaaacttaagtttctaacaaactaacatggttgattgaaaaaaaaatgaatttagttttttttttgtgtgagtcagtcgcctttaagtagttttctatgttactctccttttaaaaataagcctaaaaacatatacagctttctaatcattacacttccctcgtatattatcaatcattgatactcttcagcgaatgaaaaatgcatttacattcaaaacgaactatgccaagaaacttgcaagatatgttttcaagttttgtataaaatctttgaaccgaatatctaacaattatcattaaaaaagttcgtttggggctgtgtttcttggattgttttaatacttaatagagtttttcccaagtagacacaaacaacaaaggtgaattgttgaaaaacaaagtttccactttcctcatattctttttcttgttgactattttctttttatatatcatttcaccaaccacttaaattattgcctttgatatagtatatatttattttatttcctttagtctcaaatgattacatgatatatttttttctttcttttgtaatgccaattaattgcaaaaatattttccttatatgtgaatatatttttaagtaataaatgctgatgatatgttacttgattgatgatggaaaccagttcacaatttgattaaatgcaagaaaagatatgaaaatgaagacaatgactagttgaatcaagatgttttgaaaagtgcaacgtagttttcgttgtattagtatcaacattattactaaaatactattctaatgccatcaaaatatgaaatattagaatggaataatggtatatatttgatagcaatagcatggtattatataaaaaaatgttgatactaatacatgtatatactttccacagatccgtacgagtcccacatttgtgaatttattatttaatcaaataaataaaaaagtattgcaatcatatgaccacatcagtctacagagctggtccaaatccagccgtcttttgtatctgaccaaagtccatcaattatcattcaaatcgtacttttaattttcaattagaactattttgttctatataattaatgtagccaccgtccactacaaatcaatctcataactcattactcaataatcaccaaacaaagaatttgagcgtattggtttcgcattgtatcgaatttgttttaactgattttaaaatcagcagttaaattagcaagaaactatgagaagagataaaggttatagttttttatttttattttttttttaagtttaagcagatgtttttaaatactgatgtctatattagcttagccaaagtttgatagtgagaaagtggatatacaatcattaacaagtataaaccccagtccagcaccaaaaccctctgaggaaattctactttggtaagataagatctaagcccgagcagttccataaccttgggaagctacattcagaaataaacatacttgatatcacacttgttgctccctcgaagataaccagcctttggaacatatttttattgtgaacagacatattttgttgtcatgtcaattgtcaaacatactgcagtcagatatgtttatgaacaagctaaagggtttcatcacaagttcgacctaataagaagatcaaactgagagataaaaccatattgaatgatatagactaaaacagctttatgcttggtttactcaagttcaaaactgaaataatctttcttttgaatcggtaatttgcttttgatctctcacttatagctgacctttagctctcttttttttgttttggctctttttctaaaatactctgtttttgcttaaaatttccagcttttactggcccagttttctgttcaaaaatgtctaaacgtcttgtaagtatattttctttgtttattaatgaattttatatttcaaaaaaaaaaagaattggtaatttgtttttgttttaaatacaactctcttggatatttacgagtgagaaatcaattggatcccctctgaaaacaaaaggtgaacaagcttttgggctcccatcgattatttgtagcccacttgatcatttctttcttaagtttagcccaactgaatcataacagctggctatttgattaatgtccatgtatgcaccaatatattactctttaaaattgtaacaaacggtggattaaaagttcattaataagaagcggtggattcgttgcatgatgcgccactatatttacgaatattacgatatcatgaaccatgaactagatacaaaagtgtagaactaatatttagctttcatttttctaaaaaaagatctgaaccaatgctcgtctaattttggggtaaaatagtcggcggaaattactcgactaaaaccataaatatgtctacccgtatatgattttgtttcaaataggagtcgaaaatgtgaaagcgagttaacgctatatatctcaaaattaacaaactacatggtacatctcatgatgaccaccaacgatttaatattcaaatttgaagcgtttgtcgacaactaataatattgttagcactttttcataaacattgagtcttttagttaatgaaaaccaaaaaccgttaatcttgtatggaacatttcatgcatgaacatgatagcccttattaagaatttatttttgctgaaaagtcattgaaatctatttgaagagtttatattagagtttgattcctttcaatttatttattacgtttcatcatcataaacgttgtaataatataatttgattttttcacatgcatatttcaaaagatcagtgtaaaattaggctaaaatcctttgcttatacaaagaaaaaaaataaaataaaattggcgcattgtcttgtgtcaaataacgcttctcgtcatgcatgaaacagagtggataaggatatacttttaggagctctgaaataaagcagagttcaaaggatttgatcgctacgagtattaatattctctgaccatgtattgctaacttttacttatgatactccgtatatgttaaagtaattaaatatgaccagtatgaccagtgtacttgcctcaggacagtggtattcgcaaaactatcgtatcgtacgttgtttcctgttttgggaagattctaaaacataacaaaataaatagaatctactatatacggtgcctgtgtcaaatacattaaatactcacttttgcatgttataaagttctgtctagtgtctacaaagcgacaaaaactgtgtatatatgattttctttaccaaaatagacgaaacttgtactgtctcttacgtctcccctcgaaccgcctttggttggttctttgtatatagcattaacaatttaaaacgcgaagtaggatgtattaatagttatgtaaagtagttcaattagagttatatttcctatgtaaagaaacaaacaaaaatattaaataaaagcgaaacaagttgtaaaatctttatccggttttgtgtgtaatatcataaaatataccatgcaagtatggaaccagatttcccgtggcaaatgggctaaactataaataaaaacatatgaatacaaaaaactgaaaaagtctttaaaatattttgttgaccttgtatgcttataacaactctattggtggaatgacgcataatgttgccaaaacgcattcatgtatttatattttatactaattatataacaagagctgattttgttcaacttgtgtactatgcgccgttgaaaccgagatagtttcatgctcgcctgctgatttccttgcacttataaattattcatatatcttgaaaatggatgatcaagactagtatatatatttatatacaccgaatgcatgtaggtacgtacgtacttagacactactcttgctcaaatgcagatatatattcaattccgagctggagatttcgcatcttagcttcaacaaacttcatcctattgatttgttttttcttttaatgttccttcgtttatatatgatcttttttacgccattatgattttatgttctatacaatgtgatatttatgttttgcaaagtgaaaaaaagcaatagttttgttttagcaaatttaaaattcaaggagtttaagggtttttattctttttctcttgcgtaatttggaactaaagattttaattttattttttttcactcttatccaaattttttagtttaatcgtcctttatttattttactctgaatttgagtacgcaatgtacagataactatctttaattttttttgtttcttttctgtccttactacacccgtacgtgtgtgaattaataattttgcatgtagtttacattgcaagaccaagtgatcagagctagtcttataccaaggtaagccaaatttagagaaataaatggttgattaaaaaagaatgaaactctgatatgtcatttgcagtttgcgcaatggctatttttttgccaagatttttttttaaaaaatatgtacattgggattcattgatttgttcgtttttaaattgttttaaaaaaaaaattctgttcataaatatatgatcctttttttttttgaatctaaatatatgatcctttttacaccaaaatgattttaagttataattattttaatggtttgcaaagtgaagaacacaagagttttgttttagattgagtgtgaatttaaatgcaaggattttaagggtttgttttcggaatttggaactcatatttcaattgttttaatttttctctcatggtagatgttttagtttatgaatcctcttgtatttatactagtctttgccgaaaaactgatttgtgagaatgaaacttaacagctaattatgttttttgttattggttttgcttggttgtttgtttttgttttcttactacacgatgtgtgggaattaataaattttcatgtagtaacaaattttgcaagatcagagctattgttatatagatatataaggtatcagccaaattttgaaaaagtgcttgattttatcatattgtattgctgatattgttcgaagtagtaaactgcgtttaaaaaaggaaggatctaaacctacgtataaatattctttgccatttacatttcttgtttgtttcgtctgataaatatttattttaaaagtgaaattttgaatttgctaacattggtatttggcattagcattttgcgctatgtctatatttttctgccaaaattttgtttctataaacagtagttattaattatgtcgagtgtaattttttcttctcttaaggatgttgtatatatgtcgaagccatttttttaaccgcaaacaggctgttaatatcttagcgtttggtaagtacgtaggttactgattactttgatgaatactatcagtcgaaatgtatttgtataattaaaaaaaaaatgtatttgtataatttcatttataataatattcaagaaaatttaggaaagttcaaaaaaatatatacgcaatatatagatgagtttcaaaaagagttacaaaaagtattacactaaaattcgtaaaatatattcatgtttagcaagtaaattgaattaataataaatagtgacatctctaatatcttcttcgtcaacaaaacaatctctttaattgaaataatttccgttttatcttttgatttggtgacagcagtttaaagacctatgctacacgttatatatttttttccaacaatatcttacgaacgagttaaattatatgatttttctaagtaaaaagagagagccgaccaaaaaaaaaaaaatcaaacggtaaatgacaaagtaactacggttaaaataaataaccaacgctcgataatcccggataatagaaaaaaaaaaacagagacagctagaaaaaaaacagagctccttcgcgacgagaagtcgccgccggaatcgagaggccaaggccgtagtttgagagtttaaaggaaaattactcccgacgttgattagtctccggaggatactttgtgatattttgttgattcatgtaagtatcgatcccatgctttgagaaattcgatagactttggatttattctaattggactcctaaagcattcacgttgtttctactttgtgagaattcgaatatactgttgaaaattttgcttattttgtctcaaatttgatgtaaatgcgactactttgttgttatcccaaattttcaaattgatgtatagctgattcaataaaggtctcttaatgattcatataagcacttttgttgctactgctcaaattatgaactactagagtgcttataaatccaaaagcttacattttgatactgattaaacaaacaatggctgatttagaagcaccaatatctcaagaaacagagatactaatgagaaaggcattaggggaaaaataataaaggaaaatcttatgacattacattaagctttttatgtgatatataaacagttttgtgatcattttcataattgttgcatagagtagatacattagggatgcacataaggactacaatatccataattcaaaagacgagccatgaaaattgccttgttgaattcttggccatcatcatcatcatctttaggaactgcttttctttattgtgtcaatgaatctttcttgtataaaatcgttgcttgagatgtagttcagaaaatcgttgaaactaaactctccataggctggtgcattgtttgggttgacgagttttggtgctggacttattttcttgtgcagaggtagactgtgaagacttgcaaaagatagccttttgacttctttgttcactgttacacgatgaatgacgctcttgtatatgccgttgctcatcacctctacctgatctcccagctgaactatcaaagctccttctatatacggcacacaaacccagtttttgttgcagtccattatctggagtcccttgctactctgaagtaagatggtcagtgagctgaagtctgagtgtggtggcattcccaaggccatttcaggttccgggcatgctggataacaattcactgccatgacttgtgagccttcttctatctcttcttgtaagtaatttttctccagtcccaggctttctgagatagcttctattaactgcttgtgtagcaaatgtgttgcctctgcatacttgcccactttatccctgaaaggtaggtgtgaatcagaaaataatatcagttttcactcaaagctt

SEQ ID NO: 377 - DNA, 89603 bp, Arabidopsis thaliana
aagctttttctcacaaaaacaatagataacagtagaaacaaacatataaaaacatagcaaaccaaagagatttttctcttttaaagtctcaaatcttcaagaacattggaaaccatgaggaactttcttgccacaatagttcaacagcaaggttagatcaataggaacattgagattaatccccaagacattggctttaagagcggtgcagagacaaaccgcagcttcaagattagcaagaccttgaagaagtgtacaacaaggagtctttggtggagaaccaacaacaacgttaactaggcccaataagtctgcgcaaacaccaagcttaagtgtgtcggtaggacaagtgggtttcacggcaggagccttcttaggcgatttcggggtttttgggggtttaggagtagttggtggacattttgtggaggttacaaaggtgaagaaaagaagattaagtgtaataagaagagctgtaactgcaagagccttagaagccattgtaacgttttgtaatgttttgggatgaatgtgaaggagagatataggacatggtttatatagaacaagttattactaattacatataccgagagataaaatagcatgtgagcgacttaagaaaattagagtaagaaacaaaactatccagctagttggcttttgcaacttgaggtcttgaaattgattagactattttttaggaattgttaatttatttttctatcacagaaagggaaaagacaagatttttgtcttgtttgtttgtgaaagaagaggctccacaaactttgagacagagtgtctctctgggtggtatgcatcagtttgatcatagttgtgtagatccattatacgttgttgataagatattgttttacattgcattagtccccattcctttagatttttttatgaatgatagatctttcagcatcaaccgattatatttccaaatgcaactggacaagataatcccaaaaacaaaattcaaagagtctacatctcatcattactcgtttccaatatttggtttggtctagtttatccaaatttgtaagataccttctagagtggtccgtttagtatccaagaaagaattcatgtagtagcatcatcaaatgataccagtctaatgaatgaaatctttgagggagaaagaaagccacacaaacttataataccaaaggaagataatattataagattagtctatgtacattttaacaagtgaaaagaagatagtaatcacaattatttgagaaatgataaatattgagaacaaactatacacacaaattgaaagttgggaagaagcattaaaacgtggcggattctcagaggtcagagattagattgaagaagcaccgaatgtgttctcgccactgtaagtgatgtaaaggaagccatcttcgtctttcttatcctcgtaaacgcttgacattagctctcctgttggaggaagaacattgtctacgaaaatgaagatagctttctctgcacttagtttgattctcttccgaatcacatacacaaattgaccaactgttaggtctgatggcacaaggtacctgcatttatcaaaatccagaacaattccaaaattacatacaagtcttgaaaacattgaacaaataacaagtttaacatgatcaacaaaaggtacttacttcttcttgtctatatttgggacttcacttttctcagccttttccacaatcacctgcaaccaaactacaatgtaagataatctgaatcttgtagaaaaaacaaacagtattggattctcaaacaacgaagctaatgttctgtaacctaaactaaatttcaccacgaagattcatgatattgtttgtgaaaccgaattcagcatacattgataaatacgcaaacacaggtacaaaaacataagaaaaccttacaagaacagaacagaactgatcaaattaacaaaaacaacacaaagacagatgcatcccaaactaaactattaaattacatacacagactcatgctacatcataaattgaaagacacgcaaaacagagatctattaccataagaaaaccttacaagaccagaacaaaatcagataaaaatcaaaacaaaacttacaggaattcgatcagggtatttctccctgatccttccagcttcagcttttctcttttctgcacataaacaatctctagaaatcagatatacatatacagatatgaacgctgatacacatgtatgcctctatactgattctaggtcacaaaatcgaaacagtaaagaataaaagactaaccgaaatcgtcgtccatcttaaagatgcttcctttattcatctttgcttctgagaatatacacaatcaaagaaattgagacacaaaaccctaattttgttttcaacacccaaatcgaaattccgcgtcttttcgggaaaaaaatgaattctaaatctagagaaatcaaaacagagtatgtaacagagaaatcaacagaaaacttacagagagagaatttgatggaacggataaggataaaactctggaagaagaagaagaagatgatctacggatacaaagtcaaaaaaaggaacctttttcttttcgtctatgattggataacgttaactctatatacacttgtttatatatgtctgttagctgacgtgttgagttattagacacgtcagcttagcttgttctccaaacaaacaaagtcattccattattgttcaaacaaatttttctttctttttgttttaagaatttttgttaggtcaatgtcaattcttttaattaattaatactactattacgtaataaaataccaaattttgtttaatttattgttagtttttcctcatacttttccttttagtgtagaacacgtctttgatttgcctttccctcactttttcttacattgaatttttttcctttcgatgtgtttttttcctccagtttatattgttaacgaaacatgtaatgcgaaattcccattcgtagttctcacgtggcggtgtattgttatatatatatatatatataacagtgtcggtgtttaactttattcattcattatttggataaaattgaataattagaaatagaaagactaaaaaatgaataataagggttgctgaactttaatgggctagaaccgacaaaaaaagaagaactttaatgggccagaataagtagtaagtgggtctgtgaatcgtaagtttatgatagatacgaggtttgatgagacatgagataaaggcccaatacatatgtatgacatattccaaatatttgtattgcgtatcgatgtaattgatacaaaatcgttgtgtttgtgctttctggtgactcgctcctctgtacgataacacaaagatattcgaaaaacataattttcgttgtcttacaaaacagaattggtcatatggagttattcaattcaccaaactctatgaaaatttgtcagttcaatcattttggctctaccaacaaattttttgttaagaggtccctcatcaaagctaatagctttctgtttgaccatgtcttccctggtacaatcatgtttaaacctatcaattttcaaaaacgtgtagagtaatttgtatgaatatatcatatatgcctcacaatatttcataatctccgaaaatctttagtaatagagatgttaaggaacataacaaaataaagaaaggtagtatataattggagcacttcatcattaccaaatgattaatggagaatgtatgtaatagtgcatcgtatagttttatatttcaactatccctagattttagcaataatagttaagatttaataatgtactaatcgatgattatcttgtggtgtagttgtgttggtcgttgtcttaacaaaagagaccatatattataaccatgtagtagcattattgtatttctgtatttgttactttctgccataagcatataaatccaaacataacatcgatacaactaggctaggtatgccatgccatgttcatcttaattgagatttcataatttcattacgaaatttctacatctagagctccattaccgatatacttttcctatatatgtttttaagtgatcgataatagtaactctgcgcaaatgccactaataaggtccgaaccctgtgtatgagacgtaataagaagtttattttttcttttttgtgcaaacgtttaataagttaagacttcatataaataaaataatattggcggaaaaaatataaattatataaaaaacaaaacaaaattcatattgcatactatataatatacaattgaatatctctacacaagtggcacgttagtggtgtcccttctttagctagtcatcacctctaagattgaataagcaagttggtaatttgtattctaaaaataacaaaaaggggcgaaaactaatttaatgcgatacacattttgttttaggacagagacacaatagtggtggaaactcacatggaggtttgtgatttgtcttgggaaataaaccatgtctctcataatgacaatgctcaaataataataataataatctgtttttttctttctggtttaagaacgtaaatatatggttaactcaaggcaatactgatacataataataacataataagcatgtctactttacattcatacacaagcaaccaagaatttcaatcttgtcttggaaatccagctgcccatctccttgtttgattttcatttactccacttattgttgttaaatacatacataaccacttgatttattggtaatgctattatattattgttgtgtgcttgttatggttgtagatgtagtagtgaattagatatagaataaacaaatatgttagcgtgatccatgttatgtcatcgaggtgtttcattaccacgaattttcttagaaattgtgaacaacatattgggaccgtgcgattaatttgatttgtgttgacaaggaaaaaattgttttataattttaacataagtttggtttccaacaccggtgtttagtactgttttaatattgtatacctaatgtaagtagtttattaagaatggacaaaatgtacattaactacttaatatttaaatgaacatttgttttaaaacaaatagcagagtgaaaaatttgacatagcaatgtcattttcattgaccaaaattaatatatcaaagtgcgattcaaataatataaacttatagtttaggtttttaacaaaatagtggaaatgtttcgagatgctttcacacaaaacaatactagtattttcttcaaaaactttaatacatatatatatatatatatatatgaatataatgtagttttgaaaataaattccatgaacaaaaaaaggtcctaataataaattcgaataaaatagtgttagttatttaactaacacatgttatgattaacaactttaagttctttgcaaaaaagagtttagtttttaaatcacgagttaaagtaatcgacaccaccaccatcttagattttgtagttaagactaattaaagaaaaaggaagaatacttccaacataatttagagccaatggatttgaagtgagacaaagcatctcagccgttgaaagattttggtctcgatgttttcaaaaaatcttcaaaaagccacaccagagagacactcaaatagagcaccggtccgtcagattcagtttcgaaaaccaggcccaaagccacctgccagacttgtttcccctctaattactatattgtccttctctcttttgcagtgtcttcctcgaatcttaagggtaaaattgggaattaaagtaaatattagtaatgaaccatctgcgtcagtttcgtctttttgctctgtttcctcggcatatgtaagatttttttttctttcaaaaaacactgtttcagatcagtgaccctttctttcattattttggagaaagtattcgaaaataaagtacgtgaaaacgggaaattatttaaactgagaggtgaaattctttttttttattttcccttccgttattgtattattttccaatggtatgttggaagaatttgttttagatttttcgaagataaagaaaaatcaaccaataaaaataaaaatggcaaaaacatgttttagttccttttgaggaaatgttgttatagagggattatccagttatagacatcatcgcaagaccactaaattcgttgtacacaaaaatgataagcaactagtagtactttgttgtttcaaaatttacaagtagatagaattagctcgtacacaaacctctataatagtactatagaagaagcaacttacggccaaaattgaaagagtaagacaaattaagttgtagggggagagtagagtcacgcgctggatttgcgaagagactcgacaatgatggcacaagaacacggtacatatgtagataagtacatctacagacataagccacacatagaggacgagaaaccagaaagaaaaaaaagaaatgaaaattccttattacaaaaaccaaaagatttagagagagagagagagatagagcattgatgaagaccactttttatatattgcacgcatccatataacagctacagagaaagaaaaaagaaagaaagtgattttagagaaagaagaaaaaattaaagaaagttggggcgccaattacaagttttgagctttgcatgtgtttctttcttccgtacattaaccactctgagacataacctctctctctcttcttttgttgtctttctgttctgttcttgagatctctctctctctctctctctagggttatttttttctgggttttttgtttttacagttactctgtgttgttgaggaggcgatgcccttatcctttgaaaggtttcaaggggagggggtgtttggtttatcttcttcttctttctattcagattctcagaaaatctggtccaatcaagacaaaaccgaagcaaaacaagaagatcttggttatgttgtcggtggttttttaccggagccgacgtctgttctcgacgctctaagaagtcctagtcctctcgcttcttattcttctaccaccaccacgctgtcttcctctcacggcggcggtggtaccaccgtcaccaacaccaccgtaaccgccggtgatgataacaataacaataaatgtagtcagatgggtttggatgatcttgacggtgttctctctgcttcttctcctggtcaagagcagagtatcttgagacttatcatggacccgggttctgccttcggtgttttcgacccgggtttcggattcgggtctggttccgggcctgtgtctgctccggtgagtgataattcgaatcttctgtgtaacttcccgtttcaagagattacgaatccagcagaagctttgatcaatccttcaaatcattgcctgttctataatcctccgttatctccaccggctaaacggtttaattccggatctcttcatcaacccgttttccctttatcggatccggatccgggtcacgacccggttcgtcgtcaacatcagtttcagtttccgttttatcacaacaaccagcaacaacaattcccgtcgtcttcttcttccacggcggtggctatggttccggttccgtcgccgggaatggccggcgatgaccagtcagtcatcatcgagcagctgttcaacgcggcggagctaatcggaaccaccggaaacaacaacggcgaccacaccgttctcgcgcaagggatattggcgcggctcaatcaccatctcaacactagtagtaaccacaagtctccgtttcaaagagcagcttctcacatcgctgaagctctcctctcactcatccacaacgaatcatcaccaccgttaatcacgccggagaatctgattctccgaatcgccgcttacagatccttctccgaaacctcgccgtttctccaattcgttaacttcacagcgaatcaatcgattcttgagtcctgcaacgaatcagggtttgatcggatccacattatcgatttcgacgttggatatggaggacaatggtcgtctctaatgcaagaactcgcttccggagttggaggaagaagaagaaacagagcatcgtctctgaaattaacagtctttgctcctccaccttctacagtctccgacgagttcgagcttcgtttcacagaggaaaatctcaaaacattcgccggagaagtcaagattcctttcgaaatcgagttactaagcgtagagcttcttctaaacccagcttattggccactctctctacgttcatcggaaaaagaagcaatcgcagtgaatcttccagtaaactccgtcgcctccggttaccttccgttaatcctccgattccttaaacaactatcaccaaacatcgtcgtttgctcagacagaggatgtgaccgtaacgacgcgccgtttccaaacgcagtgattcattcgcttcaataccacacttctctgcttgagtctcttgatgctaatcagaaccaggacgattcgagtatcgagaggttttgggttcaaccatcgatagagaagctgttgatgaaacgacaccgttggattgaaagatctccaccgtggagaatcttgtttacacaatgtgggttttctccggcgagtttgagtcagatggcggaagctcaggcggagtgtttgttgcagagaaatccggtgagagggtttcacgttgagaaaaggcagtcttcacttgtcatgtgttggcaaaggaaagaacttgttactgtctctgcttggaaatgttagacgaagaagaaaccacaaatctctctctcgcttagctaatttctctgtttttctttgtcagattttaaaatgttgttatgttgttcaatgatgttcttagtttcgagactgttgtgttttaacattttaaggaagtcagaatatataatcaaaatctccttttgttagattttattttgctctttttgagtttatgcataaatctcttgtccaaaaacagaaattgttaaagagatatgttttttaggatcttcagagtctacttaggactaaaatagacttgtggaaaattctggtaaagatcctgttacattgttagggttaactggttaaggtcatacattattacatatacattgagaaaggttagtttatcaattttgaaagaaaaaaacaattttatctagtcattagaatgtaattaggaactagtgaatgaatagtcacggtacatgcaaaataacacatttctatgaaatagttgtatatagtattaaaatttacaaccaaaaagtgaaagctaattgaatttatcattaggtttttggagcttccaaggttgaatgtttgtttaatcgtctcgggtccctaacggattttttggccatgaaaaagtttgtttttccgtcataaaaaaggttaggactttaatttcgtacaatgtttattttagatgtaggggttaaatgtatttctaagcttttagctttaaatatacatatccattattgtaatacgacttttgttcgtgaaatcacatgctcctaaagtcattggtgcatgatattataatcttaggtttgattatagaacttttttatatgttaactacattggacggtcttaatttgtgaccaacctcttcatttaagtattatcgatatagttttatgacgtcggtgtagaaactaaacattgtttaatcatggccatagcccgtagtagctaaaaaacgtgtaacttttatagattggctggatggaaaaaaacagataatgtatacatatctgttaatatcaattattgtcgtctttatttactaagatctatatctaatccactagcatcttacctaacgattaataaaacactagatgaagctttgttttgggtgcggttaatttgataacaaaagacaatgttaagttttgttcttgtagtaatctacttgaataaggtttgttattggaggaataaaattttacgggaaaaaattgaaatgatgaaagacctttccaaagtcatgttttaaattatttataataaaaaagcaaacagaaacgaaggaatttttttaataatatgaaaaagtttggttgtgacacctctagtagcggatcgaggtttgcatgttactttgtatgaaatgtttttgttttggttgcctaatttcgaaattatcagcttttgacaatataaaaagcatgcatcagctttaacttaataactttaaaactaaaaaaaaaagacgtcatcaataagatatgagaatttgaactagaaatataataacgtaaattaaacatggagccaaaccgacaacagacacttttgttgtctccatgactgccaaagaaaccttcataattttactttagacattaattaagaatacaccgattcatgcacacacctagtcacctacgtgcttacaaatattacatctattatttttttctttattaaatttatagaaataacaatctaaacatttcgtaaatttgctttaaaagtgtaaacttactaatttgaaccatctttatttatattacaagctccatgaaaagtaaaccaaaatacaagaatctcagcctcaaaagctaaattcgtaaataactttactttcttagttacaaatatttaaatgaatgtggttaaagtttacctaatctttgtgacaattcataagaaaggaataaactttgatagatacaaaatcttaggctgatgctcgctccaccaatgccttcgtcttcccaatcatttcttcttcttcttcttttttgcgtctttataattgatttcttttggttctttaaaaataaattaatttacctttttccactcgatttataaagtctgcttgggaacaacgcattctctatcaaccccacatcattttagtcctctttttttttggttttcttttctcaagacctctttttagtttctatccattttataagaaagaagacaaaaaaacaaaacataaagccaacaaaaaaaatcaaaatcctgtagaagtagaaatatgtgtaaaaattgtagatataaatctctgtgttgtctacaaacacaaaaattggattgagcagcgtaaatggagtcgtggtagacctttcagtccatcaccatcaaaataatggaatttgccataatcatgttttagggtaatttaataagggaagtcaaaactttatacatttccctttttcataagaataaagagttcctaagataatttgtctaaaaataataatccgtataactaccaaattatgcacccctaaagagtaaagactgcccttctgggtcaactatatcaaacataaaccaaaccggtttttacatcgaacgaagaagcatcaaaccggctgcaatcagataaaaagaccaaggctctgctttcaccttcaaatcctctgcatctttcaaaggtagcaacagagaacactgcaccatttgtttcacagctacattgccggatcttaccatggatatgcttgtaagtttcctaaagatatggtctttccggtagatcatcaaactccgtaaagttttagggatgttttgatgaatgaataagctaatgcgccggtgaaaatgtaactatcaactctatctaatattccacctgcaagcatgagaaggaagttagaggtagcgggagtgagaagaacggcgttgatttatggattagttaggggtgactttaccgtgtcctgggataagtgaaccagagtctttgacgccagcatcacgcttgatcattgattcagtaagatcaccaaagactgacccaaagaagttaagaaacccaaaagctactgagctgagaaaacaaatgaactaattcagaaacagagagatcacgaaaaaccgagtttcgatagaacgaaatgaaatctctaagtacctgaacagagattgtggccaactgagatatttagagagtaatatggtaatggctatacaaccaacaagtcctacaatagttccttcccatgtcttcttgggactaatactagtaagaggtgtcctaccaaaagtctgcaacattttctagttaaatccaacttcaaagcggttgtagaaaaaaacttatctgtgaggtatcattcttggtgttacctttccaccgagaaaagcaaatgtgtctgtcgcaattacaccgctgaaagaaatcaatgttgccacaagtccaactgtccaatgagcttgaccaccaagaagaattggccatgtccttccgatacctatagaaacaataggaaaaaaaactggtcaaaaggacatctgaagtaggacaaagcagagagcttggcctcaataatctgaactttagagatataaaagaggagaaaaggcgagagcttgccagtgttaagcgcaggagcagctaaaccacagcgaagcttaacccagaaagaagggagataaccacagtaaaacagaccaaacattgtactactcagctgagcaaaacgtggggatcctctttgtactaacaatgctattgcaacaacaaatgctgcagatgtcaccaatatatcaatgttaccaaagtacctaaaaagatatttcataaaatcagtcaaggagaagtcatatcacatggataacaagacaagcttcgacgtagagcgttttagctaaactcacagtgtaagtatgggcataagggcacatataaccgagcaaactcgagatacatatcgtggaggaggagtcattcctttagctatgcctctacttctaacaagctcgaaatattcgcgggaaccgataaaaacagaagatgctaaagctacagtgaaaacccatcctccagctaacacaacacatccaacaggtaaaccaatgccaataccaaagatcactcttttcttaagctggcttgctttcttctgcttatcttccacattctgcaagttatggattctatcaattccctaaaaaaaaagaataaaccaattgagaaatcagcgagggctcactgactagacaattaggctgattctcatccctaaacactatcaagtcatttctcaataaagctaataaatgagtctttctatctcagctaaaacttgcttcttctaaagttacagattttgaggagaaggaagcataaagtgattacctttgagtggtcatcatcaccaagctggtctgattcagctcgagcaacggccgtgaggaaacgccggctaacagaaatccgaccaagtccggaacgaaacaatggtttggtatcaccggggagacgcagaccagataaagggggacgaattaggggttttctagtgaatgaacggcaagggcatgtacagcgagaagtcgataaaacaagttcagcaaaagtcgccattgctctccaaatgccccaagaggcaaaaacaaaaagaggaaaaacagagttttcttgaaaaatcaaaatctctgaatcatcatcatgtctgaggaagagtgtgttcgtatttgtcatttggttaatgtctcggcgagttttgttttgtagctacgaagatgtaccaggtagagttagaaccttccgacttatttagagtctttgtatcctcactaaaacaatgataaggcgacatgtttcatccctttattctatgagagatggagagaaaaagttaagatgagagaagacgaagaaacaaaagtgtttaagactacacaaagttgtaataagagagaggaaaaaggagattttgtgacaattctaagtcttatggaaaccgtaatacaaatcctctaacgcactaagttcagattttaaccaaaggtgcatgacgacgataaggcagaagagaagattgtcctcctcacacaatttgatttctttccttttcaatgcttttttaagcactttgagacttttggagtattttgttgaagggatctgatcatgtcctcttcataatgtatcccaggattaaaccgattaggccgaccagaagaacgtacatgaaagggattccaccactcttacttctcttgctttcgcgcctcaactggtcctgcaatattaaatcttttgttatccgagaggtccttgttacgcaacaaaaaagaaaagcagggtacatagacttcattgagcttaaatctaacaactcagataacaagaaaatggccgctactcctaaaaccgggtaactagttatgaaagtgttaatcatcaattcccatttcagacaaatagtttctttgattcttaaaccaaccaccggaaggaatagtttaaaagttgcttaccaattcttgttgaagcctgttgttcagttgaaccgcagagttcttttcctcggtgagttttgtgaccagagctcttgcctgatatcatacaaattgataggtgtcaaaattacattgtaatagaatgatcactcaggtctcgtaacttcaatgctaaaatgtgccaattaatagctagtagatatgttgcagcttagaccaattcaattgcatgcataatcagtaaaaagctaaaactacagcagaggaaacaatattcttctggacgacagtattttcagaaattagttaaagcttcattcaaacaaggttaagattattcagaattcttcagtaataaacaaaaagttaagattattggcctaataggtttgagaatttcacatcaagcagtgtacaataaaagagccattaagttgctaataactggaatgatctgaacttcaacaaaaaaaagactaaactgctctaaacaacctgacaagaaagagaattccatagggttgaatggtaaactaatgtaggtagcgtaatagtgtaaaactcatccactctttatcatgccaagttagctcagttacatgaagcgtcagatgggttattaaattacctcagatgaattatcctgagcatcaaccctgtctgcgctaaatcttggagcctaaattaaagataacgcaaggaaatcaacactagtacaaaaaatctatgatatctcagcaagagatgtgtgttacttacagcagtaaaatcagaagcattcccattatcagagacagaagccctcggtgaagagccctcttcagatccttctcgaaccggtgatggtggtcgtggtggagcaacatagacaactctcaatttagtctcttcaactcgatgccctgcctctttgctaaactgcagtgttcatcattacacgataaaacactgtcttaagtaaccaaagcttccaaattaaataataataaatagtaataccatctcatgtgtaacatccttgggggtggctccgggactagcgactacacattgaagcaagaacttatctttacactgcagatcagcaggagcttccttttgagcttgcatggtcactaattaaaaaacaaaacaaaaaatcaaaaccatgatcccaaaactagtaaattcctcatcttttatccattggagatcaataacgaaaagaaagagagacaaacctaaaacttcagaagaggatctgggatgaacaacaccagtattaggcctaacgcagtacttctttggattcgtcgtcttaacctttaaaaaataattgacccttgaaaacattaagatatacacaaaagaatatatatccaattcaaaaattgaaattaaccttgaaggcgacataattatcggtcttgttacccaaatagagagaacaagagatctgcttcttcaattcaactacacatccaaagaaagaaatcacaaaatcattacaactaattcggaagaagttggatctaagacatatgcgaatcatcgaaaagttgaggaaaaaataaggcttacaagggaattgaaggtcgacaggatcgatggtgagaagctcgttactcatctctgatgcgatattttattccgattcaactgattaaaaaacaacaaatctaaaagaaggtaaatgatgttttggtacggtgacgctgatctccggtggtcgtcgccgatggaggagagagagagagtaaacaacaagatcaacgtgggacagcaaacgtatgtcttgtttctcttgccgtctccttaattagtttcagaccggagactcacttcttgttattactattacacccttaatcgtctgagttctcatggtgcgttattaggggtataactgtcatttggacttctttttttttctttgaccagcgcaaaaaaaacacatttattttggctttatttttatctcttttttgattatctcttctaatgtataaagatagagccaaattacagcaaaacgaaacaattattacaatttacgattcgtcgtactctacatatcaacatttgtattaattatcaaaaagactgatagataatagtaacaaggttaggaatggatggatatcggagaaaaagacatgatgagtttgaccaaaatgacacagatccataaccagaattcaggattaaaatagtttaattataacatactcataaagtcgttccaagagaattaaaatagagacttctaagtgcgggaggctttagaacacttgaagcagtacgcaagtgcccccatgagtaggagagtgagatccaaacagtaaaaccgtgtaaatgtccgcgctacaaaaaaaacgtgtaactaaaagagttaggttcaacaaaacaaagtctaaaaacatctatacataaagcatatatcaaggaacttaccaagttgtgtctcggccatgtcctaaaaatgcataatgattttccgttcaaagaagaaacaacataatgttcgtaagcagagagttagaaaagatattaataactactcccttactaagaatattagagcatgttcaattgattaggaggtgaactgattaattaccatgtaatggcgtggattgaacataggattataaacgtcgacaaggccagtaatctcctcagccgcagattcggcaatgttcataggaggatgtaagcaaatcatcttttctccatcaagggggcatacacaaggttctctacgtttctggcgtccccagaggaataagatacatttcactgttgcattaagaaagaaaaaaagacaattttgttagggtaataagttagtccagaatcaggggtttgtgttaaaataagacaaagctaaacaccctgattgttttcagtcacacacattagctagtgggttaaagaaagagtaaagaagaacctaaccgcagaatctgtgcatgcaagggtcggcaataactaccggagaagagactgataagcatctacggcattcaatagcaataataggtatctttctgcctgcgagagaaaatcacaactcttgagtaagaaaaaatcttggtctatagctacactaataattctaacaaatcagccatacataaccacgtaattctgattgatttagaaattcggagcaaaacgaaacacatatgattcaagtatgatcgagaattggagaaaagaaaagtaccactcttgtatcgacgctctgataacgaagaagatgatgaaattatcggcttcgacgcctgaagatccttcgatgccaattgtggttccaggccttcggacttgccttgaaatgtatccatcaccttattggtcacaattctaagattaaaacatgtcgatggtcgatggaagtggggagttagggtttcgagctatgatgaagaagaataccaaattgggaataaaatatttggaatcacatcaatgtttccgagaatattcccatttatttatcctctcgacccgtcgtcgtttaggtgtgtctgtctgtaatacacggcccactatagaaacaattggcccaataactagccgaggccaacaagtaaaaaaaaagtaatttgagggtaaaaatccgagtaactagacgaaagaagaaggacgaaacgcaaaagatacaccattttttttggagtagacatcaccgtaaactctaatgagacactgagcccttgaacattgatattggagtgcaacactcggaggttgaagatgggattcggagaccatcacttcaagagttatcctagggttaagctcgaactcgaatcccatcgccacagtggacgggagtgatatgcgccagaaatacagtgatctcagctcagtgagcgacacaaatctcgggtgaatatgatggcgggttgaaacaacgtatctatcagcctctctgcaaagaggaaacatattcagaattcaccacacaatgcttattgttctataagaggtggaggaatcaacgttttaaaactactaaccgtctaatctgcacagaggcgttccctgcaatgagagtgagcccaacatgccacttatcgagcttgtgtccgttaatgtcaacaatactcatggaagtgagttccaaaccagagagtttaccgaggtgtctaacagtaccagtgaactgagccataggacgggatgatttggatatcaacttagcacctatttccccatacttaagcttatacaagatcccaatctaacaccaataacgagtaaaagagtaagcaagcaagcaaaatcgtgaaaattttcgtcaatgttacttataacacgcacgcacgcacctctttattgaaacaagtggatttgatagagttgaagtcatattcctgaagacgctctgatgtcagctctagttccagaccctgaatgtttttagctttgatattactgacctcatttctttcaaagtagccatactctgcaaaatacaaaatcgaatccagattttaacaatcaatcaaatctctttgtttcgagacaagacaaattccaaaggaaacataaaggtgacaactttcgagacttgccttcacagatcttcacaatcttatcgcctacagaggataagaatgaaaacatcgccgatgatcgaaattttgcgagtttagggtttcgagcgaagaagaagaagaagaccaacgtaacaaacaaattgctactaattttgcgattctctagacccgtcattatgtgttgcaatatgggcctatctgtaagagacggactaaggcccatttgttgttgtaactcaaaaggttttaaaattcgaaaaagagttacaaataaataattacgataatgtcatattgcgtatatatgttgtccgaaggaaagtgacaacaacatcatggaataggaatcggagaagatagatgaagagatcggagaacattatcggaatcggagatatttagcggcggaagtgagaatgcactgtaagtcgaacttcctcttctcatctctttcatagtcaataatgccgcaaccgtattcctaaatatcccttctcccgccgctgccgaagtcaccgccgcacatctctcgtatccctccgcctccgccaccttcactggatccaccgcgtccatcgtcgtctcccactctcttactagtcttgaaacaagatcagtcttgaaaaacggttgatgaagaactttttgaataaatggtgatcttaatcctcctcttgttcgcttgtcgtacttctttagaatctttgctaatcctattatagaaacatattttctccgatcagattttgaagattccatgttttagaaaaatatatgcatggtaactcactcaccagtgtaattgatgttactgtagtttactagcagaaccatttcgccatggaaattgacaatatcttttctgatctcactaatattctctctagacatttcatcattgtgtccacatttctctaccaatctctgaatccgatattgcaactcctgcaaaaaaatttatatataatcatgttaattaaatctcactctatcaaaaagtgttgattgcacatttttagtttataatatgttgagaaaacttccacaaaaaatactttttaaagtgcacaaattatttaataatccaaatttctatattagacagacaaatttctagggactaattaaatggaggatttttatatgtgtcactttcttaaaaaatcttcaataccagaaacctaaaataccactctgttgaaagtttcctcagatcgattacacattttttatagttataatacttatcaaccaataaaaaaaaggattaatttctcctacattttttaaagatagatcagtgatggttaaagcactttatagctagatcagttgacttagcaaactcaacaagaacaatcgctctgttttttctttacccataaattataccttgtggtggatgatgaaatcttcttcttgttcgacgaagaaagcattaaacttgtcgatctctgcgttcaacaaaccgacgaaaatagattccaccggcgccggagaagagatcagattcttgagttccttgtaacgaagaaacttgtctcgccactccggcaacgactcttgtatctgttctttaatcctctttccaaacttcatcaaaatataaactcaagtttttaccttaaaaatgtgtgtggtttattttctttcttttgattgaaaaagggaaagaagtatattataacgaaattggaagaagaagaagagggtaaatatagagatatataaatagtggttgtgtaaaggaatatgaaagcggatatgcttagctttagcgtgacgaagtgttgtgaatatggcatgtaataaagagatgaaaaaaaataaggttagattattgttgttgtatagtaaaaaaagaagaagatacaaatcctctggcatattcggtctctaataacttctctttgagtcttatgtttgaactttgaatttagttataatgctttttcgtgtttttctatttttgaccggaccttttatggtatgtttggtatattacatgagtttgctgatttcatgctatctttttgtcaaggtataaactatagaatttaggttgattcctcgatcaactaattttatttatcatataattcatttgttttttgatttttctgaatgcatgctgttgatgtgactgtgagtcgcgtcctcgagagaccgtcgagcagaaaaaaaaggaagaatttgccggtacgtttgtgggattagagataaaagtgaccaaaatgacccagacccgtgaccagatttcagggttaaagtggtaattaatgagatctttgtaaagtcttaaagacagagaattcgaagattccaagagaatcaagcatctgttgttatttgtataagtgtaaaataatgcaaactggaaaatattaacaacatgaaagttttagtgtttttggacttctatgtaagttgggcttactttcacgttctcgggcccagtccttttatttctagtcatttaatttggtttttctattttatgtatccactttgtatgggctaagcccaatgtgtttatgtccatttgttgtttttggaaaacgtgtttctgtccatcttataaaattaaaaattgtcaatcaaaattaaacgttttgacaaaaataaaagcatgaaatatacaactttttgacatgaaataaaaagtaaaaactcttgaaatttatcccaataaactcttgaatgacacaattttattaaaaaagacattcataactaatattttgtaaacactaaatccaagtgattagacaccaagcaaaaaatggatttatgattttaatctgtacaatcctagtaagtacccaccaaattattgcgtgataagtctagttgaacaatcacaacaactttgaatcacacaactttgttgatatctattgagtattgagtggtgattacgaacattattagtgattgggtatgtttccaatcataagtaaagaataaagtatacgtgaagaataattctaagtaggtggtatagcttaaaccccaaagccaaaggccaaatttgattctacagtgaaaatgatatagaaactataagagcaacaataaagtttgtttctcttctctttttagatttgactttcttttttttgcccctaatagtaggcgaaagagatagatgaagtgggcactctttacttctctagcttctaaattgaaacagtaatacctaaaattgccagagaaaccaagaaattgatacaattacgaataccttaaaaaatgtctaacaaacaaaaaaaaaacaaagaaaattgaatgctctctctgatttaggccaacacgacgtgaggctagtactgaaacaacttggcgttagaacatgtaaaagtagcctcctttgcattaacataaaagtaatcaaaccccaaaaaacaaagaataataattttgacaacccgaatcacgcaaagtctgttgttacctttcgttttcaccattcatcaaacaccaaagaagtttcatcttcttcattaggtgcaggaagattaagatcaatcatcctctgtttcactgatacttcttcttcgatttggacaatttgacttactgacaatcctcttcctgctccgatgttacttccgtgagatctcttatgacctccaagtgcttgccctgaagtaaaaaccctaaaacagatcggacattcatgaactttcttctcctttactccaagaacgtactctgtttcaacttgctctgttttcgtcatgcatgccttgttcttcttgtggcttgctctgtgtcctcctaatgcttgatacgatttaaacactttaccacaagtctcacacttgaatctccctctgctcttgcttgatttgtaatcttcactgtcatgatctgtctcatcttcttctacacgttgcttcttcttcttctgttgcttccatttgtctctggacagcataatgagacaaaaggcgagatcttcctccgttgttgtatcagaagctgagctgtgatgctctggctcggccactaactcactgggttggctcgttgttagcttctcaaagtcgaaatcaaacgatccaagtttccgagttcgtttagatcgtcgccgagttgggttaatcctggacgactcggtttcactttcaacgtcgtcgtcttcagcgaaatcaaactccaattcatcatcaagacgattcatcttttgattatcaaactcaccagaagaagaagaagcatcggactcggtatcgtcgtcgtcgtcacagagttgactcggccgttcctctacttcttcttctgcttcaccagttattacacaacgttctgcagaaagagtaagcatgtgagatctcatgtgaccacctaaagctcttccattgatgaagctcttgaagcaaaatctacacttgtatctctccatttttcaacacgacaaaaattacagaacagagatagagagagaagaagaaagagtagagaaactacaaaggagagtaggtgacaaaaagcattcttcttctgcaaccaacgaactaaagaagaagacgaagacaaaaataaaaataaaacaattaaacttcaattcttttatttaattctatatttataaaattctttgaaacgggaagagtaaatattgtttttgataataatctaattaaagcgttttgccatgaaaggggtgaagaaaggacaatgtaacatgcgagctttgcccgtttctgccaaaagaaaaaattactctaaaagttattccgaaaatatccttctaatgaatcggattaaaaatagcaaactttctattttaacatcccgaattaccagacgcaacgcgtcttaattgtctatttttggcattgatttcaatacgtcaaaattaatttatttaccttaacctttaacatcccttaagggtattttcggtacttcattttataggtgatggtcttttttttgttgttgtaacgggacggaacagaacaaagcgttgtccaaaaatgaggggagaatgttaacatttttcatatggctgtcattttttgtttcagtttgtgacagccacgtagttattcacaacgacggtttcacaacttatcctcacccaccagtaactttatctctctaaaatgttaacaaaacaaaatcaaaataataaagttcagattctgcttggcctcttctctcttgataggtttggccaactgtcagtgacggtatctccttagctagttaaaagccggcttaacaacatttgattagtataattccactaatctctcaaataaaacgattatgaatgcaaaagaaaagtgttgttaggggaatttctcctttgattttggatcttccttccaagttagagacaataataagaaaaagtcaagagtgcataaatttcgtttatcaataacactgccacacgttcttgttcaacaaaaaaacaaacaaataccaactaaagtctacttagatagaatcacaggtgtgagcttaattgtttttgtcaaagtgtatgttcttctactacgagtaatcaaaattaagtttaattgttaagctacaacacacattttaactttggacccactaaaattgatgtctttggtttaatacgaacctaaccatcgcacttttctttctttttctcgtagcacacacacaacgatcatgtgatatttttcaattcatcgaacctgatcagtcgaatttcaaatcacccataagtgcaaaacaaacttgcacacattggcgttttaagttttacttatttaactacaattagtatctagtcctatgagagagagatcacaaatattcaaataaattaaagttcaacgttccacaatttgtcggttacaattgcattaaaaaaacttacataagaaggtaatttaacacacaaagactcttttttttgttctcactcaaatttggaaatctttaaaaaccaattttgtggaagcaattcgtctacgcaaagtgtaaagttgcgatttattcttcaatggcatgacttaatggtggtgccaaaccactctctctctctcaaaggaaaaaaaatcataactccttttaatttatccgttgactcgtctcgcgttataccttcgaattaataattattagctaagtatatgtgtttcttgtttatatagtcagcttattacatccttagatggtagtggcttttcttatacataggttaatgaaattggtcgaggcatgaactaaagtagcaatactcttgatgaattcaactaataagagaagtaatatttacaaatttaactcacatatgttgttatttattatcttcttaagtatttgattgagcgaaagaaaggagtaaactaaaaatggaaaagaagaaactttaaaagttgccaatggagtgacaagtatcgccagttctccaagttgcctaaaaagcggcacgagtgatgttagcagacttttttttttgtcatccaattacacgagtttaattcgtttgacatttcatttagggtaacattcgatgcctctcaacttgcataagaaaagcccattaatatttaggcccactagagttttattatagttcaataatttgatatgaataggctaatctcttgagatttattataatctgatcgaactagtttgttcattagtaaataatctgatcgaactatttgtatgtattttagtaaataatctagtcaccttaagcttattatagtttgttttctatagtcaaactactatataatctcacattggtaaatcatatatatttttattattcattactatatcagaagctttcaaagtttgactagagaacacaatgaaatgtgtcgaaatacaatatgacaaaatcctaaaagttaacaattgaacggtaagattcgtcaggtttccaattcgccggaataacattataagcgacgattactttatgagattcaccagaagtaagtctaatgttgaatggtcctcttagggcactgcctgagttgaccttccatacggcggatctcatttcttgcatggagatgaaacttccgccggctggttgaatttcaacattggacaaatctccatcgccgttttcatactcaacaacaaatgaaatgtagtacggatttgctccagcgtccatacgaaaaactatgttagttcctcgatataaacatgccgcactgataataagaagaaaaaaaaacaatagtcaagattttcatattttttgaacatcttatatgtgattggtatatcatgtcaatagttgaataacaaaatactcaactaagaaaaatattttaactgaattaagttctttttgtagaaaaaaaaaatggtaacgtaatttatttgatttatcagagttttattttctttttacgcatcaacaatatccaacacaatttttctcaaatacatggaaacataacctcatggtttctcttcaatttctatattaagtaaataaataacttaattaagaaaaaaaactcaaaaccgggaatttttaaagtatatatatatatatatatatagttaccgtttgtagttgacacgtataacaccagcggatcgaagttgatcggcttggccaggtttggctaaggcacccatggctttgccgctaagatcaatgtggactggttcagaggcgcaaggaccaccagggcactcgtcggttatcgtcaccgttattggtgaccccgagcacgctggatgtccgatgcatacaacctaataaataaaaaagttaacatatactatattagttgatacaagtaaaatcttgttgtaaccatataatatatatacattccgatcttgcatgctacgtcaatttttttccaaaccaaatagttaatgttcattctatctgattaattaaatatgtcaaacatagtttaccatttttcaaagatataataactggtcattttattgaatatataattatatatactcaatttatcatgttttatgaacaagtttagctatataaaaaatattgtatcctcttagatgaacatactataataaattactaaataatacattacagaaattaaaaagcattaataaagctgatcaacaatacatatattacaatcgctcttgccctatatacattcatacgaacctgataacatgttccacatccttttccattgttgaacagcgaaggacctccggctgaaaccatcgcgtatagtggtggattagccaccgcggaaccgtacccacaagctcctcctacacacacatatatatatatatatatatacacacatttaagcatcatataaatgaatttactattctaagaatttatgtatatatattgttagaaatatgtaatattattacgtaccggtgctaccggcgccgaatggttcaccgtaccaagtaactccggcggttcccgatccagctacatctatagtctcattttggcaataacaaaattttagtgagactgcgaaaagagctaggagagcgaaatatctttgtgatgatgccattgatatatctagctatatactttgttttgtataaaccaagctttctatactcttttaaaggtatttgtgaatttgattcattagatgacaaagctttttagtttttataatggtttattttttgaacactctcacgacgcgttcaactttcaaggaaattgtatatttgcaatataagtgaatctttgtatctatggaggtcaaactctccaatcctcttacatgaaaggtaaatttgaagtgaaaagagtaaaactttagtctaaaagataaatgcattcaagattgtgttgaacaaattttggtaattgatttcaaagtaatttattaataacttgctataaaaacttttggtaaagaaatagcatcattttttggtcaacaaatacatatcttcttatataagattttaattatattggtatatttactaccattgacaattgactaaactttttggtaaaaaacaaatgtaaatactattaagctaatattaaacaaaatatgtaatgtctattatgaatcgatgaaatgtaacttacgagagcaatattcatgatagagacaacgatagataaaaatatacaaaaactaagaaatagaagtaaatagtgacaatttgccagcagtattcatgacaacataaattttatcaattttttttagaaacaatattatataactagttttattataatatcataaaagcccacaaaaataaaattattttcagaagcaatttaaaaatggtatattaattgctgtaatttttgaaagaataaattatatatataagaccaaaaacatgtatttaggctaaatagaggaaaagagtaaaactgtcgtttaatgatgctgccgagcgccgagccagtagtacatcgggataaagtgtagctccgaaaaatgcagcacaaagacgaaaaacccttattagtattttatttattcgtttgtagggaaaaaagttgtcattaaaataaaaatatacaaggcaaaagcccaacacgcctaaggcccaaacagaacgagagaccatcttctcttgtgccccacacacacacacgcggcgtctgattgtattcgtgatatcatcctctgctagttattgaattcaaaccaaagtccctttattagtatttaaccctctgcttccccagatttctgaccttgtatgcttcttcgtcgtgttggtacgcgttccctttctctttaacttccttgtgcaagttggtttagagcaagatattattagctttaggtgtgattcgatattcatgggtttcagaatgcatctcatatttgccactagtgtgaaaattaacaacttcccctttagggtttttgtcctcattcatcaattttggaaattctgatggaaattcgaccttggttagattttggaagctttaggctttattgatcagtaagattggaagctgttgtttcgcatcgattcaagcctcaaaatctgagtttgggagctatggtgtggtgtaaacattgtgggaagaacgttcccggaatacgcccctatgatgctgcattgtaagtcttgttcactcatctgtttctttctgttggatttaggagctttcttattctgaatttcgtgttgcaggtcatgtgatttatgtggcaggattttggagaatttcaatttttctactgaagttacattcgttaagaatgctgctggacaggtgggttttactgttacctcgctcctcttactttagagctaccaattgattgattctaatcaaatggctgcagagccaagcttctggtaacatactcaagagtgttcagagtggcatgtcaagctcacgtgaaaggataatcagaaaaggtaataatatatatattgatttcaccaggctttcttgtagattaatatcattccgctcttcatcgttttgcagctactgatgagcttatgaatttgagagatgctttgggaattggtgatgacagagatgatgttattgtcatggcttctaatttctttagaattgcacttgatcataatttcactaaaggccgtagcaaagaactagtattctcttcatgtctctacttgacttgcaggttagcaggttcttaccaatcgtttttcttatgttactagtgacgctctgtatcttaaccaaaaaactttctttttgacctctaggcaattcaaattggcggttcttcttattgatttttcaagctaccttcgtgttagcgtgtaagataatgagttttctttccatctccatttctttttctctttatctgataataagccgaatcacctgtcagaaaacctactgtttttgttgcagttacgatttaggttctgtgtatttgcaactctgtgacatgctctacattacagaaaaccacaactatgagaaacttgttgatccttcaattttcattcctcgattctcaaacagtaagtattttttttctgtattgggttgatgcaaattttttactgtgttccacacttgttaatcataaactttcagtgttattgaaaggtgcacacaataataaactcgtgctaacggctacacacattatagctagtatgaagagagattggatgcaggtgtgtgtgactcctcctgttacctacatgttgtttgtcttaagagttttgtttattttattatggctctgtgttaatgttgccttgcagaccggacggaaaccaagtggaatatgtggagcagcactctatacagctgcactttctcatggtatcaagtgctccaagacagatatcgtaagatgttcgattcaactagtgttttgagcctttttgtttcagtaattcagtgctgatgtgtgttttctaattcaggtgaacattgtgcatatatgcgaagcaaccctaactaaaagattgattgagtttggagataccgaggctgcaagtttgactgcagatgagctcagtaaaactgaaagagaaaaagaaacggctgcattgcgaagtaaaaggaagccaaatttttacaaagaaggagtagtgctctgtatgcatcaagattgtaaacctgttgattatggattatgtgagagctgttacgatgaagtatgtatgttctccggtttatgtttttaattatgtttatgcaactccgagtttttgacaagtagatgctttctgcagttcatgacagtttctggtggacttgaaggtgggtcggatcctcccgccttccagcgagcagagaaagagagaatggaggaaaaagcttctagtgaagaaaacgacaaacaagtaaatgtaagtttagtttgatctctgaggaaactttgtttgtaaaaccttactatgcttcaaatccgacttttggcagttggatggacattcggatgaatcaagcaccttgtctgacgtcgatgatagagaggtgggcaaataacttttactttcttgtctttgtattataaatgctttaacttcaccaaatatgtttcagtctgatcgtttcactgtttcccagttggattgttattttcggacgccagaagaagtgcgcctggttaagatcttctttgatcacgaaaaccccggatatgatgaggtgtggttcattaggctatagaatattgggttccttcagagtttggttgttgttaatatacataaaaatgaatcttttaccaaattggtttcttttgtagaaggaagcagctaagaaagcagcaggtttaaatgcttgcaataatgcaagcaacattttcgaagcttctaaagcagctgcggcgaaatctagaaaagaaaaacgacaacaacgcgctgaggaagaaaagaacgctcctcctccagctacaggcatagaagctgttgatagcatggtcaagagaaaggtaaaaaaaacattgtatattttgaagaaaaataattcttttgtgtttctgattttgagtctttaacttcttatacagaaatttcgcgatattaactgcgattatttggaggagctttttgatgcgtcagttgagaaatcacccaagagatcgaaaaccgagacagtgatggagaagaagaagaaggaagagcatgagattgttgaaaacgaacaagaggaagaagactacgcggcaccatacgaacaagatgaagaagactacgcggcaccatacgagatgaacacagataagaaattctatgaaagcgaagtagaagaggaagaggatggttacgattttggattgtattaaaatcatactttttatcatctaattattattatttggttgactaaaaaaagtattttatgattttggcataaaaacataattttaccgttttgacgaaaaatatgattttgttctttagcgggaaaatatgattttacggttttggcggaaaacatgattttactgtttttgtgggaaaaatgattagaattttgacgtaaaataatagtccgtgatttcacaattttagatttgttttggtgcaatatgtaattaaaaaaaaaatattaaaatttttttttatagaaaattagtattattaaaaatggtatatttgttaattgttcctaatgactaaaccatctctatccaaatggtccaatcaattccatccaaatgagttttaaaaatttgcctaaacttacaaagtcattgagatggatcatccaagtgaatcatccaaatgatcagttaaattgtaaaaaacaaacatcatttttcatctccatctactttattttctttttttgtaaagagatgtttggttaacaggagaggttacttgatgggcaacaaatcgctgtgaagaaactgacaaacatgtcccctcaaggtgtcgaggggttcttgaacatggtaagacttatctcgaatctccaacacaataatctcgtccgtcttcttggttgttacgtggacggaagttatgcttgtctacgagtacctcgagaatggaagtctcgattcttttctattcgtttaggacatttcactgtcctttcttatcttcttatagctgtgttagtggaatgttctaaagtatgtgttttgctgtcgaccaaagccaaaaatgtaaactgaattagcagacgaggtttgatatcatcaatggcatcgttcgagcaattctctatcttcaccaagactcccgattgagaatagttcatagggatctaaaaccaagcaatgttttacttgacaaagacatgactccgaagattcgggatggctcagatctttgcagaaaatgagacaaaggctaacacaagtaaattggctggaacattgtaagcaaactatctcacgatgagaaaagctctcaagagttatgagtttgattttcattttcatttggcatcagatatatgtccccagagtaaggtaagtagaaaatcatctcgacgaaatcagatgtttacagctttggggtaatatttatataagaatatcctaaacaaataaaacatttatgccctctattttattttgcataatcataaataataattgtacataaagttatattagaactttataatttttttttttaattttataagcactttataagcaaaatataggaaaaaatgttacaatgcaatatatcggccaaattcaccttcgaacgctgctgtcttctttggtgggccgggggttgctaattaagttctatatcttatgagagattttataatttcttgtaaaatttgaagaatttatattgaacttatgcttttttaataaaataagtatgaaagtgaacaaagcacgcgtatatataaggcataagtattgttgtcaaaagaattatatatatatataatgtatttgacggcaaatatatatatatatatatattgacaaatcttttatgggaaagcataatcacagacacaaataaatattttgtcttaagaaataagcaaaactattattagataacagaaaatattttattatatgacaaatgaaagaatgtaacatagatattataaataatgaaaaacttataggtgggtttagttgatgtatactccaatatatttgagacttcgagctaatcgtccttcaattttgtaagaaattattctttctcatactaaactaaattcgtgagttgtcaacaattttcaatcttaagataacggacatcaaattcgatgaaatcattcataggagtagatgaaaacttgaagtttgtgcgaaataaatgatcagaaatatccaaaatttgctttttagtttttggcggatttgattttttttatagataggcatgatcataatatacaaatatacaataccaacaacccgattaaaaaaacaagactaaagaaacaacatccatgagtgacgtggagtttccatgctgcatcaaatctttaattgcactgcataggaaaataagagttcaaacgattttattgtaacaatttttgacaatctttgaaatatatatttcctactattgttgacaagtaatatcttttgaactattatttttctgaataaagacagtctttaaactatttattttctaaataaagacaatcggtgatctcactcatttatgaactgtgatagtgttttttcctgtttcaacatctttgcaaggtagaaaatgtaaatacttgtgtttgctttgctagttaaaatgtcaaatttaaaacaagaaaaatacaaaacaccaaaatttgtttgattatgagttgaacatgattttatagcaatctctaatgaattgacaaatccattatgagaaaccacacggaccataaacgaacaccttaatccatggatatctatagtgtccgaaaccgatgttattagttcacatgtctaagaaactattagatgacaaaaaaataaatctattacatgacaaaagaacagattaaacatagattttgcatatctccttgaaatttcaactgatacatagaatagaatctacaatgctgatacatcatacatacatacatacaacttcagtctctatactgtctctctatttacatttcaagaaaacaacaaccaaaaagacaaaaaaaagaaaaaccaaccgacaaggtaatcagaaagtcaaaggccctcctcaaaagcaaaacgacaaaaaaaaaaaaaaaaaacagagttcttcgtggactacaacatgattcgagaaaattgatggtgatgatgatgtttagggtcttgaacaatttgtctagatttgatttcctcagcgcaacgcaatgctttttcgatctgataacctcctccaatactcacttctctttctagatgacaacagtaactctcgaacacactcacattcacatgcaacttaaatcccatcaagaacaagaactccagttccaaattgttcaaatcttctgtctctaatcctcctactttcgcaaagtacgagtttttgtagttcctgtaagaaacaaagatgaagaaaatgagttgaataaaaacagaggattttttattcaaactttgttttgaaggtaatttaacttacatatcttcgacgtatttggaagcgatcatgatagttgtgataaggagacgatgtacattggtaagactgattctgaaaccttggttattctgacagaaccggtcaatgtatacataagccacgacgtaaaccgatggaccggctttggtataccggaaaattctctctaggtatgattgaatagtcatatcaggaatctcccggcaatcaaagacacgtgtcttaccaaaaccaccgtagctccggctgattctctcgttcctagctaaagttcgttcgatcagagacgagagaacagagatgactagaggtactgtgttggaatcatcttggtaagagtaagagtagaggtctgatcggagcttccttggagaaatcgctagggaatccattgatcggagaaactttatgggagtttaaagaaatgagaatgaaaatggaaagaggttttgagaggctttttatatacagtagtcaagaggatggagaagagtagctttccaatgtagggcaacttcctcacctcttctttatttgaaaatgtttttgtttaatgtttataagttactactaactatagtgtgtgtgtgtgtgtactgaatatttaatagtattcaaacatagctcgtgcaaactacgaaagttcaggttttattttgaaacgtaactgtatctcagatttgaatctctttcgtctagataaagcaatttaattttcacctactattagaaataaacgtttttagaaagtctgttcttaaaagcttttgttggttttaaatacaagctcaaccaaatggtagtgacttggtggtcaaaaatatatggtgtcaatttgttttttccattttcgattctcattcaatgtcgaaattctttcattttcgttagctcagttgaaataatatcatattttaggtttttaaaattttagtgaataatctactccggttgattttgatctagattaccctttgcagtaaaaaaaaggaacacaaaacaaaatcatcagtaatgaaataataataatgtagttgacgattttaattatttttaaaacatttagagtgagaggatacagaattttataatatggaattttatcgaaaagagaatcgacataggtttttggagtcatatggaagctgtagagaagttactaaaataagtaattaattattattcaagccgagtaaacaaaaaagaaaacaaatgtgtaagtgcaacagctaagcttctggttagattttccatattttattcacattgatatttcaaatgaacaaaactacaaaattaaaatctcagcttataattaaataatttaaacaaagaagactccgccgacagttctctgtagaagacggtgaagactgaagagaggtagagagatgtgaactctcattatcggtgaaactctctggtggagccggagggttttagcctttaggattgtgcccactccatgttatactatttttataatttatcaagtggttttaaacaatgcgtgtcactgtttaagacacacgtgtgaatttcgtcaacgtcgagcgttgtgagtttcgaaagatccacaaggatcactactcacacgcgtggaggttccatcaaagccaacgcacacaaacatttatttctttcaattatactttacccgtacatcaatttttcttttaatacaccaaattaccaaatgtgcagtttcttgtaaaacaaacttcggtgggtaatttttgtaagaaaatggtgttatatataattaactttgaatgtacgattatatactcaagctgattgtagaaaatggtgtgacgttcatgttcctctgtccgaccccatacaatgtgcaacacgaaattgtttattcataactgaaaatttctaaaaattatgttactaaagaagtttaatacttgtaacggatagagaaaactaattcgtttgcagatagactaattcatcattctaaaattctgataatataatgcccaatgggatggacaaaataaagacaacttattgtataccaactataagccgtattaatgagcaaaaactattcgcattagatggtagttcgtttttaaaaatgaattaaaccatgatccgcataccaattagtcccccttacaatacaaccattaaaatatctagaataactgtctgatgtggttgcacaaataaaataacaatgatttttttgttagaaaggtgtatgattacgaatgctaataatagcagtgagatttcactatcttcgtcgggcgatttaaaacgaaataaatacgttcctattcatattttcccatccttgcgttgcgtatctgctcgacaactgcaactcaaactaaagaaatgatagtacaagttctgatatctaagctacaactccaacatgataagcttgatgtatttatcatcgtgtggtgaagaataataaagtaaagaaaaaaagaatagatgaatctggagggacaaaataaagtaccaagtaataaattgagataaccaccgccaccgcacgaatacgtttgatattaaatgccaaaaaagggaccccgttttgatttttcttacacacaaaatatcgtcccgtcaaaaataatttactatttcatcattgcttccctgattcatttttttttttttggtatttatttgtctctcccccactttatttataagatttaacatcatatcttttccttaatattcatggcaatgatatatcattgtcattttaaaagtaagagtatatactatatagtgtgaacatcattctaccaaaaatgcatatgagaaacaatctttatttcaaatgatcaataaacataacaagtatttttgaatacggaaaactaatctctctattatacaaaaaataacattaaccaacatcaaacttagacatggttttaataaatcactgctttttggggatatataaaataaaaatacacagcattgattgaaaggaacacatgaatgaatgaaataagattttggaaatgatcgatatgtacgaaggtaaaaaaaacagtatacatttgtcgagtctgtgaccgtacacaaaatgtcaggctccataaccttatgcccgatagaaatgtatcattacactctctgattcacatatctgtctccatctcgagattcgtgtttcagatctaatacattaatgtctacgtacttttgttcgtacgtacgaattcgatacgaaacttctttcatgattcgtatcccaattcccaaccttacttacttttctccaaattattagtcattaacaactaaatcaccttataatcaaaactcatatggaaacaatgatgtggacctaatttcggttggaagatattttgtttatctggcttagattttgtcctttgatttagggaatcaaaagaaagtcataaacattaattttgcctgtaaaatcacacatttcagatttgttctcgtatgacctacaaataaagtatatgattacacaatcaatctttagattcaagaactttgtccctacttcattatattcagctaacatttctttttaattctctgtcgtgcgaaaggttgttgacaatataaatgatatatgtacttgtacgcgtaatgctgctaatacattttaatttgggcttcttctgggccttaatatttgggctttaaataagttatctctcccacttacgcatgtaaacacagctctgataattacgctgaggtggcattttttaattggctaatgcattaagagatgcgtggcgagaaatttcccctcctataaaaattgttgaagagtccggtcaactccgaaagtcttcaaatctctccgtcacgaatcgttctctcgtcgtcatcaaaatctgttagccgaatcaggtgagccctttgttatttttgttgtttatgatctggatctctgttgattgaggaaattggtagatctatggatttgttagatgagcgtgtgcgtagatctgaaaatgagatctcgatgttgaatctgaatcgcggctggtatacgattcccgatctggatacgattcaacatgcatagcatctgagaattttacatagaattttgcatgttcaatttttgtctcgctgatttgagaattttaggattgcttcatctaatttagttttgttgactcgatgctgaaattagttttctgcgtttgagagtttcgaatcttccatctcctgaaaatgcagctcaaactcatatagtatatgtcaaattgaaacaagttttttcaattacgtttctaagaactcttgctaaccagaacaggattgtaccaagtaatttacatgattaaacctgaatttgtactgatttgagcttacggataaatggaaacaatgtgatagtagtatataaatttgggtatacgtagttgccttgtgggaagcaaatcttttaccagaggtttctagtatcatatagaatgtatgaccatggaaaactaaacatgagcttaatggtgtttagatgtctcctattatttcatttgcttaataattctctgtttttttttatatatgatcgctcttttgcttccgatttcctaaaggccaaccattattctcagatagagaaaagaagaaagaatggtgggaagtggagctccacagagaggaagtgcagctgcaactgcaagcatgcgtaggaggaagccgaccagcggtgctggtggaggaggtgcctctggtggtgcagccggatccatgcttcagttctacaccgatgacgcacctggtctcaagatctcccccaatgttgttcttatcatgagcatcggtttcattgctttcgtcgctgtgcttcatgttatgggcaagctctactttgtcaaatgatgacaaagataatagttgaagacaatgccaccctaagtgactgctagtgatccaaatattatacagtggtttcaagttaatgttttaattttgtggtttattaccagagtataaacgatctttcacaattccagtttctttacattcaaattttcaatattcttcacacatattataggcatgagctttttatacatctcacaaatgacaatgagtactattatcacctttttaactttaaaaaaattcaattgttgatagcataacacactcatagtcaatggtcttgagtgaaataactaatctattaaccataactaatctataaaagtctctggcgtttattgaacaattaagaaatagatgggaaatgttggagataaactaaacttttcagggtcttagttgtcaatctgaaacggggcccgattaaattatactcgggtcattcttttgtccaccgggtttttcttcagaacttgagcgaaggaggtcgcgatattggagagatcttttctaatggcagcgttgggagaatcatcatcctcagagatggacaacgcgaaatcgccggagattcaacaatcttcgccagtgcatccgccggagtatcagaagatcgcaacgacgacggtggaaaatgcggcttcctggatcgatgatgcgttgcgtcaggcgcttgtttaccagaagacgatcacggagacggtggattctaccattgacgcctccaaagctcgattgtctcagattcgagatacttctgtagctcacacgagccaaaccatcgtaagctaactacaacctcctaattttcattggaatccaaagggaatctgaaattcacagcatctactctctatgtcatccgtgtgattgtttatcctctcacgaaatcgaggtttcggtatattataggattctcttcgagacattgcttctgagtataacgtttacgagcaaatggtgtttgggaagatcaaaggtctgctctacctttggtggctacctctatgttgttgtgctttttttctcttagctcatatgtttgtcaatcttgtatgtagatggtgtgaatgttgctgcatctcatccgctaatatcaggcaccttagcttttggagttgggatttttgctctgaaaagtacgttttctggatattcttttaatctccctagagtttcaatcgcctagaatgttatgaactgtagtgattgctcttgtttgtttgcagagaccagaagatttgtatattacaatactgtacgcatgtttgttagtgaagaggtcagtgttgtatacaacatcgttgaattataaattggtctctctgtggttaaatatgttcttgaaacttgacagtatgttttggattcaggctttgctttctagagcagatcttaaagtaaaagagttgcgacaatcaatggatcgtcttaaagccgagagtgaaaagttagaggtaagcctcttcttttgttttaatgagttgttctgttcgacatgaggttgacgtttgtggagaagactgcctatgttatgcgtttagttagctatattactctctttcggttttgcttcaacatccctttattttgaaatagaatgtgtggcatttaggatgaaaattgaaaggggttaggtttcgaccagagaaatttctatatagccttattcagtggatatggatgaatgcttctactttcgcaggcatatagcctttcacggttgaagtaatttagtgcaaggatattcttgagtctaactctttcttaaccctagtcaatagatatatagttatataccctccaactaatagtcaatggtcttgagtgaaagtagtctattagaagcaggtattggattacggtttttgaattcttaacaatttttaactttcattgcttcagagagttgcaactgtggcagaagaggaattcattagaggaaggatgaaactcaggtttatgatccagacaaattacaacatctgtatattggatttatatatcaacatgaatattatgttaactttcttcatcttcttacacaggcaagcaggcaaacaaatcagaggtgcgatcagctcagcttataagattgaaaagcaagcagcaggtacacctttctgtgctatcatgctacagtttgtgaaaccaaaaatatgcatagaacagaagaagaaaactttcgccgtaacaaagcttatcgacttagaccatgatcattttttatttacaggtttgaaagatgtactaaaagaactgccaacgagagaagcttctcgattccgcactcaagtaagtgttacttgtcttttggctcttataggtagagtataggagctgggatctagagttagaagctgaacttggttggaataaatttaacaaccattttatatacattgtataatggagatatctcaattgttcaacctcagatatcgaagcgtgcttctgaagtgaagcaagagagaaacgctttgacaaaggaagtgaacaagatcagcaattatggtatctccgtatgaggcaaaccaaaccccattttcgagttacgaatttctttactcttgaggttcttctttagatgatggagcaaaattacacaataataatgtctacaacatgattcaaactctttttttttttttttttggtttcgtgtcaaatgctaaagatgtaatctcttgttgtcttcggttttcaagggtttcgttcattggcgatagttagtacttagtaatacaagttcatgatgatgttgtcatgtttaagtctcccatccatgaaggtgtatttttaaatccaattttcccttttgaatttaaactgaaaatcaaaccttatatgatcagttttgttgattagagtataatgtaaaccgaaccttaaatcacaatttcgtaaaccggaattaggaccccaatttttgatcgaaacgtgaagtcgaaataagggtgcaagtggataatatatataactcggaagtctgaacactgacgccgtttagtgtaagcggaaattaatgaagctttttctgatttcatgcttcagtaaatgattaaatcatttgcaaatatttaaagaaaacaaaattgaaggatgaagtaaataacgtaggagaaaaggcaaagcccaaagatataatttttttttaataattaacaattaaatgaggtttgattttccaacgttcactaaaaattttaggctcccgtcgtcgtcggtcacgtgattaacgccgctaggatcgcgacacgtcatcatcacgtgacgttacccaaaacccaaccccaagaaccaaaaagaaaaacaaaaaaaagagtgacgacggacgaggcagtgaaaagtgaaaactaaaacgggtggtggtggtgatgaagttgaacttgttgtggttgtctcataacttctttctgccgtcgaagctccatcactttccggtgagagtttgaatgctgagtcaaaacaaaagtaggactcgaagccggtctatattccggtacaagtctaccggatttaaaccggactccacaagcgttacatagtgttttaggtccaagtggtcctgtcctccactgtggcgttttctccgatgcacagtgagtacatctcctcattcctcctccttccgtagtctccgatgacgatgactgatgtcttcctcctcctcctcctcctccgccggattgttctttctttggcttgaatttggcggcggagtgaagctgctgatgctcggattccagtggcatcggagaccatgttccggcgaaaggagcaggagctcttgatcgtttgcttcttggtttccccggaaaggaagtttcagttttgacagaagtcatagttcctcctaatggattcgccggaaaatcagcgaaagaatcgtccacgaattgcgaaagccattcaagatgagctgcgtcatcactctgcacacaaaaaatacaacaaaaatcaaaacacaatctttatttcaaagtcgaaactttgattggagaaagagagagggagagagattatacgggaacgcaaatgtcgtggaggaaggagtgatgatcggcggaggaagggagatggtggtggtggaaactagggttttgaggaggagggaaagaagaagaggaagtagcggcggtggaaccaccggaagaagaagcggagaagatgtcttcgttggagaaatcaagaaggtcgtcgattcgaagtaagtctggtgaagataagccatagacgtccattgttatagattatgattgagtggtattgttctctcttgcagacgaagactctgactctgtctctctctctttctcactctctgtgtgactggttagagtctttaataggggagataacgagagagagagagggcaagagaacgtgcagagagagtgaccatgcaccgtgagtgaccgactcgaccttattcacttctctcttctttatttattttttaatttatcatccacttttatctataagaagaagagagttaaaactttgcacctactgagctattgaaatgttcaaaaacttatactacacggatgaatagagttagtgtaaactcacttatatttatacaaattgttattaagaactacacaaattaattcactataagagttacaaaactatgtgagttttgtggaggaatagagtgtttttgatattttttttatgtgtttatagtatatagcaatgttatatggccaactaatcgaagtgaaaataatcgaacaagaaaactcgagttttacatgtcatatgactaactttcaactgctagttcaccatgagttgattttgaaaaaaaaaaaaaaatgataattgattagctaatattgtatgtttcaccttcattctcctgatttcttcaaaataaaatttaactaggaaacacacgttttaatgtatgagtaactctattcagtaatagggaattcatctaaacaatcatatttgttgtcaatttatttaacttgttttaacatatagaatcttgtgttatcgcattgagctagaaaattatgatatggaaagcaattttttttccaaccagcaaatagagttatatccatgatcgatcgtttaaaacttacatattttgttttttcttataattacaaaaagatattcagtcaacatatatatacgtctctttcattgcttctgtactatatattatgtacatattatttacttatttagtgggtctatctatctatttccctgtgctctttttctttcaaataatcatacgcatgtccgtatatgaaactttgttcgttggctagtggctaccacagcgtttgctacaatatcatttctatatatgtacacaaactacaattgacgtacaatttgcattgctccatcgcctccagttaatgcgtatactatacatatagttagttataactaagctgcaaaataaactaaagttatagcaaaataaggttaattagcgaaataatacacgtatatgctgcagagtgcagacgaataatggaagagggccgatttgtctgattttttttttgttttttttttgacgagtacaagagttgttcggcggataaactattagttaagctaatttcactaccctctccctttttttttccaaatatacataggcataacacatgcttcatggtaagtaccgacaattttagttattgacatatccacacaagttctaaagataaattgttttcatcttatacgaaaataaaataaacgaatgtaaaaaggaaaagttaatatagccacgtggctccatgtgggggccataaaattgtaaagaagaagaatattagaggatgcattaaaaataagttaataacaaaagagtaataccaaatataaaaccaattgaatatttcaggaaatgaacctcatatgatatgcaagtaatataaacctacatgtatatgaatttttatatgtttgaactgaatatgttgtgcaacaccgtgcaagttccctaaaaatgagaaattaattactattgatttgcacgaaaaaacgtaatctattcccgttattttaagaatctacacaaaacttaacgaaatactattgagtttaattaaagaaaatgagaaagaaacgggccgtgtcgtgtgacgcttgctagggttttgatcacattgagaaaaaacaatttaatttataacaaaatatttgagttatgtgaaatcatatactaatgtatttttttagtttgttactaaacaaagtgactccccacaaggacccaaccccactgcacattcaacattaattaaacacgatggcacggaacgagaggtacccatatgagagatatttgttttttatatttatttttcacttactaccgacagtgtcttttccagctgtcaccttcttcttggctcagaaggttcactttctaaattccatgtactcaaatttactatttataccataatttaccaaaccaaaatttagctatttgctgcaataatatatgatcattccctccaaaaaaatatcaaaagagagaaaataataatagaaggaaagtacattgacgtacggtggcactaacttctctttagcctctctctttcaatcacagtctcttgttttggtcttatttgacaaaagaaaattgtatagtttttaaaaattgacttatggatttgatactcccaaatgttgtagtctcgtgactctagtagtgtgcaagtgaccagtgaccactaagaacgctcgttactggcatatattcatattaatatatatgtcattattgataatactatatgcttaaacttttttttttggtttattcttttgattttttgtttcttgaatcacgtgacgtgacagaggacggtgatcccaaagtaaacagcaagaacacgtgcggcctcatgtgcccataatgacaccgaatattattatatgagtttttctcaacaacactcgatatttttttttccaagtcaatttttagaagaaaataaagttatactccatagaaagataataaaaaggagacgtttttttggtttagataataagctcttctgacgaataacatgcaaagatgatagaccatatgctcttcctttatccctcttgtctccttctttaatatttataattttcaaatgtttactcgaaattatttacattcatctaattaattactcattttttcaaggaaaactcaataatgctaatgtcaattggtttaatggttttgttctatgtatggagttttcattctaagtcttcactcttacgtaccttattggttccagttatagcgatacatattgatgaatgccgacttaaatggataaatagagacgaaaacaaaattagcgtacatactataaaataagataacgttaacgtataagagatgtgtctttgtgaaaaatacaaaatatagtcgttaagcaataatttgttcaaatgaacaagatcctgcaccccaaatgctgggaaccaatgaagctaaagacgatgaacttcatttttcttacttcaatatgagaaattagacagaagaaaaagtgatctacatagatattgtctcagccaataaaaatcaaccatgaacagatgaacttgaatattttttttttttacatacataagaactataaaaagtagtgtaaaatctatccatacaaccaaactgctatttaatttgtagatattttgttagaagacatcaaacactacaattacataaagccgaataagcctcaaacttcggtataaattacttacgtgtaaccaaagacaagtttggtaaatttatcttttcaaacgatcgacaattgcagtagtctttaaatagggtcttaaactattcctctgaacaattattatgaattataatataaccaacaacccaaaaatgatagagaagagaaggaaagcgattcaaccaggccgtaccgttaatatgattatgggccgtggagcctactttcttttcaatgcgacaacgacaattggggatagatatgtatatccaaagaaaatgtgtcggatgtcttcaattctttaaaatataatcctaataagttactctgaataaaaagaaaatagtattttcatttgtcattttccggttaaaacttgtctgacaatatccggtcttaagaatcctctggtgtgtcttttgtgttacttctttcaagaaaaaaaaaaaaaaaaagtataactgaagtgagcttgaaaattccaagagcataggccaacgaattgtgttgctctgaactgggttcttcgtttaatacattagcattctattgggccgtataacttgaagcccaatctaatataaactaaaaaagaacatggtattattctaaacagaaacataggattagactactactttgaacaacaaattcatgcgtctgtatgattctatacgttttcggatttcttgtataaagaaaattatctaagtctacgaactaccaattaagaaaacagagagcgataacagtactcaaagtcgaatagatcattccttgagaccgtatcctcgaaccatcggctagatttgtcgaagtttccgacgcaagtaaactatttaacgtgaaattagggtttgttccgtacaaagactgtactccaacgacgtcgtccatattcaaattcactttcttacttcttggctttaaagttggatacatagccgcgtctttcaccgagctatgtcctaatccaagcacgtgaccgatctcgtgcaccgccacagattccaaatcgacggccacactagatttttcctcatcgaaatctacggcccacgtctctgctttgtctagatgaagcctaccgttttccggagagaaagtgtgtgctaaaacacctaaaacgccgtcgaacggttctccgtcgccgtgatctccgttgaagaatccgatcttgatgtcggcgatgacgtaatcctctgtttcgatgaaggatactgggatcaccgaagcccacttgccgaaagcgcgtcggaacacgcgccgtatgtcagttggtgctaagtaaggagttaggttctcctgcgagaaggcgtacgtgagtttcagtgggacgtctcttgtccacctgggccgtccggggaagtacacgtatttttttcctgtgtgaaacggtgccgttttgggttccacgtcatcagggaacccacatcttggtaatagaatctgtgacaacgtgtcggaatccggtttaccggttattggtagaccgagatttttctggtaacgaacgagagcttgttcgaacgaaacgtcgtcggattctttgttttgtgggaggtaaccgtactgttggaggtgacgtttgatttccggtatagagacgtcaggggatgggttggtcgtaaattgagatggatttcgagcttcgataatttgttggttatggagattgagatagagaaggaagaaggagaagatggttgtgaagggtttgcgattgcatggatgatgatgatgatgcatggtgtgatgagaagtgaagagatgttttgttattttggatattgaagttgcgtggagggaaaagctttgttataaatatgaaaaatagtttggtttaatgggggttggaccgtttcgttattaaatgattagtggattgtgtttagtttagtcgcaagtgattagctaaaccaaaacacaccaaatttggattcgacttgttgaataaagaaaaaaataatatagatgttgactgttgagtgttgaacttttgaaatattaccaaaaattacagtactatccattgaagaggttggaacgacttcagtggtcggtatcgagccatcgtcttctcaaaaatgttttggtttaagcatatttctttctttgaaaactatcctaaggttggtttaagaaaaggagaagcaaaatttagatacataggagtaagagtaacaactaaaccgaagggtataatggtaattataaaggagatgaagtgtcgtcatcaccaactcctcttcaagaaaactaaaggagtggctttgagatgaagttataaagaaaaagtctgacctcgttcgttagagactgctacttcttcttctatttgacgtgaagacgactctatgtcaatgattgttgtttctaacgattttttggttggcttgtttttgaccctatcttactatatagagagaattaatgtaggaatctgttgttgcgtggaaaaaaagaagaaagatatatgctggtttaccattatcaaaatgattgggactggtggataccaaaaaatgtgacctacctaatggcccaataaacataagtgattttctgacatagcccattaggcagtttatgttgagtgattttgatggttgtgtgaaccgtataaataaattatgtcaacattatgagaaaacaaaccataatatattggattgaagggtttgcttattcagtagctttgctggcgctataagcattgacgagctgagcctggacttcattggacacagcagaatgttctttgtattccatcgtgaattctccttttccttgtgtcatggaccggagagaagtggagtagccaaacatgttgttcaaaggcacctgttaataaacacacattacgtgttgttaattactgttgataaaggaaactttgctttctatattggttcttacattagcagtgattactgaatcatcaccctcttgatcgtttccaacgattatacctttcctcctgaaattgaaacaagtttgacttattatactaataggacaaggagaaagaaatggtattgttaaagggtttagagtttttagagtttacttgttgatgtcaccagcaacagtgccctgaaactctgttggtactttcaactcgaccagcataacaggttctagaatcaccggtctagctgctgtataacacagtctgaatgcgtatattgcagccattttaaacgcaagttcactggaatctaccgcgtgtgaagctccatctgtcaatactattctaagattctctacagggtgaccaattagtgagcccctgcaatggaatagggcgtttcactatcacttacaacaacatttcctcaaccaaaacaagagaaaaaagtagaaattgagaaagacaaagaatttgagagaccaagatcactcacgagtttgcagcttctttgaaacctttctcaattgctggaataaaaccagacggaattgcttgtccaacaatcatgttttcaaattcaaacttctctttagagcctggtggtagcggttccacgtacctaacaattatacacatcgttaggaatggtttagcagggatccataccacatcatttagggtctataagtttttgatactcaccctgtaactctaccgtattgacctgctcctccactttgcttcttatgtaaataatcaaactctgcccgctgagtaatagtctccctaaaattgacacggggtttgcccacagtcgcatcaacctatttgatatttccaaaaataagcagaaataagggttttgtcgagaagcaatagagtgagaacattgggaaggtttaaagtcaggcaggcaccttatattctcttcgcatgcgttcaacatagatgtccaaatgcaattcccccataccagaaataatcgtctgtcccatgaaggataaatggaagaatcatcaatgttaaatactatggggtgaattaagagagaggtgctgagaagcaaaagagtttttagatgatacctggccactctcgggatccaaacccacacggaaagtaggatcctctttctggaatcgattcaatgctttcgagaactaacaccaaaaaatagatttcagttgcaaatgtttaaaaccagaattgaaggaaaaatatgttgctgttttagcttcaaagttcacagaagttacctgtcctccagaatcttttgaaactggttgaacagctaaggacataacaggttcaggaacgttcatcgatgtcattgtgtacttgactgatccatccgtaaatgtatcacctgatttaggaaaattgacccaacaacaaacacaatatcagaatttcatccccagagaagcaaattatgttaagttcgaacaagtacggaagaatattttactgtacctgatgcacactcaataccaaacacagctacaatttgtccagcgtgtgcctcttgaatatcctgaaaatagaataaaaatttagaatccagtcacatggcactatagttgccaccacggagctaccataatggaatcttaaggagaaaaataaacttcaactaacctccatatcattcgaatgcatacggaccaagcgtggaacctacaccaagaaacattgaataacctttaggcaaaatcaaacatcacatgcactacttgcaagggttgagataaaatatatgacaaagtggtctgactttcagacattttgcttctatgaaaaaagtattcatgacagatgagggacaagtagaaaactatacttactcagtgtaatttggtataaatttatgcacaatacttcatggcgttgaaaaactcaaagcaacactaagatgcaagaactaaccttaattctcttcccagtgttgacatttatgataaaatcacctttcttaatcacaccttcgtaaactcttcataacaaccaacaacatgaattaggattcagcattcaccaatttagtcatatgacagaaaggcacaaaatacttttaatatttagtaaacacagcaatataatcaagagggagattcaacatttacctcaaatatgtcaattgaccaaaacgaccctcctctaatttgaaagccagcgccacaagaggtccatctggagatccagtcaaggttacctgaaactcaattatttagaaccagtacattttctccagtaaaacaaaattacaagttgagtaccctctcttcattattattctggtcaagagcatagttattgacttcatttggagaagggagaaaactgacaacaccatctagtagaggttgtactccctgcagattaaaaaaaaaagggagcacggcagatgatgaaaactttttaatacagacacaagagggcaaggagaaacgtaagtgaatatatcatccaaacttgcgcatatatcatctttggattccaaaaatcaattaccttgtttttgaatgcactacccataaatacaggaacaaacttttgtgctatggtagctctacgaatagcttcctgcacatatatacagcagaccacaaaagttacagtaacaaaatgcaagtaaaagagtaataatatacaaacacggcaattcttggacgctaggaatgaaagataacactacgaatttaagacaatacctaaggcaagctagaatccacatgttcattagtcccttgggattgatatctgttgagtgaaatcaactaactaaacatcataagttgccaacaatatctatctattttccaggaaccatttgatctatttcacgcaaagaatttgctttcaaaccaaaatgaaaaagaacaaacctcaagctcagcagcagatacaggttcatcattcagaaatttctcggcgagtacatcatcaacttcagagactgtctctatcaattctctcctcttatccccaaccaaaccctccatatcagcaggaatatcaccagccacaacattctcactgcaatttatagaaaataaaaatgtcacaacacatacagatgccccattacaatataagcaaattctaaaaaaaagtattgtaacacaaacccgcttgatccatgaaagaaataagctttcacatgaataaggtctataagaccctggaaattttcttctagaccaatgggcacttgcacagctgcactatgatgtcgaagcttagctcttgcctagtgaagtaaaaaaaagaagaagttataaccagtaaagctaaacttgatcaaactcattcaataactaaaaatagaatgatcatagttttacacacttggttcaagactttccatggatctgctcccattctatcaagcttgttaataaacgcaactctcgggacttcatatctcctcatttgcctatctaccgtaatagactgactctgtacaccacccacactgcataggactagaatcgcaccgtctagtacacgtaaagccctctccacttcaatggtgaagtcaacgtgaccaggagtatcaattatattaacctgacaacaatcataacaacaaatttcaaagctcaatgcaataggattactacacaattaaacaaccaaggccaattttgacgaatctgagaagaaattagaatcacagaatccacaaggaagatctttttttctatctcctcaccttgtaatccttccaagtacagtaagtagcggctgactggatagtgatacctttctctcgctccaagtccatagagtccattttagcgccgacgccatctctacctctgacttcatggatctcatggatccgaccggtatagaacagaacacgctcagtcaacgtagtctttccagagtctatatgagctgagatcccgatgttgcgaagcttgtccatggattctttccaccatggctccttctcatccttgaccgcacgagcagcggttccggcggagaaatgacgaatcagatgaaaatctccggttaaaagcgcggcagtaggagatgacgcccgtttgttcgacgagaagagtctcaagaggaggttaggcgccggagaagtcggaaacctcgccatggctttgtatggacgacgagggttttaggaaaatgggtttgagtcttttctttgtgagagagacttgaggagagtgtgtgtgtttgtattatcaattttggttcagattcggtttgataaacttccggtttaacatttggacccgatgggttatttgacccggagtacatttggacccgatgggttatctttgtcttcttcttctttctttttctctcttctaatctctgattcttcaccttagagcatctccaatggcttgatattagagttctctcagtgggttctcagaataaaattgtgaaaaattaaatcagaaatcgtttttacagagagagctgtctctcttgagagaaactttgaaagagaagagagacgtgtacgtgtcacgttttggatgttttgtttgacaaaactgaaaaaaaaaaaacgcctgaaggaaaatactttgtcaatttctatttttcgcgaaactctctcgaaaccaaacgacaatgaaaacgctggtgatggcgacggagccggtcgtttgctccgacgattgcgggttgaatttaagcagtcgatatgttgtatgagcagtggttgcgcaagagcaatggttgggccggattcatccttctcgaaggcggtggtcacgtcgattgtaagttcttctagcctagccctttgaggttctaggtttgtgttaattgatgatgggtttgagtagatgtgttaattgatgatggatttgtgttaatttgtgttgaatctcactggatttgtcatatatgttcatgtcacgtacatctcttggaagaagatttaattagtgtttattcaagttagtattcattgtctatcgcagatttaactagtgtttcttcaagtttttctagcttgatgcacgtattttctcctaggtgtgtgttttataggaaattgatatccggcacacttaaaagattcatctttttcttgtttgatgtatgaactagagtgtgttactaatttaagcattgttgtgcagtgagattacggcagaaggaagacgggttacactttataatggttacctgattatagtggctttaaaattgtaagtcaaaaacacactttaaaattttctaacttctggatatagtggcttttgcttagagtttgttgttcaaccgatggaaattgttgtcttgatatctgctttagcttgtaaaatgggtctttgatgatgtaagtaactcgtgtctagtttccactttccagtgatttgagcttcaacaagctacatggaccaaggtttgacagatggcaattagccatgacaatcgtgtaaggttggtagttacagaaatcttgaaaagagttcatagttgaatgattttttctagtgtctaaaaagatccttattttcttctttgattcgttgcttgttttaattacttacttgtttgctctcttatttcattgtgtgcttgtttgcttccttatttttctatatctttagtgttcattatttggtacattgagcgtctgtcaagaaaaattgcattgtaacttacagaacctatcatatctataattgcattgtaacttctcttgtgctcttggagattcatcaaattggaatctgagttctttacactctactctgacttttggcgttgttttaatggcttcgaacaggactacctctgtggattgcaagctaggatccgcaaacttgaagagagggctcaagggagaactaaagaagcagcaaaatgttgttggaaacgtgtgaactaataatttatttttttcatgaaaacccaataaagagagactactattggacactgcaaaataaaaaaaatttaacagaatctctcatctcatcaatttgaaaaatttattcttaaaaaaatggtgagagcccatgagtggctatcacattgggcgacgcttcatggagaaccgcctccgagcctaaacgccttgaccacgatggaggatgaagatttgggagtgtgtgattttttttcctctggggaaataaagctggtccgcaaactccctgaatatgccaagcttttggccctggcgtccctggagtactgataggggataccacctgagaacagaggccaaacgtgggacaatagtcaagctgaggcctgaggtgcaagtaagaaggtcaacttgtccaaggtatcaaaacaagaagttttggattagtgcagtcaacactttgtaaattcatctttggtttcctaacatcatcagtgttttgagtttagtcatttgtgcgaaaattagtaacattaacattttataactcataaccttgtattggatcatgatgtgatgactactgacagaaaaaaatttagcagataaaatgtgagggaacaaaaagtcgggtaaaattctaatttgttttcgtcagcttcagtaaaattagaatagcacacccggtgggactcgaacccacaatcgcttgattagaagtcaaacgccttatccattaggccacgggtgcttgtgtaattactttgaagttttataataaaaaagaacaaaataacgaaatacgaaacaaatttaccaatcatgcagtgtttaatcacaaaatagttttcttccttcttccaagagattcaatgaagtcatgaatttaagttctgtaaaacttaagagtactattgaacttgttcttagaacaaacttttgcatatttaaaacctaaggacaatagagtcatctggtacgaaaacttctctgcacagaaaaaacagcttaaagcataagcagcagagattaataaggaacgtttcctatagagggaccatctcgagatcattgtgttggcttttggcagatgatggggatgaggacgaagaagatgaagcgtctcttctctcctcagtgttcatctcttgaactgggggaggatccatagtagttgatgatgaggcttctgtatcagaaagatgattcttcatctccctgtgttcctggcacaaagcacaccagtgcaagcaacagtgaaccatgcaatgatcacaaggcgcattctgcaaaataatcacaaagatcaatcagagataatatctgatatatgagaacgatctgatgtgggatttttactttaccttgagatgatatttcttctggagttcttggcggaacaagcctgaatagattccacacatccaccaagcaaagaagaggccttcgcagatcacaactgttgtttgtggatcaatgtagccactgaagagtgcggttactgctgcaagtgccatacctccttcgacacatacagcatggcatacacatggttgggtccaaggaatctcttccctcacagcttcaatgttacgcccaaacagaacacacggacaaaagagaccagtcctgcctgcaaaatcatacaatagcattgattcaaagtgtcccttaggtgcatattgaactacaatggaaacgtttcgccaaagtaatagggaactcatgcacaagaacaagtgattaagaatcatctgtttggacagttacaaaacaaagaggaaaaacttacagctctctggatcttcagcacaaccaaaaatgccggtggtccagttttcatcagaaggaggttcataggtttcaggtagaacttgcatacattcatggcacttgcggacattcaactgtaaacaatttcaaaaacagaaaaagcagtagagtggttgtaatacatgacgccacactacaatgactaccatagtgagagcagaagaaattcagagaaagattctagtttcttgattccatcacacattcttataaggaagctcaaaggaacgtacactactagtactctaggcttattttaatagttgcttgatgagactagactaatcagtgttgatacataaaactttaaaacaggtagtggtgccaataagaaatcgctatatgttcatgtcacaacagatatgcactactagaatctatatcacatcacaaggatctaatgcacggagaaattcaagattgatcaaagaaatcaaatcaacagagactagttacactattcctcaatcaaacaggacaaaaatttcatctctaagacctcatcgagaggtggagatcgacacaaacaacaatcgggatcaacaagaactctaccaccacagattatcaaagccatcaaatcgattaaggtacagatctaaaggaattacgagatcggagttctctagaaacgtgcgttaagagtaatgcagggagggagaatctaacgtacctgaggaacatcaatgggctgattgagttcaccgggtgtgatatcttcttcgacaggagcctgctctttcctcaatttcacgtaacgcgaactggcgtttccatccgccatcgaaaccggtcaagagaaatataataatctctgaagatctttcaccaatgaggtcgccggaatccaagaactggaattttctctctaacaacaacgttttgtttcgatacgcgtgagtcgtcgtgactcgtctatatccatgtgagaaagtcttctcatgattaagaaaacaaatccgaaagatagacgccacgtcgtcgttttaccctctttaggcggtgtacattgtgatgaaaaagtaattagaagaaacttgggataacaacaacaaactaccagtcaatcaatagtgttcaatgatacaaatatttatggtaaaatcagacctctcttctttttcatagaaaaaataacacgaaaactacaagaagataatccatttcctgagattatgtggtttttgtaattcttatcaagacatccagtgctttggagccatcaattcacgatctccacccgaaccttgcaatgcgattttttgaatccgagaagagaattcctctgcctgttcaatgttcaaataaatgttgcaagttaaaacacaattgtagttattgtaacaatgcgtagaagacaaatttaaaaaacttactttctcatcaatccacattaaggaactgagttgattgttcaagattctgacaactacatcaagtggactcatcccatctatcgcttcaagttctccaccctgtttccacacaaacatgtttatgatgtatgttcccagcaaaagcaaacgaatagtatatgataagttactgcgttacctggtttgcatttacggattgtataatcgatctgatttgttcagtcatatgctccagttctctttctactagctcagactgttcatacctgggatgaaaaaacaaagtatattgtaagaaagcatagaatcaggatgggatgcgcatgatagagctaattcttctaagcatagatcaaatcatatttgtttccgtgtctgtgggttttctttcattattcatcagaataatatgaagcagaaaggtaatgatgcaaatagttctcacattgcatctctagttgatgctgcttcatcgtccagaagtgatttccgctcgtcattatatatacgctcagcctcttcctccatgctttgcaaagccttgtcaaccttaaacagaaacagagaatccaaatgattagcacagtggctttggtatttgacttgcccaatttcgaattaagcgaggtagaaggtagacaatctccatgtcagataaaaaaagagtgcgactgagagagatgatgaacaagagatatattgatttcccacagataaggcacacatgatttcccgctgcaagttacaatcagaaacctcatttaaagattaacatagagatgtaatagttttattgcatacctcttgctgatgagtctcgattaattccagctgtcgttccaagctagattgggtttcaaccacttttgcaacttcaatctgtttgttggtcaagtacacaaaaagaatgagctaattatagagtagaggcctgtatgagctaaacatacaaactcagaggtcagctcagaacaatgtctctgaagaaagattcataacggaaagaaattttaacagagactccataatatgacaaagttttttcacctcaagtctcaaaagaacatcacggttttgcaagatccgcttatcccactctgctattgcatttgcctgtttccggaatctccctgtgcgctcttgtagctcagtattccactccttgataatctacaaataaccagcatttttgaatattatatatataacatggctaaaaggataaatgtagaagagggaaaagatctatctacctcctcaacagttttgccagttatttcagatggcaactttggagaaccagccactggagcaacagctgtgctcgtcctaataaataacaagaaacatattaaagtaacatcagcaacaacataatcaaggtgaatgtagaacatgtacagccgttttggtcattatgtgctggtcaaaatatgaaaaaagcatacccactacttgaaggaacaacaagagttgtctgtgttgtagtagcagaactagtagcaggagcagtagtagaagtcgaagatgggagacctgaacaacaacaatatttccttcagaaagaaaagaaaaaactatagcttctgatcggtaaaacaactgggcaggtatatatgtattcatgtcatagactataagcagaaggcaagccaaagcataataacgcgtatatatagattaaggtagatcaagtacatcgatcacatatctaatcctaatcaatgattcccataattctctaaattgttattcctaatcatcgtagcaaatgggataggcaaaatcacaaacaaatcctgagacaaaacataaaaacaacttactgaatgagaatgcaggactagtagtttgtggttgtgaagatgatgcaggtgttgatgtcttcggtacagcaaacccagtaaaagagttcgtagatccagtggcaggagtcgagctagccaaaccaaatcctgtagtactgaatgtagcagcggagctagccggagtggtgttggttgcagatgaagtcacaccaaaagaagggaaagccattgtagaagcgggagctgaagaagctggtgcactagtagcagccggagtcgaagaagaagtagtagtggtggttgcaatggaaaacactgctccggatgtgctagatgcaggtgctgcggagcttccggttgaaaggttaaaacctgaattggcggatgtaccaaatgagaaggaggacgaagatgaagccgtttgtggaggagcagaaggagtggtggagctggtggtcgaacttgcagtgcttttcaagaaagagaacccggtagaagcggagaatggagaagctgaggcattcgaggtattggatgtagatgaggaattgaaggtggatactccaaacggggatggtgaagaagttgttgcgcctgacgaggaagatgcaaagagagacggagttgaaccggctgaagaagacgaaccaaagaacggtgaagaaccggtagctccaaagattgacggtgaggagccagaggctgatgaggcaacactgaaggaaggtgacgagccggtagctccaaagatggatgatgaggagccaggtgctgatgaggccacgctaaaggacggtgttgcgccggtggctgatgatggcgcgccgaaaagaggagatgttgaagtagcggcggatgaggatgctccgaagagagaagaattagaggcggaggcagatgaaggagcagagaataaggaaggggaagatccaaagagaggtgttgaaccactggctggagcagctccgaatggagatgacgatggagttgcggcggaagaagcgggagctccaaatagagatgacgatggagttgcggtggaagaggccgaggaagttacaaatccgaaaggagaagaaccaggagcagctgaagaagcattggtggtagatgaaccaaacagcgacggagcaggagcagatgaagaagcggcggttccaaatccaaacgatggagttgtggaagcaggagtcacggaggcagaagatccgaatccgaacgatggagtcgatgaagaagcagaagaaccgaatccgaaggaaggagtagaggaagctccgaatccaaacgatggagtagtggaggaagcaggagttgatgatacggaggatccgaaaccgaatccggtggagctagggtttgaagattggttaaaggagaaagataacggagaagtggtagatgaagcagaagaggaattagttgcagaagaagatccgaatgagaatcctccaacggaattggattgaccaaatggaaaccccgacattgcgggttattgattgattctctcttctcttctcttctcttcactggttcgttcttcttcgccggcgtttgagaaataaggggttttgcagaaacctctttcgtacggagaggctttgtggtgagtccgagcgtatggtcaacgcaaccggcttatggtcaaacgggagggaacaaacagataggaaaaatgtaactattctcggcccagcccaataatatatgatgatgacgtgtactagacaacgaaaacggtccacgtaagctgttctctctgttgtaataagtgtttaagaagaactagatgagaagttgctcgaccctaaaaatcaaacatagagaataagagcaaccacattggttagtttctaagtaaggtttctatatattttttattaattaattttgatatttttgtagtttagagattttgtagagtttttgaaaattttttggtccattagaaaaatccttaagtgagtttctaataaaactaaaaaaaaaatttgaaaaaaatgtgaaagtgtttgggatacatttgactctcaaaacttgacacagactctacgctctcaaaacttgatacactcacaaaattcgacacacaaactcaagtgcatcttcacacgaccatagcctatacacttatacacagaacagaacaatacttgcatgtgcttgctatttatgcttccttgcactcttgcatctcgacagggacatcatccttaaaacgaagttaaaattcatttagaacagaacacaaaccaatctattgaagtttgaacacgaacacaaaccaattagaacagagcacaatgaaaccaatttagaacagaacacaaacaacttaagattcataatcgaacagaacaaaaacaagtgaagaagcattaaccgacacaaaaagactaactttcaagacataaaagacaccattcaagcatttgacaacatgtcagtgataagtttgttctttaaagccatttcaagatcactaagcggccctgtaaggtatgtaaaagtatatagaagatgacacaaagtaacataaagacagaataacaaacaagatctgtcattctacagttggtttcaatcgcgtgcttacaagtttgaacctcaatagaaaaagctaaacaaaaatcaacttgaaagatttttaactgacattagagattgttgttaccatttaattgcagaaacaagtagagtgagaaaagtattgttccaagctcaagaacttaaagaatgtagtctgcaattctacatacacctgaaaatgacagctctcaagatttcagtaagagtacaaatgcttaacggtcaatacaacaatcaaactactcttcaacgtttagatgagaaagaaacacttaatagtaatgtgtcacataaggaccatataaccgaaaataatggcatatggaccaattgttcatcaaaagccacaaaagaaatgcataaaccaatctaataatattctagttactagtctctatacttactaagcactataaaaaacaaaggcttttccatgagaattgcaattcttcttcgatagcagaagcatggtcatgttcatgtgaataaacgtataaaccttaacatactttatgcagatattctataatttcttaaacaacagaagtttaaaacaatgcgtagagaacaccatatttccaaacaatgcgtagagaaaaggctataattgttgtgaaagttaagcaagttattgtatgatcgatcaatgacaagagagacactcaccggaattctatctggatacttctctttaatccaagcagcctccaccctactcttttctgaagctttttgccactcctttcgatttggttcgaagaatcaatttagtgaacaacctcgtcgtcgatcatcatcccggcggttgaaaattgagtacatggcggttgaaaattgagtacatgtggctcttgtctcccgatttcatggtcgatacgccgaagtttgtaatcgaaagggatcgattggaatcacctaattttcgtcggagaaccaaaagaaaagagaaaggacaagaggaaagagaaacacgtttttttcttttttgtttttttttttataaaatttcatcctatcatttttagtcataacacttcagaaaatcctaaaaatcctaaaattaggaacgatcctaacaattttattgggttttcctttatttttggacttttattctttacgattttagattagaaacccattagaaacactgatggacatagtctaagaactagatgagaatcaaacattgtttctgttttaaaaatttaggcgacaccaaaatgaagttcaaagttaacgtttttttatttattaaacgaaaaaaaaaaaaaaaaagttaaacgttatgagccccatgaagattcaatgcaaaatggtattgatactctctagtttttttttttgtcaaaaatactaatctaatgaaatatgaaaaaaattaagaatgttttgataggagcatattaatggtatatgtaattagttattttatttgtgtgaaaggtgaaaagcaatatttctatcaaaataaaaagaatgtacacaaataatgtaattgatttttgctatatacactttgtttacactatatatagactttcagtttgttaattacactatacactttgtttatactatagtacaataactatatatggcttctgtaacaccttttccttacaaaatttctaacagaaaaaaatatcataaaattgctagcccataaaattacattatgtacaaataataatcagataaaataattatcaacaaaattcagtcgctagcccataaaccatgaaaacccatcggaaacgtcaaattcctcggaacctctaacctcgacacgaccgcatcggattcaccgatcttcttagcatccaaaatcactaggtaacatctctccaccgaaaccgcatactataaaaatagcaaatgacaaatttgtatcaaatatacgcacaacatgcatatctaaaagagaaaaaacgaaagtgttgatatatatacgtacctcgaccacgacaatgtaaccatcgtcctcttcttctccttcttcaacagagttttttgggacaaacatgggctcaccaacgaatcttctagctccggtagaccaagtacggacgaggtttgagtctaagtcaaatttcacgaccatgtcgaatggaaaatggggaagttcacttcgagttcccgacgaggcagcagagtacatgtacttgttcttttttccggaccaggatgagtttataaccggaaaatctgacggcttgttccacccgtttagaggctctacatcacaactattgcagtttccggtagagtccaaagtcatagacaccttaactagatgagggagtagtttgtcgtcgccacggtttagattcataacagaaggatccagcttgttgctttgccaatcatagcctataagaatttttttgaaaaaatgttcaatagctgtcgtttgaacaccctaaaagccctaacttgtgaaagaggttatttcgaaatagtcttatataggtttgtatttggtgacttcttaacttaccaaacattttctggaaatcgaaccatcggtaagaacaagcggaagcttgtatctgaatctttaaatcgccgttatcctctctagtctcataagcgtttccggagtgtattagccataattgagaagacacttcgacaggaactctccagtctcgacctcccctagaatatttatcagaaaacctagggagaatataaatcggagaactctcgttgcttgggtttaacgataacgctgataccattggtgacattccgcacatagccgctatggaacctgcgtgtgtatattttacatcatcagatttcttgtaacgcaagtattattcttcgtgtacgtaaatgacttgaaacagaacttattactatcaagataactttacctattggattaagcttgactcggttggcaaagagtatgtagtgagtatccgtgaatgcccaatcatgaatcatcatatgatcatcgatcttgaattctttcgtttgtatcaacttgaattccgaatcatactctgtaaatagttaattgccattacaactacaataataataaaatactattttcataatgtttttaaagaattaaaagattatttaccacaaaatgtgaagttgcttcgaggtaaaagcatatcttcagcgttgcaagtgaccgttaaaagtctttttcttcgaccgtcgactttgtaatgtgacaagaaccgtttcggtggcatcttaaatacacctacatatttgaataaaaagttttactatatagttttgttgcattaattaattttacgccgctgtctgaataaaggactacatactttaagttattttaactttactactttaacataaacattaccttgaagtatgggtttcaacaaatctgcggctgtgtcccatatatcatgaccagataaatctctgtcggaagaatcatcatcatcacaagattcacaaccgttgttctcgacgttaaatcttccgacggtatccaacgatccagattcaatctcgtacggttcaccaccttcccataaacaaagcaatcgcccagcccatttcaaaacgctagtattagccacgtttttcatcactttcgtgtttccaaatctcttccctcctttcaacaccgagaaaggacctctatgagtgaaccgccacgtgtcagttacaggatcgtgctcttcttttttagcttccgttttaacgtacttcgccgtgaaagtggctttccgtttgttaccgtcgatgtgaaacgcacggagataaccgtgaccgtctaaaggatgaaccgttgagccatggtcgtcagtaaatagtcctggaccggctaagtagtatgtaccggaagggaagttaaccggtattgaaccttcgattggtttaattacgaccggttcgatagtctcggaacgttgtgacacgaataaagattggtaatcacggaaagctgaagacgtggactcgtcgaggatggtaccggtacgtcctaaaccggtgtctggtatagatattgatattgcggctcgtggaggtgcaagcggtggcggagtttggtgatgatgaatcggtggagattttagcggtggaagaaatttcggcgggatagggagagacattttggtcaacattttttgaaatatgcaaattatagtatagttttctatgatacacgcaaagcatatgttatatatatatatagattttataccaaacaaagattgagtgaataaaatggatacgtcatacgtggctgtatgcatgtttaggaactatggtggggtagaaaaagttgagtgattttgtggaagacatgagcaaatttggacatgaaagaaaaattcgaaaatggcagacatgatactaagccattgctttatgttgtttaatataaatttaaattagtgattagaacttggaagtgagtattattgcgtcacacgacacatgtaccgttaatcaattggtatatttttagttgttgctcatgaaactaacaaaattattgtcaatagattcactcataatattgaatagttggttataagaaatacgtgtacatcaagatagaaagattggagcagacaacaagaaccgagaagtactgatcaccgacacttctcaagttgatcctaatgatagatatggacattttatgttgtatgtatgtgtcttgtggataattatgttgtaatcaaataaaaaactaataagagttccctttttattacaagtaataatcaatacttgtataaaatttccactaacatcgattcattttgtgcgttaatctcattggctaaatcaactaatattttgttttaatgaagcttcaaatcgacccacttcgattataataaaatactttttgcgagttgggactgaaacattattaaattgttaaagaaactcattatggtttcggatttcaacgttaaaatcatagaaccctcattcatatgtcttcagtttggagaacatttagagacaagtcttcggaacaatgatcttcaataaacaatgtcaaaccaaagggcgcccatattttataaattacaagttacgccatgatatcaatctacatgtttttgaacgttatgatattaattagctggttagatacttgataaatatgtggagttggcagttatgaaccgttgaacgtattctttatacttttatagataggagtttgcaagtatttacatgccaagcaatccgatttttttgcattaattaattaaaattttgcaaactctaaactttggtagtattattgagataaaagtatggtactaactagtttgataactaaaaatacccaaatattgcatatacaaaatcttgtaaattatgtatgtcaactagtatcttctaaattttacaccatcgagatggcatgaatgaaacagttttcgccaattactatcttttaaaagtcgtatttcttggttacacgcaaaaccaattttgttgcgattggtcgatgagacatggtcaaataataatgcaaatatagattatttcagaaattgttggattacgtaacctacatgaccagccgaatgattttatcatgtattatccatccacgcataaatacagtttaaatcacaaaaatatgagcacaaatcgtgagtataattaagagcaaaatttacttatggtatacggcagtaaaatggatgtgtgatatgtgttgggaacatagagatggattccttggtaccattaagcagcactcgaggagttttaagagtgaatggaggagtaatggtgggagaatattagtgctaccaaaatatttaaaatcaaaaagagtgttattaaaatgattataagtttgattaaatgtttaatatttgaccatattgccaacaatggaattaaaggtgattgagcgtaggtccttcgtgtctctcttctcatcatttgagccgtcgatgccgaatctgctgacgtcacaccatccacaccacttgtctgtattttggaagctttgtgattatttccccaaatggactttcatataattatcttagtatttccccttatgatttattttatagcacctaaaatgatttgttaacgaattatattcggccaacttcatgtcggaaatccattttagtaatttctcgagtaaaataaaataaatataagtcgtttatcaaatttttttattttttttttataaataaatcaatatatttggtcaatctaaattattgtttaaaacaaaaatctaaagtcaataaaaaaacgagagacgaaaataaacgacgtcgtttattgagcttctattttccttttccggtcttagttaattcccggttcaaccggtctcggttcttttcctcgaaacggtagcgtatgacgaagaaaaaatgtcaaaagagagttcaccgccaaaagtcccttccacgacgatggagtatgaacggcgacttgaagcggcggcggaaattatactcgagaaggaggcgaaatttagcaacacacctccggattgtagtgaatttggggtcacggcgactctaaagcctcaccaagtcgaaggtgtctcttggcttatacagaaatatctactcggcgtcaatgtcgttctcggttggtcttcgaatccatttcagttccttatttgtgctcaagtttaggatagttcgattaaattaatgcaaaaatcaaagtaaccgaacttcgattaatccatgtatggttttgtttctatttgcaggagacgaggtacttccatgattccatcgttttgaaatgttatccttgattgtgtttgtgtattagtctaattgaagaattggaccagatgggattgggaaagactctccaagcaatctctttcctgagttatttgaagtttcgtcaaggcttgcctgggccatttcgtgagtcaatgagatctgcttgttacattttctgattcagtaggaaatttctgatgtcatatgggtgttaataaaggttctaattaatatgtgacagtggtgctatgtcccttaagtgtaacggatggttgggtatcagagataaataggttcactccaaatcttgaagttcttagatatgttggcgataagtattgccgtctggatatgcgtaagtcaatgtatgatcatgtcaagaagagttctaaggtgagttttgaacttagtctttcatatagtaaagtgagagtcaaaaagaaatagtctttgggtaacttcttatgaacttggggtttgaaagttttgtgttttatttatagccttcttctattttgttgtcagggacatttcttaccatttgatgtattgctgacaacatatgacatagcattggtggatcaagactttctttctcaaattccttggcaatatgctataattgatgaagctcaaagactcaagaatcctaacagtgtatggttcacttatgtctaactttacaatccattgacttgtgcactgaatgatagatctttagttgctagatgtcatatggtattactgtatcataatagaccttctttaggcttctatagttaaaaaactgtctggctagtaattaggttgtacgtgtcctggctgtatgaacattttatcctgggaaatcatctaagatacaagttggctatgtcacaggttctgtataatgtcttacttgagcaattcctcattccacgacgtctcttgattactggcacacctatccagaacaatcttaccgaactttgggctctgatgcatttttgcatgccactagtttttgggacactggaccagttcctttccgcattcaaagagactggggacggtctatcaggttcgctggcactagccatatagtgcgctaagcactctgacatttttgtgtggatattcattcggaagaggtaagagttctaaactaacttgtgtgtttcctatgtgttaaaacaggtcttgatgtatctaatgacaaggaaacatataagagtctgaagttcatcttaggtgcctttatgctgaggcgtacaaaatctttgctcattgagtctggaaatctggtgctgccacctctcacggagctaactgtgtaaaatcttgcaccttgtatagctaatcctttcctctaaaattatttgcgggtgctctattgatattgtatgattattgttctgtacttttatgatagaatggttccgctcgtcagtcttcaaaagaagatatatacttccattttgaggaaagagcttccagggcttcttgaactgtcttctggaggatcaaatcatacgtctttacaaaatattgtgagttagtttctgatgtttattatcacttaactcttatttcataaattgtatgtttagtgaaatatatgtgatttttgtttatctccctatctatttccttgagcaggtgatacagctaagaaaagcatgtagccacccttacttatttccaggtatcgaaccagagccttttgaagagggtgaacaccttgttcaggtatcccaattgttcactaacacctcgctataagttttcattgaataaaaaaggttttgttcactaataattgcgttctgacaggcaagtggtaagcttttggttttggatcaattgctcaaaaggctccatgatagtggccatcgtgtcctcctcttttcccaaatgacctcaacacttgacattttgcaggttttcttatagagctattttttgttctataacatctgtgcatcattgactacactgacatgtagcttataacaaatacaggattttatggagcttcgtaggtattcgtatgagcgccttgatggatcagtacgggctgaagaacgttttgctgcgataaagaatttcagcgcgaaaacagaaagaggattggattctgaagttgatggaagcaatgcctttgttttcatgatctctacaagagcagggggagtcggtttgaatcttgttgctgctgatactgttcgttatttctggcttttgtttttccatattatttcttgcggaaatggaatacatcggcatagagaaagataaatatgatttgtttctagtgcttattcaagtgcttttgaatatgcaggttatattttatgaacaagactggaacccacaggtggataaacaagctttgcaacgagctcatcgaattggacaaatcagtcatgtgctgtctataaacctcgttactgaacattctgtggaagaggtctgtgactgtcgtagtgtttcaaaacacaaagtcatcaaaaagcattatcaaaatctaaatgcgtgtgtttcaggttattttgaggagggcagagagaaagttgcagcttagtcataatgttgtgggagataacatggaagagaaagaagaagatggtggtgatttgcggtctctagtgtttggtttacaaaggtttgatcccgaggagattcacaatgaagagtctgataacctgaaaatggtagaaataagttctcttgctgagaaagttgttgcaatacgtcaaaacgttgaaccagacaaggaagaaagaaggtttgaaattaattcgagcgacactttgctaggaaatacatcatctgcaagtctggattccgagcttgatgaagcttcttacctttcatgggttgagaaattgaaggaagctgcacgatcaagcaaggatgaaaaaattattgagttgggaaatagaaagaacttatctgaggaaagaaatctgagaattgaggctgccaggaaaaaggcagaagagaagaagttagccacgtggggagcacacggttatcagtctttgtccgtggaagaaccgattttgcctgatgatgttgattccagctcagatgcaggatctgttaactttgtctttggagactgtacaaatccatcaactgtctctcatgagccagcaatcatattcaggtaaaacttcatttcaattgttcatctaaaaaccaaacctctaaaacttccaaatattgattttatggcagctgtgttgatgactctggaaactggggacgtggtggaatgtttgatgctctgtcaaaactgtctaatactgtacccactgcttatcaccgagcatccgagtttaaagaccttcatcttggagacctgcatctcataaaaattgatggtctgcaactttttttttttctatcttcctttcattttctaacaacatcaaagagttctcatgtattttgtgttgtgtagacaatgatgaccaacaaaacacacaagcaagcaagcctctttgggtggcagttgcagttacacaatcttacaattcgaggcgtaaagtcccacgtagtagcatttcaattccagaccttgaaagttgcttagccaaagcttcattctctgcttctcagaaatcaggtacgaacttaattactttctttctttaaagtttcatcatatttggaattataaacaaaagtgctcccaaagagcttaacacttgtgttgtcatttctggtatggtaatgttctctcctcaaaaagcctcactccacatgccacgtattggttaccaagacggatcagaccgatctcaatggtacactgttgagcgtcttcttcgaaaatactcctccatcttcaccgtcaaaatattcgtgtaagtttatatgtgtcgcccgtcttctttcttttgaataatccaaagcaaactcatttttgttgctttcttgtaggtactattatcgtcgatctccctgaatcacacaatgggatagtctttttgacgctgtaatataatttgcttttggttgtacatgtaacggtgtcgtttgtatgtagaaggaagacttgtaattgggcccagtagtggcccatattaatgtataattaaataatagcctaatcttataattcaatcttgatcactgagccaatttacacgtgttgcgtctctagtgcctctggttccacgttggtcgtcaaaattgaaatcgcgtttctattttcttcacgaggtttcttttccccgcggcttaggacaatatgatccgaatcgttgaagaaactgtctccttgtgtctatgtttcgttttgatcccacattcctaaagctccaggtaccttttctacgtttcccgaattctgattagttgattcttcttcctcaatccgttcttcccaaacttgttgccgatttttggatccggtcatcaactttgttgtttatttgtcatcaatgcaaaaattgagagcgtctgtgttttcacttgcatgttatcaattcctaatgttgtttgccgtttcattaaccggattcgagactcttcccgctggatttctttttttcacgtcttcttttctattttttatggatttggtattttgacatgttaagcaaccttcgttaatcagtttaaaatcggtgctttccgaaatttttagaagaaacatggaagcttaaaattttgaaattgctatttggaaaagctatcatttcataggcttagtctttgtaattcttctttacttgttgttcattggcatgaatatatgaaggattttatatttgattgtgtgtttgtttatgttgttagaaattgatcaaaatgggagaagctggtcaatccagagacggagaatctgtcacgcctcttgttgtaagtattgtggcttccttttctcactttttagataatactttcagaaactatacttgctttatgctctcatcttaatggaattctgtttggagtcaacttaacgttctcttggtttctatatcaacggaaacatataagttgattaaaatggggttaaagaggatattcgtaatttttggttctttatgcattgagactaccattctaatatcagtaatttttccatggccagggcggtggtaatggggacaatgcggttgcaccacaagtgtttaattctttaccagctcttaatgaagctgcttcttatataactcaagcaacgtcttacttagggagctgtttttctgactattcaggtaccctttctttctatctgttgatgtcgtactcagtatgcaattccacgttcatatgctaggctttacttatggaaaatatgcttagcagatatttatggtgttaggatcttatcgtcaccgtaacataattcaggctttgcttagcatctgttctttcaatgctttcttcagtagaatatggtggcaaggatactatttcccacccccatgagttgttacgatcaacttccggagttgacgggaattccccagtgagtgtatgcatttcgcctggtgaaaggttttcaacttcttcagaggcatctacatctgatgccaacagcccgtcgagggaatctacagagattctgccacaggcaacaaatgcaatagtgacttcgaatcggttaaatttaaatggaatttcaatgttccaagggtacgtgtactttgtattacagatacaaattccccatactagtagatatgtaaaatcttaatactatgaatatgtgaaactgaagcaatacaataatctctatacactactacttcttgtcaagttttcagcatttgggtgattgatctattttaattcaatcaggctcattgagcgggcacggaggactgttcgtggctcggcagatgacataggatggttacagcgtgccccggagatgcctcctgttgaagatggaactgataggttcaataaaattctggaagacatcgggtatgaattggttgtagttgcatgttttgtgtgctttgtggccttttcaatatgctgtttaacatcctgttttttactaaatggctgcgttgatctggtttttatatccaggcatggtgtacacaggcttccaaatacagtggtgtacttattggttccaggtagcaattcttattctttgctgccagccacttaaactacattactgtatattaggactctcaaaattagttgaattttttttaggtcttttcagcaatcatggacctctatattttgtggatacgaaaacgaaattctcaaagatgggtttggcgtgtcatattgcgaagattcacagcgaggtaatcataactaactcaacttagtacagttacatttggtgtatagcatactaatatatggagaaatgtttatatatcagtcctcggttgagaaaaatgcgagagagataaaggaatacatagaggaactctgttggggatctaataagcgggttctacttcttgggcatagcaaaggaggcatagatgcagctgctgctttatcactatactggcctgaactaaaggataaggtcgctgggttggtactggcgcagagtccatatggtggaagcccaatagctacagatatcctccgtgaaggacaactaggtgattacgtcaatttgagaaagatgatggagattctaatctccaaagtcataaaggtttgcaacattcctgatctaacaaagtcatttcagttgcattatatcagcttcttgtgattgcctgttaaaatccttagttaggtggaaccgagaaactagggataaaccaaaacttattttgtttctggattctattgctctgctgatctttctgatgaattccttggaacattgtgaagggtgacattcaagcattggaagatttaacatacgagagaagaaaagaattcttgaagaatcatccgcttccccgagaactccccacggtttcattccgcacagaagctagcattagcccagcggttctatccactttatcacacgtagcacacgctgaacttcctctgacaaaccaagccgcaaaactgccagtggtaatgccacttggtgctgcaatggctgcttgcgctcagctacttcaagtcagatacggtgaaaagagtgacgggctagtgacttgctgtgacgcagaggttcctggttctgtggttgttagacccaaacgtaaactagaccatgcctggatggtgtactcttccttgaacgaggttcctttagaagctgatgctgctcaagtttgtgaagcgctcttaactttgcttgtccaagttgagcaagagaggcaacaaaaactcgcaacaaaaatcgattgataaaccaaattgttttatttctactttcgtcttgagacttcaaattactgtatttgtttctatctttttgttttatttcttactaatttactatcaggtttgaatcacacgataacaaaaaaattattacaaacggtagattttatatttataagactacttaatttgcttctttttttttcttttattgttgattaatttttattagaagattagttatgtttttctctctattcctttaacgaaccgtgatcgtgcggctcggatcgttggagattctatggacggccgatgcttatatactgtaagtggaatatgtaattcccgaaagtgccctccagatgttcacaaaattacgccatcgtactcgaattaacttcaactctctcttctctctctctttcttttcactcttgtttttgtttctgtgagtgctgtgtgtgttctcggtttgtaatatctaagtcgcacaaagatcagacaaagtctgtttgcgtttgatagcattagagtctgatcgaatttggaagacctgtgagattagggtttctttttgtttgtttttttttattccgaaggagagctgcggagcaattggaattacctcggttaaagcaatcacgtagctttggatcgtttagggttttctcattgggtttgggggatttgtattcgagcttcctcaaactcaatctgatggtgatgtgagacaaggcttaatcctgttaattggcgattctagggtttttcaatggcgagcacaggcgagcctgaccgtaaaaggcgtcactttagctccatatcaccttctgaagctgcagccgccgtaaagaaacagcctttcttttggccctcctccgaggacaaggtttctttcttcttcatctcccccttgtgcatgccctttacatctattctcttacttatccaatcaatcatagctttccagctattagagattcatatactgaatgtcttttgtctcgaatttggtctattttggaattgggattctctctcttaaggagtttgttttcgtttgatacagcttgatactgcagttcttcagttccaaaatcttaagctatcacaaaagctagaggctcagcaggttgagtgttctattcttgaggataaactctctcagatcaaggaaaaacaattaccatacaactccagtttgaagactgtccataagtcttgggaaaaggtaacactgaatttgctttcgattctaatagaacttggattagatctctttttctagagaactaattaatgcttgtatagcagcttacagcttcagtggaatcatgctctgttcgtgtgagtgattcaagcagcggagctcataggtttgtaaacaaggagggtatgaacaacttaagcccgccttttcttcgttctgttagtgctaggatctagtttagatttggttttatatgttacaaatatgactttttgaaaggttaactttaaattgctacacagatgggtcttctccagccgtgaaaaacgatttcatcaaccggctacttgaaactggtgctactgagagctcctcatccaatatctgctcgaatcagatggaagaaaatggagtgaatacgtcaagccagatgacgcaaaccttgtataatctagtagccgcgacagaggatttgaggtgtctgaaggatgaattatatcccacagttctcagaaccaatcttggtaaaggtatgacttccactgcgatcaattgtcagctcttgttatggcctttataacattttagtattaacccaggtcctatgtggaattgctttcttttctagatttgtgcggtcagctagctctgagtgagttggaatcagaaattaaaagtttcagaggggatctagatgatgtacttgtgaagttcaaatcactttctagagaattgcagagtcatcgcgatgctgatgctaaagttagagtagacctcaaacgaataagaggtagctacttagtctcgtctcactcgactatatactgttaaaatggattttttaattggcattgtttatatggatatagtattcatgcatcaaatgtaaatttgtaatcatatacgtggcttgacaaaaaaaggtcctatatacatgaaaagctactgaaatcatatctcgcttttgattgatgaggataagtgtaagtagaggtgatcaaattgtgaatcttccaattccacgcctgtgtatttatgtccagcactactcagttgtttaatagccatgattggatttagatcatagagattaagattgaagagagagatacattaagactggaagaaaacctctatggtagagccagctgttaagaagacatgtagctgtggaagatatactcattagcgaactgatgggtgtacaaaacccttctgagacatgaacttcttagttttcttttataccatttacccatatttatatatttcggtagattttaggagatagagaagctggtaattctttgagaatgacatacatccacataagtgaagcatcttaattttgttgataaattacccgtttaccttaagatgtaagatttcaatactgacagtagccacagttaagaaattcaaagagttaaaatttattttagtttacatgcctgcttttggattaatgcttcttgactaccgcatcaactgatattatactttatttggtctattcgaaggggagctagaggatgaggttgtggagcttcagcagtgtaatggtgacttgtcagcattgagagcagaaagggatgcaacagctggggcgtttttcccagtgttgagtcttggaaataagcttgctaccagtgatcgggagagggataaacaaagggatctgcaagacatggaaacagttctgaaagagttaacggtatctttgtttttctgatttgttttcattggtaattctttaagttttgggttgataacggcctggtttcggtaggtcctggcttcaggcaggctacaacagctaaaaaatcttcatgaggagaggacaaagatgcttggaaaaatgagtaatttacaggtcagtgtattgatccaattggggtatttgtattagtttgtctctgtatggggtttgatatatgaaaatttgtggaatggtagcctcttcctattgctaaaactgatgtaagagttttctaacagaacaagtcaaagtctgtgaggtgcatctcatcttctcaagcctgcctttctttgaaagaccagctagaaaaatccaaagaagcagttttccagtatatggctttacttgagaaactgcaggttatatctggtttgcgattttcattttgtatctatgtttataaaatttacgttgtatatttagttgtgaagctttcctccattcgaaaatttcaggttgaaaaagatagtatagtctggaaggaaagggagataaatataaaaaatgaactaggtgatgtttctcgaaagacgtctgctgttactgattctagaatggcttctttggattcggagatacagaaacaactggatgaaaaaatgcgaatcaagactaggctgggaaatatatcaagagagcgaggtcacaaattgattactttgacttccaattctgtatctcccacccacacctgtttcactttggagtctgattaagttattcgtatgtcaggtagaaaagaaatctttgcagatatgaaggcattaatttcttcgttccccgaggaaatgagttccatgcgtagtcaattaaacaattataaagagactgctggaggtattcattctctgcgggctgatgtccagtccctctctggggttctatgtaggaaggtgggaaataatgtgaacagtgattgatgcttattgttacagtttatgttatgcttacttaataagcttaattggtgaacagacaaaagagtatgaagcattgcaattgagatcagctgattatgcttctcagttaggtgacctgaatgctacggtatgatgcaatgtatctacctttttcagtgtactgcccatgacttatatatgttgacagtgttcatattggttattgttactttgcattatttcttggaaaaagtatagtgaaaaggcggattagcaatttaaatcttgttaaatgtctttggttggcaaagtggtagttgttatgttctttactttcaattgattggagtctgtcatgcaggtttgtgatttgaagaacagtcatgaggagttaaagttgtttctggacatgtataaacgtgagtccactgatgcgaggtaagcacaactatatataacgatatctaagatttcaattcttagagaaaagtttccttatcttccccttctcactgtccaaatatatagtataacaacaagtgctgttattaatcttgccttctgactgaactatcgaatcttgctgaaagtttgttgttaatttttcttgcgtttctgaagaaacttatgttcacattttcaatttatccatgacagcttttaatatctgatctatttttacagttccatctgataaaaactcttttggatgtgttaggatttgtttatcttcttatcttgactgaacacattattataatgcggttggtatattgccttaagcatcactgtcgataatgtgctatggcagggacatagctgaagccaaggaacaggagtacagggcttgggctcatgttcagagtttgaaatcatcccttgatgagcaaaatctggagttgcgcgttaaggcagcaaatgaagctgaagccgtttcccaacaaatgttggctgctgcggaagcagagattgctgatttaaggcagaaaatggatgattgtaaaaggtaaataagtataagtagaagtctgcaatttatagatgcaatcacgcagttcttccataggaattctttgagagttttttgtttgacaaggataagtcttttctgtttcagggatgtcgccaagcattctgatatcttgaaatctaaacatgaagaacatggaacatatctttctgaaatacaggttggcttatgaaatttcgtgtttctttgttcttaacatattttaaaaaccttgatgttgcgtatcgatttacagtaactatattcttttagacaattggaagtgcctatgaggacattgtaccgcaaaaccaacagcttttgcttcaagttacagagagggatgactataacatcaaggtatcgtgtccaaactcttctagttcctctatctgatctatctctgtgacttctcacttactcttatatctagtagtgttacatttattcagagattgatggatcgttttaatgggcatggaccaatttctgtggttataccttgtatgttttgctagaatatcatgaaaaaaaggatggtttgttacttggatcagacaatgagatgtaattttttgctcgcccattgttgtttcagcttttcttggaaggcataacttctaggcagatgcaagatactctgcttatcgataaatacatcatggataaggatatacagcaaggcagtgcatatgccagtttcctatccaagaaatcatcaagaattgaagatcaggtatatctgtgtgtgcccgtatgctcaaattgtaagcctccttattgtgagactttgactaaggtgtttttctttttccttgcagttgaggttctgcacagatcagtttcagaaactagcggaagataaatatcaaaagtctgtttctcttgaaaatctgcaaaagaaacgtgcagacatcgggaatggcttggaacaagctaggtcaaggctggaggagtcccattctaaagttgagcaaagtcggctggattatggggcattagaactggaactggagattgaaaggtaaatcaattgctccctccatcttctctatcctaattaatagtcataaacaagtgttagtgatgaaggtatcgttcttttctgcgtatatcaggttcaataggagaaggatagaggaggaaatggaaatagccaaaaagaaagtttctcgtcttcggtctctcatagaaggatcatcggccattcaaaagctccgacaagaactcagtgaatttaaagaaattctgaagtgtaaggcctgcaacgatcgcccaaaagaggtaaagagtcactgctctccattatttagatctcagcaagacgctcaaatcatgatcccttgaatcttttagtcaactgcgtgcgtgattgctgattggttttggtctttggcttaacaaactaggtggtgattacgaagtgctaccatttgttctgcaacccatgtgtgcaaaagctcacaggaactcgacaaaagaagtgtccaacatgctcagcaagttttggaccaaatgatattaaacctatctacatatgaccgcaccaaaacactctgagcatgatgatgtatgatgaaactgtgaaacacacacaggtactttttctcatataggataaacattagatctctctgtaattattactctcttttattgggaaaggtcatgaagaataattggatatggcaaatcagagtttttgaggaaccattttgggattttgataatgtgatagagaataggtaacactgttagggtttatgtctttggtgatacttcctttttgtttgtaatttggaacatggtttccgcaattgatttttcaattaaatcttcttttttgttctacatttgtgtatgatccaaacgtttgtgatgtagtgttctaagattctcaatttagaaaacacgaggcaagattttggatatttgtaccatttgcgatgaattgcaatccaatttgtttgttggcatctccaaagacttcgatccttgggatcatgattcgagatggtctttcacaatcctaggtaggaattacaagtatttttggtggatctccaatgaccttaaatattataagtgaatttagtactagtgtttctctctgtaactacggtttgtaaaagtgggttaaaaccaatagttgaaaatgtaagaaaaagactaaaatcatttcatgcattatcaattttgagctttaacatacaacttcggaatgtaccgtaaaagtattttagatggcctcaataccatgttttcccaataatacttgctcctttagccctttacatttcaagtattgcaagtgtttcctcttcccgcaagacatgatcattggtatttgccgcacatgttctttttctcttttctttcttttaaaaaaatggctgagaggtgaaaagaaagagttaatttatttgaacaatatgctcttaattattttcttcttcgtattgttattctcttctgctactgctttgagtttggtctttctaattgcttgctttttcttttcttggccactttattcccaaagataaagatcacatgttttagctccattctgcttctatctctcgggatctatatacatatacgtctgtatatcactaatttgattaaaatatcaaaagtgcagattgtggtagaaatatgttgtttgtgttacaaacaagaccattcattataaattataatagtaagaaattaaatacgtttcttatagtaaggaaattcatgactatattattatttaacaatgcaactatacataagaatcgttagcaaaatatttagtaataagttttccttgttcctattttttcgttgttatatttacgaacattttgacacattatctatatatattatacagtggtttttgtttttgtttttgaggtaaaactgtaaaagagaaagaaaatagcttaaaccaacaagaaataaaataaggtcacgcacataaataagtaaactaagaccaacaagaaaatagcttaatacactgtcaacctgcatttttctcttttaaaagcataatattgacgaaagaggaaaacaatcatacacttagtatcttaattacttttcctaaagcactacgactccattttcttcaattttatcttttttgtggaacttgattttttttttttaatacaactatacacatttcaaatctttttcattttactctatattttatttggtaacaacaacaaaaaaatctgatcttattagtctattatacttgttgaaattaattaccttgaaaatagtgtcacgggacaagatcaatttcgatccaaataattcgaatttatgataaaaattaagtttgtatactattttcaacattttcaatataattagctccctcttggtatacatagggttccttttcctttgcttttttgaattagatatattattggttttacacattgctagtaaaaaagaagagataatatatctatagttgtaccgtccaataatacggaaccagtggcaaatatcgtagtcttaagaatataaaatggactgattaagagtctgtccatagttaggtttgcatgccacaagatgccaaacaacaaattcaccttcttgtatcttgtcagtcaggtaatcgtccaaacaatccaggtacatacaaaatttaatcaatgctattttgattggtgaaacactaaaactgaaaccaaaactttttatggtttatcaaaaatatatttattagatgactcgctctttctttgaatatctattaatttgctacacttctaaattaaagttaaaactgttttaaaacgtatagtccgcgactacagttgcaaaaaagaaattcaagtcattgttatcttttttttttttaaatgcatgtcaggtaggaatattatatatatatatatatagtatataatcccatttcaataacactcagaagtttccaaaaaagaaacacaaatggtcgattaggaattgtggaggatacgtatgaacgtacctaacgttgtatacagaacgcgatataaataaagtaattgatcataggctgctataaattggagacttaaattgtctacatacattcaaagcttaaaatcatgagaaaatagaaaattaacccatcaattaattattattaccatgttttgagataatgatagtgagctcactcgtacacccactatgtttctatttaatgacctgtcttcaactatccctacgtctcaccaaatcaacatatatagtacatgtatattcgagtattacaaattttcaagggcaattataaacctaacctttttctcccttcgatataaaggtcgagttccaatctcaaaactaaacttaaccatcgaatgaaacacttgatatatgagtataatacgaattttgttgtggacgataaatctatttttgaaagatgtgtattgtataatgagtttgattcgtttattttttgtttgtttagtactaacctatgtgtgagcaaatcgtttcatgtagtgggttttcacctattttgccatttactgttgttgtatgttatgagtcttatgacaaaaaaaagaattattaaataaaattagttttatatataacaaagttatttgtcactctcaaatctaagggtccaatatgtttgggaatcaataacagtcttaaattgcctcatagtggtgaacaaagtaaggtgttggccaaaagcaatcaccttattacagttttatatcctttcacttttgacatatattaaagaagtggacaaacaaacaaagttaaaaaacactattaaaacactaaaattaacaacaaaaaatgttaaagttgtagataaaagaaccaaagacatcatcaccatgtgactcatgttattttccaacacctaagtttgatttgttttatatataacaattaaataatttatcaaaagtttgtcttcttcactgtcaattttcacaatcatcatctcatcaaaactcatacactatatatgacatattaatccgaaaaggaaaaggtagttataaaactagcccaagaacgtggattacgtgtgactgcgttaattaatgatgctctttacaaatatgcatcttagttaatgttggtaataattaagtatgtactaagcgaacaatataacgatctttgtcaacaagtgaaatacatttaaaatgcaaattttactaattcaaatagtaatcgataaatggacttgagagagagagagcaaaatccttagtaattgcggttgccggtaactagatagaactagtttgaagaaaaggatgtactaaatcactaatatgtactccatttgtacctttttatttgattgtttagaaaaaacacatatattaagaaaagatattaaatgttgattataaatgtattatttttagtgttttacagttttctataactttaaaccaatgataattaactatttttcttgaaaattacaatttatcaatactaaccaataaatattatatggaaaacttaaaaaatcaatcttttagaaacaatttttttttctaaacaatcaaaaaaaaaaaaatagagggagtatatgttatttttattactgattaactaggctaaaatgtattgatattgacagaataagtatttgataaatgagaatgtttgtgaataaatcatattgaattctaacaataatagggtctaaaaaatactctcaaacgatttttgtaaggctacattatattattctgcaatatttcaacatgttatcaccacatttatattacacaaacacgattttgctaggaaaaaaaaaagaaattgtttctttacaaaaaatcaatatcactcaagttggaaagaaaaaaaaatatcaaacgtaaatagagaaaatgaagaagaagtaaatggcaaactaataaagtgttagtgagagctctctcgagaggggtactttagtcattcagatagaaaaaacggctcttcaagccgaaacccagcatcggctccacaaagctgccacgtggacgagtagtagcaaaacgcatcgtttcgtatcatcatctcattctcatcggtaaacaaatccggcaaatcaaacagcttctcttcctcactgtctttgtccgtacacgccgaagtcgaagcacacgaagcttccgaatactcttgactctgagtcgtcgtcgtcgtgcttgtgtccgaagaaaacaactgagccaccacggctcgactcggctcggcttcaactatttcagccacttcagaattactcacatcgttgaccgaatcttgccagttaacggccgctaaagaggcggcggcttgaatgtctttaggagaatttgtgactggacgaggaagctcgccggctaacttgggaaaattgaggtaagccgttgtacctttaatggctaaagccgctacgtcatgagctcgagctgccatctcagccgttggataagtcccgagccagattcttgatttctttctcggctctctaatctccgacacccattttccccaactcctcatcctcactcctctatacgtcggatgtttatctccaccgttggtctttcgccgtttcccacctccaccgttttgatcatcatcgtcttcaacggagactaacgatgacaatgatcttcgagatgcttttcttttagagttgtcttcctcaatgaagttagaatttgttgatgacgaagaagaggaagatgtagtaggtgaagaggacaatgaggcggaagcggtgatggaggaggaggaagatacggcggggatggcggaggagataaaggtaacttgagaaacactactctctatgttgatttgtcttgccattgttatgagagaagaagctt

SEQ ID NO: 378 - DNA, 122928 bp, Arabidopsis thaliana
gaattcttaagattgatctgagttttcctcttacaccgaatgtttcagaagaagccaaaaatcttatcagtcaggtacacacccaaccaagctaaagcatacccacaacgactctcttgcttgactagttattaagcattaacatatagttgttttaaatcttttgcagcttcttgttaaggatccctccaaacgactctctattgagaagatcatgcaacatccatggattgtcaagaacgcagatccgaaaggtgtgtgtgcctcaattgatatttgatgtattctctcccaatctcaggagtcaggacaagtagcttatatgtaatttaatgttatgagactaatgtcttagaagtttagcaaaagcactttccatgtgatatattatctcatttcagcacaatataatcttagctaaaattcgtgtctcgatatttttttgtgatttgacttcttctaacatctaacacagaaagatccttagattgaaactaaaaacatcatttgaacctcgacaacatttctatgtttctaaacacctggtgaaaacaaagacaagtactcctcatcgtcgtcttcaccccttaaagctgtgtcagtaatggtagtgtcggtactgcaactgctagtgctcttctcatcagaaactcggggcagtgtaattcccatgactgaaacagaatgcttctggtcatctccatctttgcaaggcacaaccgatctaacagctgtttccacggttaacgggctaaacccggcattctcatgtgagttagtagtatcaactggatgcttcttcttcatacctctatgcatgtgcttatcgcagtacttctgaccagacaaaacatctttgctgcatctccacttcttcccatctgttcttcggcaccttcctggttcattgtctgtttcaactccttgtaaacgaaaacaaccacgttctacaacgaagaagcaagatataagacccagaaggtcatgtctgaaaatccctatgaaatgacgataagccaaggttgcaaaggtaaaataccttgaagaacagtgtctggagaaaagtggataccatgaaacaaaccaccattaacattcatattcttccattctctgcttcttgcaattatatcattcttcctgttgcttgagaattttgcagcttctaagcatttatcagatacctcagggaagaacttttgaaccgaaggtttgctctcatcacctagtaatgaaataatggaacctggtcaatccatggagcaatgaagaaatgaattctatagatatttttctgttgtgagtatgatggtatcatgataccttgaagaggaacaactccaacacacatactcgcctctttttcattaataaagtcatcataactcatctccatgttctttctgccgtgactcacacttttgtttgtgaattcagagatcactaaagacggacgaatgacattttcacaggatctggcactaggcagtgaagcaatggtaactacctgcgcattactagaacccgagattgtcccatgaagatgactctgactctcgttatacctatccaaaccataagtgttgtcgtatttggttgatgatgaagcaacctcagaagaagattccacaagctttcttgaacgtttacgacctctatgcatgtgccgttcacagtacttctcgaatagaaggaccgtgttgctacagcgccatttcttcccatctgttctcctgcacctagttggttcagtttccaacgtgtcgatatgggttactcccttgttactcaacactgcaactcaatccccaataggcacaaaatcaaattcagtcaacagaagtttgttgtgtatgtaaatcttttaacttctccaactcagaacccaaaagccaaaaacatgttcaggaagttaaataagcacaataaaacccatcaagcatttccacaacaataccccaaactttacaactgttgaatcagaacataaacttctctagattctgaggtccaagacttgtcgttatgttgtctaaaatcttctaaattgtgtctttttcttaccctagctcaactatcacgcatatactcctaagaatttcttgaaaagaaaactcgaatgtcaaattacttacgagaagaagagtgatagttgtaattggaggaagaagagagagcaagactgttccaaataggcaccacgagatgatgaggcacacggagaccagcctctatgtatctatacaccaaagcttgcatccgaaactccattaactgcgccgccttcatccacggccacttattcctcatcctctcctcctcaacctcctcctgctccattttagggctctgcatcttcataacaaaaattggatttttggggaagctttattcaattccaagaaaaaggagacagcttttgaaactagcgacacagagaagcaaaaacccacctcccaagaagaaaaagctttaacaacaaaaccaaacagatactaaaatctcttgctctgctcgctactgttcaatagagagagaaagagtaaaagaaaaacagaggaaagacgaagaggcgagtgtgaagagatttaaaggcagttgtcaggtttctgacaaatgcgtcagcgtttttcagccttatttgaatacttttcggacaataaaaaaagttgagtttccctctttaaacaatgccacagagagactgttaactcctctgtccagctgctccactatacatcattacatctccacgttcttattcctctatatgggcccatcttatcataaaaggcccattactactactccattaagttgggctctactcttcttctttttttttttttttttgctttaatgattcaaaatttgttgcttctcattggcctttacttataacatttctctttcacctgatgccttttcatcttggtcacatttttgtatttctaaaatctatatttttcagtaggcaggaaaataaaaacagagcaaaatactttatttttatttatagtatataaggaaagtttgatcatgtaatgcttgtatcatatactcactcactagtggttttttaaatattgtccacacgtgtaaagtaatgctttaacagctctaaaaattcctataatgggaagcagtgattcaatattggtcctcaccgaattgtggataattctatttatatgtagaacatgaacgtcggcaaccgaaataaatatatagaatttgaatcatacatattatactgtagatgattacataatatcaatacttttatatttatatgtattggtctttatatattgttttctactatacgaaatgtcaggtttgaatcattgttgagtaagatacatattgtattggtcactacaccaatccacaaacaatttatggtatataaaacattttcgataacaaaatagatagcattactgaatacactgaccaccacatataaaactcgacactattgatcaatttagatgaagaaaacgagaaacaatctccagtgttttatttaggccaaacaaatatctaagagtaaaaagaagcccaaatctctaattttttggtgtaatataaacaacaagacaattaaatggaatggcctcttttcttcttccagctatgtccgaaaaagaacacatggccccaatccaacccaactcacttcttataaacaacacacatttcaaaaatataaaggcaaaattaactctagtcaaatactctaacctaaccatgatcaaaatttaaccgtggttaacaatcatccttctcttttaacttcatctctcttctcactcagtcttctccacttcctctgctccacactgacacttgaaaaaactcaaaaccgtctcatcatggcggcgtcacagacattctcactcctcgccttcactttctccctcctcgcctttgcttccaccgtgagtagccacaacatcactcaaatcctcgctgattctccagattactcttccttcaacagctacctttctcagacgaagctcgccgacgagatcaacagccgcacgacgattacagttctcgtccttaacaatggcgcaatgtctgctctcgccggaaaacatccactctccgttattaaaagcgctttaagcctcctcgtcctcctcgattactacgatccacaaaaactccacaagatctccaaaggcacaactctctccaccacactttaccaaaccaccggaaacgctcccggaaacctaggattcgtcaacatcaccgatcttaaaggaggcaaagtcggatttggctccgccgcttcaggttccaaactcgattcatcttacaccaaatccgttaaacaaatcccttacaacatctcaatcctcgagattgatgctccgatcatcgctcccggagttttaaccgctcctgctccttccgcctccttgtcaaacatcaccggattactcgaaaaagccggttgcaaaacctttgctaatttgcttgtctcaagtggagtactcaagacttacgaatccgccgttgaaaaaggcttgacggtttttgcaccgtccgatgaagcttttaaagctgaaggtgtaccagatctgacgaagctcacacaagctgaggtagtctcgctcttagagtatcacgccctcgctgagtataaacctaaaggctcattgaagactaacaagaacaatatctccacgttagccactaacggcgccggaaaattcgatctaacgacctctacctccggcgacgaagttattctccacaccggcgttgctccgtcgagactcgcggacactgtgctcgacgcgactccggttgtgatattcactgtggataatgtccttctccctgctgagctattcggaaaatctaaatctccatctccggcaccggcgcctgagccagttaccgcaccgacaccatctccagcggatgcaccttcacccaccgcagcttcaccaccggcacctccgacggacgagtcaccggaaagtgctccttcagactcgccaacaggttcagcgaacagtaagtcagctaacgcagcggttggcgtgagcacaccgtcgttgttcaccgcattggtcacgatcgccgccatagccgtctccgtgtctctctgctcttaaaacctttcgtaattacgcaggctgccactccctttgtttatttttaatttaattatcttttcaatttttatttttgtggttatgtgttgttgagtttgaaaacatgggattagtgagtgaggttttatttaaatcgtttgttaatcacattttcattattgctttcagtgttgatctgatagtatcttgttgagatctttggctttcacttatttaacttcttttccatttttggataaagtgctttttcttctaataattttggtaccgacaaataatgcatcaaactagaagtttactgtttacctttatcagttgatggtaattaaaattcttaaaaactccttaaaattttaaattattatcgctacttggaactactttataactttcttttgtccaagaactactttatgattataacatcaaatattaaggcttagaatttcatgttttctctcgtgtagtgaatttgattcaaagatgctttaatatttttttgaagaaattttagctggtaattcctgggcccaatttcttattatttgaactcaaactttgttttgaaagcaaattgattccttatttatcttcgccggctaaatgctaagttttcccgcgaagcaacgaacaaagcaacattcccacttttagcctttaacttgctttatttattattattaaaacgatgagaataatttaaatttgtagattatattaaacgatgccgttttctcacatgtgcaaaacaaattaaacaaatgaatgggtctacattgtcgagggttgggagaggtggcccatttatatttattaagagagcgaaaagcccgatctctttcatctcttgacaccgacacttctttaaacaatggaaacgtttttttttatcccgagaacacaaaccctatcgttcttaactctagaaaacaacactcagttcttatctccattcaacgaacgacggagcgtttaaacatcagtcttcctcgagaagctttaccaacagagaggttcacacagcacaaaaccccttcactcactggcgtatttgacagttagggtttcaaaatccccgccatatttcttctataatcggagtgttaatggcgtctacagcggctgaacaagacgagagaaaaattgtatcggtagcatcgaacgctagccaggacatcaaaacggctgctgctgcatcgcggatcagtagccaaaacggcgcttctccatctccgtcgctcaactccaaggacttcatcgtctcagcagcagctaacatcgcttctcagccgttacagaactacgattcgaacgtttggggagtcctcaccgcaatttcaagcaatgctcgcaaacgccggcaggtttgtttctctcttacaaaacccatattctttcgaattccaactttaattatgctcagtgttttggtattttggaactttaggtctgttatgcgattctcgttcaaattttgatttggattcgtgatcaatagggcataaatatacttttgacttctgatgagcattgcttaggacggctgccatgtcacgctagttatcaggtagaatcaaatgcaattagcgggaatcactgtaaggtattccgtaagccggtaacaggcggtgatggggatgatgtaactgtctttatggtagacacaaggttagtgaactctctcctgtttcaattgtgtggttcatcttttttttgcagttgttaatgtcttcggctctctttgattcagcacaaatggtacgtttctcaattgggaaaggttaacaaagaatggccctgaagtcagggttcaacacggtgacatcatatcgcttgctgttcctccagagcatggtaacataagttttctgtgcattagcattgtgaattcatatctcaccttttatcacttgtttaagttaaactgatttgttttgtgtgggttactatactgtttccagttttatgcccatttttctagatcacttaacatgttaacactagatatctgcattttttcagagaaggcatttgcatttgtataccgcgaagtacttggtaataatcctgcgctgtcctgcatgaacagaaaaagaaaagcaggtacgagtcacgaaggtcacacatttttttctttctgtcctaactttccatgtttatatataactaaagaatggcacgtctcagggctctttttcaccattataaagcatatgttttttgacttctgagttctgattagtgtttttgctcatgtgaagaggatactacttgtgaaattaagaggcagaagggcataggcatcagtggtcccaatggtccaatatctttggatgattttaagagcctccagcgttcaaacacagtatgttcatcattgatattagttttcattgttagatgtaagtgattgtatcaatcttgatgtcattctcaacttatgtgtcaacgaatcactgttgtatgcaggaactgaggaagcaattagaagcccaggtgcttaccattgacactctgcgtaatgagtcccgctcaattgttgagcaccatgaaagtgtaagttgagtttttctttgaatccttgtcgtggccagtggtggttttgttatgttaaatgttgtttcaaacgattgagtgattgaaggattatttgagtatctctactgaaatatctttgcatttgcaggaaataaaacagataaaagaatccactgcaaaatcatttcataatgaactgattgagctacgtgatcaattagatacgaagcagaaggaactggcgcaggtcaacaaattatcagctgaacagaagaattccatagatgaacttggtgagagagtaagcgcttctttgcaaactctcagtgaagcaaatgaagtaattcaaaggtaaatggaatgcttttcccttgttgagtgtgatcatattttatgcaagtattgtgacaagtttaatttatatgtcccaataatgatctgattaaagccatctttaaatcgattatttaagctgtgaagcagaagacactttgaactgtttcaattcggtcattttttggcaacaacatatagcttaaacatttatatacactgcttcttttggtagtcaattggcacttcgaactgtttcatttttgtcttttttggcaataacatataattttttttttttttttttgtgcaacaacatacatttacatgcactgctttttttggtggtcaattggtctgtgagtatgaactgtttcatgttcaaatgtttttcttcatattgagttgtgtacctttttagaatatctgatgtgactatgttttcatagcctgagcattgcaaatgtaaccataaggaaaaattacatattgctttcagtcaaaaggcatctatagctgaactgaagacggggttggatgaagagagaaaccaaagaagagaggaaagagaaactgccattgctgaactcaaagctgcgatacatagatgccaaattgaagctcaggaagaattgaaaagattttctgatgctgctatgagacacgagagggaacaacaagaagtaatcaacaaaatgaaggtatgtaaagacttagttgtgtatgaattaatttttcccattattatgtccttcgaataagacaagtttacttggcaaatattttaggagtcagagaaagaaaagtcaatgcaagtcgaaacattgatgtcaaaattggtatgttattctaatttatttcacaattagcctcttgatcacaaaaacttgtactcaaattatttaccatttgtcatttgagaatttttgtggtgttttataggaagatacaaggcagaggttggtgtgttctgagaatagaaaccgtctgctagaagctcaagtttctgaggagcagcttgcttttgctgatgcacaaaaagtacgtgacctgaatgcaatttccctcttattctgcatggtttctctcttttatttctgttctaacgggtgcacaaaaaatcttttggagcagaaactggaagaacttgaccttcaagtaaaaagactgcaaaaggatctggacagtgaaaaggtaagaatggaaacaaatttgtgcgccttaaacttttttcccagttttccattaatgacatgcttctggttcccgcctctgatttctgctacgaaaatatgatgccatgcttttaatttaacgattgtggacatgtagctaaaatctttttttgcgtagtctccattgtatttttaagctgagactgtctttgttatgttagcaggcagctcgagaagaagcatgggcgaaagtgtctgccttagaactagagataagtgctgctgttcgagaccttgacgtcgaaagacagagacaccgtggtgcaagggaaagaatcatgctccggtaagaacatttgcatgcatggtataataacgttaggctgctatttctagtgtgtatgattggttgggtaacctactttctgtttaacaccttcaaccgtcaagtaaaatgttgccttaaactattaagattcatttcacgcaaatttgattggtctaactattgacacacggaatcttcatgcagtgaaactcagatgcgggcattttattctacgactgaggagatctcggctttgtttgcaaagcagcaggaacagctcaagactatgcagagaactctagaagatgaggataattgtgacaatacttcactagatattgatcttaatccaataaacagaagtcccaacagagctaatacgcagggagataaaagagcaacttcccatttgaattttgctgccagggcaagctcgtccacttcagggcaaaggtctaccagaaatgaagttgtggatacgtcatgtgaggatgcagatgctacccaaaagcatgattgtgaaatcatgagtcaggaaggccaaaacacccaagaagcagagtatccaagctctgataaagttgcaaagggtggctttggctcagatatagaaggtattggtacagcacccacttcgggaacagaccctgtaggaacagagcaagtcaatgaaactcaaagtccaggaaatgattatgagagaaatgatcatctgaggaagtctattattttagctggtgatacaatgcaaatagattgtgaaactcaggtacatgaaagtgttcagattgaaggagctgttctcttgttaaggaacccgaacgatcgaagggatactcaagacatagagggagtaggtactatagggacgtcggatcttctagcttctgaagttgcggggagttgggctaatagcacgaatccttctgtacatggagaaaacgaaactgaaagaagtagagaagatgaagagagtcagactcaaaaaatcaaggaagtgaccatagtacaggattctgctggtcagataggggaaagtcaaactaaaccgacaagtccaggggtcctggtcactaacaaggatgatgcagagcgtggagttattaacgagccagtggggatcactgatcaagggaagataaaacatggtactcgttcggactcagagacagagagttgttctgactctgatgatgatcatgagaaggaaaaacacaatcctgtctcagattctgatacagagggttctgatatgaatgatgacaagggatcactctcgtcggatcctgatacagaaagaagccatgaagttgatggggatcagaagaaacaagtggacaccatggacgaagacgataaagctacttagcatgattcccgtttcaagatcttattatgagtaacatgttcatgattttacagtcttttccaaatccctctttgttttgtattcgcacacaccgggctcattttgtcgtttacattagaagtagggtgtagataacgcaggtcaaatggtaaggtttgtaacaaaacgagttgtaattggcgtggaatgcagagctaaacgaagtgattaaaatttttgaaagattaagatgtgtctatttcataacaaagtatttccataatgtgatgcaatgatatcaaaattgaatgaaagaggaatggagagggctaagctagagatgagatggggctaaaaatagacagcggaaagagtaagtcagaggaatcatcaatggttaatctgaaattaaaagagaggctttgatggtgaaaggaggaagagaagctccttttacaaccatttcatcattttggaaacagtagcaactccaaaacttacccttcaaactctaatcaatatcttgtcatttttatgatctctttagtggtaaaaattcttagctttgattgagaagatccattgttgtctatgggatactcaaaaggatggctataaataatagttgatataataatagagttataacaacattataacaagttttgaacacttttttagaacgaagcgtggatggggtttcatttcggtgttgactatcacctccaattccattgatgactcttattactagtttgtctatgcattatggtttctatgaaaatatatcaatacaagaaatgagtagaatttgtagtggtcctagtccttgccctcatcaatttattctctctttttttctccatatatatcatcaatacatgtaatgagtagattttttatttttattttttttgtcaatgagtagcttgttatttctattgaatggttatgagttttttagctttatattatacatgtaccacatgaaactattttcaaagtgtgttttttcttcctggattttaaagaaatacaagatggtaaatatagttttggtaaaaaataaatttgtagtttggagaatatggagagtattattgattgggctataagaagaggaaggggattgggcatgtgcatgtggaatttgggtttgagcattgaagagtggaaaaaatagcccacaaaattcataatgcaaatgatgatgatgatggttgatgatgatgatgatgatgaatgaatccatcgtcgtcgagtggggaatgggggttattatggcaaatgggtatgatgattgtgggaagaagaagccaaatcggtggtttcgttttccaaattaaatgtgctttggcttttgcttcttctcctactcgagtactccatgactttttccaatactactactactacatgtatgtatgtatatacaaattaaatatagatttgcgtatattggtaaagtcactgcacccgattcggtagtatccattttacactttttcctcttccttcgatgtttcagaaaccattccctaaaacctcgctatctcacgtgacccatcacgagccatgattccctcttcttaccgttgctttgcgttgcatgtttttgtatataatttatagattttaccaaaaaaaagtgtttaactagtatgatttcatttgaaataaacatattattctaacacgtaaccataaactctaatgaccaaaacaaaagttatctgtgttatcgttaaaaatttagtctactgcccaaagaaaagaaaaagtgagtgttcattagttaaaaatcttaagattactcatccaacatgtagaagaaactattggacagggaacaacgacaacacatgggtgtaagtaaattataaatcaactttagaacttaagtcttgttgtgtatttaacggaatgattaaccatcattagatatgacttcaacggtttgaaaattcttgatttatactctctaccttggatgctcgggtacgtaatctttttccccttttgaaaaataagggtattgttgggattaggattcataaaagcaaatagtaaaccgaaaacacaaatgaaagaaaaagaaataaaaagacaaagacttgtgatttaaaaagttaagagaaacacttgtacttgtaaggaagatcgaggttttgacgtactctaaaccttttttgacttctttggctcctaaataatcatgatttgaccttttggcagtcaaagaaatctgccaaatcacttcataaactcagataattgtcgaatagcatatatatgaatcctatcctttttattgtagtaattttggattaatcttgtcacatagacggtataaaaccactttcttatttatttactttgtcaacaaaaaaagaaccatttattgttattgtgtaacggtattgaagttaagaacacacaaaaagggatacgtatgtctaagtctaaccgtaaacgcattctgaccgaatatttgtatgagcgcattccgaccgaataaattactactacaagcattttgtagatatgaacgaatttatttgtaaagtataattgttgaggtatcaatatagccaaatgttacgcagaattgacaaactgtcaccttgatttaagccttcatgccaccgtcaccaatgtaattaagttgacaaacaaacaaaacttattataagttataaaccaaaattgaatagtttcttatgtcgtgtgtacgtaccttttaacggtgaattgagctttttagggaaacctcctaaattcttccaaatagtacacatttaactaatcaatcagtcaaaaacaaataagatatacatagagagagagaaagaaaaggacagtttttgtgatacatgttcttcttcttcatcctctcaaaatttcaacttcatcttctccctcatcacatttttccctgtccctttgtaatcatgattcttcttttgccatcattaccttctaaaggagccttctctctcctctctttaaacgaataatgcaaagggaacacaaaactcacaacaaactttctttcatctatataacgcctctctatatctcacccattaatcaaacacgtctcacttatctctcttcttcatttcttctctcttcaagctccaagatgtgtttaagttcttcagaaacattttcagacacacccacgagattagttttatacctcaaaacacaaagtcacgttcgtatccctcgtctctccaggttagttcaatctccatcatcatatatacaccccctctaggagattctcatcgactatgtaattacgttctgaatcactattatttttcctttttttcaggaggagacggatgtggcgggaagagaaaaagatggagatgatcaatctaaagctttacgtggagaatcaaaacatcataagagagaacgagaaacttaagaagaaagctcttcttcttcaccaagaaaacaaaactctcttctctctgcttcagaccaaaaaactctcctctgtccataaataaaatcttaccatcatcaccaatcactaagatcatcatattcttctttctttactgaaataataataagatctcaaggctccaagaaaaaaaaaaacagaaaaatttgggttttacaagcaagggtttagttattattagtgggtatacatctaatttttatcttctttttagtgtgtcatctctttgtaatctttgtatctgagttcttttgttaaataatggttaatctactttcttattcaaagttttggatattaatctttttaatctcaatggaggagaaatttacacagctggcacgaacatctcacgtgacgtgggcaccccaaacaacgtagaaaatcaccttaatattaaatttttggattccgagtatccaacaaaattaatgattttcacatggcgatgccgtgaccgttccaagatggcaaagccatgctgtttcaaacaatattatcaaacatgcgtgccgtttctatctccctcctttgaggcaaccgtaaaacagagtataaaagcagaacataacgatcagagaccaaaacaagctaagaaatatgatgaaatcattccttgagttttcattcattcatcagctacataaaaccaaatgatagaaccatctcttcttcattaacaccaaacaaaaaggaaccaaaaattaaaaaaaaaaaagtatgctaatatcgaccgataaggataaaatcatcatcatcaagagcctgaacatctttctcacccacaaaatgctctcgtccaatctccttcaccagtttcacaaactcaagcctcttagacagtggcaatggtacatatggtaacctaaaaaccggcctcgaaactccaagctgagccaaagcagtgttgattccaatcgggtttggctcgtggaacagccaagccatcaaaggtagaagctttgagttcaaagatgaattcctaccttcaaacatcaacttcctcatcaaacccggaactaaattactagtaactgatataactcctgttgctccataatcccatctggaatcatgacactcatcatcattcccactccacacaacaaccccattctcagtgtactcttcgactcgcttgttcccaacacattccttcacaccagctaaattcggattctgagaaagtttgaagatggcacgaggcggtatatcttgccctgttcgaccaggcacattgtatataatcgtcggtcccatatgaagaacagactggaaatgtgcaatcagtccctcaatagaagtcttgccatagtaagggtttatatgaagagcagcatgcattccaaccgcgaatccttgttcagtcgcgtggattgcttctctagtcgaattgcttccagtgtttccaatgactttgatgcttccgccaaaacagttaacggtatggcctataagcataatgtgttcgtcccagctcatcagttgtccttcaccagttgtaccaccaacaatgacaccttcagcaccgttttgtatctgaatgttgaccaagtcatcgtaggcttcaaggtcgaatcttccatcaggtagatacggtgttttgatagctgtgatcacacgtagagctttaatgtcgtctgtgtttgtcctgacaagcacaaaaacaaaacaagttccaggtatggcataaacttccagaacagagagtatatactatgagattgtacaatcatataacgttggtccagctaaactctatctgacagacctgtttttaacctccaagctgcgcattgggagatggaaattgggtacaacagctgctttgggagagacccatttcgagctccttctgtgttaacaacacacatgagcttgagtccatacgtctcaatgtaagaaaaaaaaagcaactttatttataaaactgaagtctttctatatgattagacaaaggaagtaatagtttttcaaatccaaaccagaaacattcaattgcaaatttcaattagacaggtttacgacagaatcaccattgaactaatagctttcaatcctagaacactagcattcaatttcaactagacagtgactgactattcaagccaattccagagattattatgcctagcttggaataagcaaaacacacaaaagcttgagcaaaacgttatatgtctgcaaaatatgagggagaagagaaataacctcttgtagctattgaatagcttaggacaggggaattgaagagcagagtccatagaacacaagccataacctttcaaagcagccatctttgaaaacaaacaggaacgaagaaatttaccaaaacctccttaatcacgactgtcgtcaccaaagctggtaatcaaaatcggttggcgacggtgatactaatagtgttgtgaataattccgataatcgttgaacggagaactgaaacaatggagctctggtaatggtggctgagcataatgagggaagattccgaaaagatcgatgggatttgtaacaaggataaagcggcgagagagattgacggaggacgaaactaaaaagcgtcttagggtttttgtctctctctgtatctcctcagatattgccacgtggatactgattgatacgcataatttttttatggtcaatttggggtttttatagcatcttttggaagaatttatagcacaaaacaatggataatttaatcatatgattaaggagggctccattggatattaatcttctcgtaagtaagagattatgcaaggcacgttcgtatttataaacggtccatcgtgactgctttgtaatttgtataattgtttttttctttgcggtcaaaaaaaaaaaggttgtatctgatttgtttttgtcaacgcgtcagaattgtgtttaattgtctttaaagtaaagcccattataggcccaaatttaacaaaaacattccgatcattataagcccaatattgtaaactggaaacccgaatcattaatagttaatgaaatccaatactatagttgatgttggtctatctacaattatagtattggatttgttgtgcgttattggatttgttgtgcggtcagtatagtgtaatcattgaattggaaagtcaaaagaatatctatagatgtctaatcactcataatgccgaaaaatatcaaaattcagataaaacaaaagtaaggtacaacaaaaagtaaaatggtagaagatagacatatataataacgtatatattggctaattgtggttgtatagtttagctgtcatcatggaatttaatttaggatcgtcttatcggacccaaaacttttgagactttggtgttaggtctcgaacactacattttctccgatgcatttccaatataaaaaagttaactaattcttactacgtctttcttctctaagcgcaatagccccttgatgaattggatcgtttagttgtaatgaccaaaactttgacgaacaaaaattgttgatcaagcgtctaatattctcatttttcaaaatcttgatcgtctgtttggatcaatatccttttgataaattaggacaacagaaatgaccgatcgatcatagattcataatcataggttatactaaaaatataattggtggagtgaggttataaatgcaaaaaaagaaagaaaaaaaagagagagtgagaggaaatgaatgatgggcaaagtgggagggaggtggctttggaagtaaggaactctctctttcttctcactttcactcatcgcctcgtaaaggaacttttcttctttctctctcagagacatgcacgtgcgtcggtgcatcatccaatgctcttctcttccccaaccttaattgctttctcatctctcacttacaaaaccctgctcacacaatttctatatgtatacatacttccatcaaatccatgtctatatatgcaacttgatcaagtgagttagtcaattatacaatcatatatcattctcttgttccaagttctagaatctaattcctagtcaatacctttttcaataaccaaaaagtgattatgaaaattagtttagattttaatatttggatgtttatacaaagattttcgtgtaaatgtaaagtatctgccaaatgcaatcaccttgttcccaagtcttgttcttgtcattatgcctcttgcctcaccatcttctaaccaacctcggaacaatcatctttttttttcttatgtcttccaacttaagttaaattataaatatctacagccgtttaaactttaaaataaaaataaccgttgttaactctttgaacagaaaaaagtacaaacaacgtgattttggaaaatgagtttagagtttgattaatcagcagtaacggacttgaagaaattcatttgacctattacccaaaatctaacggaagaacataacaatttgacattgttagtgacctgtttaaccttaatcacaacctttcaacgatataataactatgcactagaattcaacatacatagatagacacaaagctaattatcaccaacacatgaaaataaaaactcgaaaatcaacaattttataatctgctagtcaacgcaaaacacaaaccccctctcaaacctaatagatcgatcaatcccatgaccaaaacgattctcttcgattcatacgtaccacgaatcttcgtcaaagactacaattatctttagaaaacaaagaagaagaaaaagaaaattaaaacttgacagaagagagattataaattaaaaacaacgaacgtatctaacttgttttttcttcgcgatttagaaagatggtctcggagttccccaataagcttcagctggcaattgaacagaattcataagattcggaggcaacccttgtataaacgacgtcggatcttgcatcaactgttgttgctgttgctgctgcgtctgagtttgcgtttgcgttccaccacccattgttgcgtttccatcgatattattagcaaccgctccagctgtttgctcttcttgatcgtcttcctccaacggcagtctctcatacgcagcgtttccaaacgaagctgccataatcactacaggtcctgaagccatgagtggaccaaccacgcttcctccaacaacctgtccctgaccaccggctaagtaaatcgttagacctgacgcagctggtggagccggaggaggaaggaatgatcccgagagagaaagaatctcgaaacgtccgtgtaagttaacgacagatgagccaccaccaggtactgaagctggttgtcttatggtaacgttggtaacggcgccgtttccgctcaaaacgcagatgccacgttggcgacggcgagcgaagacggtgacactttccatgacgtcacatccgtttgctacttccatgacatgagatttgagagcgtttgcgctgtctcgagtgatgatgattggcggttttggtttgttcttagatcccgctggtctgccacgtggccttctcgtgatgtgattatctcctcctcctccgccgccgctttctccaccggagccaggagtactttgatcttttccggctgaagagtgctcgttgggatcgatatcagcatctcggtcacgttttagcccaccgattcggtgctggtctatatcgtggccgtgattctgttgctgctgctgctgctgatgctggaattgatggtgtgggtgaagatggagatctcttgagagaaaaggtggaggaagagagcgagagacctgatccattacttgatataaaaagcaaacaaaaagtaaacaattgaaaccctaatttagttaatctctcctcttctcatccactcaactcacaaaaccagaatcttagcttgagggatgtacaataactcaattaaattaatctaaggagaaaaaaatctgaagtagagaaattaagagaagggtaatacaaaagtcatatacatgtaagacgaaactggagctgcactagtaatacatgtagatgaagcttgtaagaagaaggagagagagatgggtttagggttaggtcagagaggaggaggaggttaaggttaagatgaatgatgaatgggttagttttggtttagatagacagcgtgccgcatgggcggtgtgtgggtcctacctactgcatcactttgtgggctctacaatttttttctttaaaaatatttctctttgttagttgtgtaataattttcagttgtgtttcgtctccctttaattgaaaatttgaagtataaggtttttttcttttttagtctatgaaaatattggatgaggtttactagatagtccatggatgcgtgagattatatcaaacattataatggacacacaaattgaagcgcacgagtcttatattaaatctgatcaaaggatactaattaaaaaaaaatgaagctcatgatgaaactgatgcatatatgcatgattttgtaggtggtacatgccttaatgtacggtcttttaattacattttatcaattcacgagtcttatttttttagcaaacagtcacgagtcttttcattatattatgtttctcgatgtaacggtagaacataaaaaaaaaaaaaaaaaacaatttacacattcaaaaacttatagagcaacagaaaaagttaaactctacagtacaaataaagtgggtaggataaaccttacagcttatctatagttcgtttaaacttttaaacgtcacttagtgataaaataaaagtatactgtgttgaggagtatcagtattaattttgcgtttacgtatcataaacttcgatttgcgttgaaagaagaaattttttacgaccattatgaatcccgattgcatgatgcatacattagactttagaggattcgttgggggttgtttgcagaacaaatttaattattttcttgttctcacatcatacaattgtttttatgaacaaaaatacttttaataatatactacatgtgtacgttaagattaattaaagtgcataaaagttagtgacaaataataaagagttgaattggagaaaagaagctgaaattatgaagaagagacgttattgtggttggataatgacagaacttgttttaaatatttcacttaaaatctatcagaaccacttaattgtatatgtatatatatatatatattatatatacacatactgtgctttttttagaaaaaaaattatacacatagtactgtgcctattatatattgtggaatatggatactgttgttttactaaatcaaattttaatgtatatagtctctgtgtacttaaatttatttaaaaatcacaaatttcttttattttaacgattctactatcacatggttttagtcatcaaagtgaaaattgtgtatacgaagtagtatattaatgattgtgtttacacaacatcaattggtcgttaattataaaatacaccatcaacatcagattgaatttttattcattgtctaactcaactaaaagaatgtggaaacgttaaattttcaactccttaaaattattatgaaagctgttgcaccagtttgaaagttaccaattaaacatttcaagaagaactggcttaaattcctttattttcagccgattcctttattttgcttgtggctttttagcataaagtaagtttctactactaggactctaggagcatagtataatattcggagattaattgtgtatgttgggtcgataaggcagattcaagctcgtaaatcgcgtaagcttgggggaaaactaaagagacaggaagtggaggaaagagaagataacaggcgcgtcagacgccgttggatgtttgtccccgtcggttgcgatgccttcacgtaacaagacaatccagcgaggaccagctcacactcgcacgtgcagccgctgacacgcgtgaaggattcatttaatggtaaattaaattacttaaaacattgactcagttcagagatatgcctgaagttcagaagggtggctttcacgtcacgatggggaatatttttggtcaccaacgagtgatttttcacaaaagttcaccactcaaaatgattaccttaaaatatgtcaaaattgtcaaatttcccaaaatatgtaagcttcttcagttcttgttctcaccccaccaatgtaacattctccggacaagacatctcaaaaagtgtttgacactgccagtacttctcattactttcttgttttcgactttatttgtcttatttaaatgttttttttggtacaaatatgtatatataactaaataaataattgaggttttgataagagagaatctcaattcttttttccaaaaaaaaagtatatataatcgctgttacatacgtataaaaacagctctggattcgattatgattctaccatgcttaataaagtggataaagatttaatcaattttaatttcattaccggatagtctaaactaatgttggatactggattatgaagcttgttaaacgcttggcagttaggccagcattaaaatttacgatctgtaaatgagttttattcatttttaatgtatctagcttactatttttatgtgattcattaattatgtcggatcatatattaataatacagcgtccacatataaaattatgtacacacataatattatacacatcacttacaagtttcataatgtttaagcctttttcaactaaaaaaaaaagtttcataatgtctaccaaaaggtcttttgcttttgttttttcttgatttcatattatatacatggtatataaaaaaaatattcaatcagaatgattaaaaacaaggtactatatagatatgatgattggggaacaacactgaggattttcctcagtgtatatatatacatctataccaaatcacattttttattataacattcatgaacatatgtcacatagggacgtttcggcgatcacccgctagtaaatccaaacaaaatttattttcatttttgattttcttttgccatactatatacaaaaaaaaaagagttctgtataaggtgtcttcttaaatcatactacactgaattaatatagaatacgaattcgtatattaatcgtgtagtttagtaatcacgaagagagagagaggagagtaatgtgtgtgttgaccgcatgggaagaagagagagatgtaggttgaatctgaaaccaggacgtgtgggcgtgattcttccctttcccacccatcccccgcggatcccgctgacacccgacccgacccgatccgggtgggtttacatcggactaaccactcgcatctcacgtctttttgtcttcgcttgaaatccaatcaggatgggccatgtggctctgaatcccatgttaagatattctacactaattactctttggaaaaacaaaatctgcaaccattaattcacttggatcattactcactaaagcctaattaacatgttatgtaacccttttctttgtagatatcaagaaatttgagaataactagacatttggactgttgtgtgtataatctcttagctcagtgaattgcatatgctcattaatgttcatatcttacattttcctattctctatatagagattatttaaatcaaattgagatagctttaaatgacgttaaaaatcaaactatttccactataaaatcgaattttaattcatgtagtaattcatttgggatgtaattgtgcatataagacataaccaatatcttttaaaaagctatggactgttgtgtgtagtattatctcgaagctcagcgtttcgctaaaccgagacagcataattgtatgtaataatataaaaaagcggacaataattttaacagattgctatatcacatatatatccatctataagaaaaaatttaaaatttttaagaggcatttgtttttctaggcctaagtaatttgtcattatagacatatatgttgtctaaattgtacggctcttaattagtctataattacgtattttgtctccacaaatatgaaataattacgtaagaaaacgaaaaaacaaacataagcattttacatagttttttttttattttttataaatagatataccgtttagaaactttgtaaggtattttatagaaactttgtaccgttttgtttttctcaaccaaattctcaaaatatagaatatataaaaaattcggtttcagccaagtggaaatgaaaaagttaatggttgattaaagtgagagataaggacggacgtgtaattaagacaaaatccaaacatagctcgatgtatcttttggcacccaataactttttaatctattagcacatccacatcggaatttgtcatatatgctttgcttttttggatatgtgaccttatgtcatgaaatataaatataattcgtatgaaaaggcactctagcgtaaggacatatgtataactatcgaattatttgaatattaaagtcgcaatagacaatttctttatcgctaaaacaaagacaaaatatagtcatctattgaattatttataacaagatattactaaatgtcattttctaacctaatcaatcaagttggtgtttaccattcatcaccttcacatcgtccgtttaaatcttgcatacatttccatattctctccgcagactgaactctattagaaagttcctttttatttctatctacgaaacaatttaaccactgtaatcaagataattgatccactatctctgtaattatgcggaccatcccgattatttttatgtattgaaaacagagaaaattgaaaagaaaaaaaaaagggttaaaagaatggaccacgtacagccgaggttgtcatgtgatggacagcgattaacttagaaattagaattattaaatatctttgatcatcttttgaaacgaacaaatgcctcgagaactcggtgccaaaatgtcaacgattctcttaacatcaacttaagcatcaaagcacaacgcatttggactatttaattaaatgtaaattacaatcataatcttcttcttaattacttacttactttaatgattaattactagcagaaacaatactctgttctcctacaacattttctattttttaatataagaaaactaattttcaactataaaatagatactataaaaacggatgaacgaaaatgaaaatgtatctattatatatgtagttagatttatcctaccaaaaaaaaatgtagttagatttgttgaaattttgtttgataagtcatttaaaaaaaaaaagtaattatcacgatagtcttttcctaaatgcaaccgtttacaattatcgattctgaaatttacataatgacaaaattgaatacagacatgagagtattaggattacaactataactgtaagtttcgtcgttgaccaaaaactaaaactgtaagtttcgaaagaaaacaaattattttggttaaatgattaatagggcgaatactactccactagtacaaataaattattttattggcttacaaaaactgatgattcttttattcagaaaagaaatagagaatgtaaatcaaatagttgtaatattttgtaaacttttattgcagtggctaaagtattaaagtcttaaaaaaaaaaacttaagtttgtcatagttttgtagagattatgaaaaagaaatttgtaataaacatcgaaagttcaaaatattgttatcaagtaaactatcacaataacaaacagagatacagtcttacagagtgtcaacacccaaaattagaaaaaaatattcaaaaaaatcaatctatatatgtaaatatggagataaaagtacattttatattctgtcccgatttatagatgcaaatattttacaggagggagctccgacatgtaaggaagtgcaagctttgttattctaatctgtaagaatttttgatagtatgcaacaaaatgattgcgtttgatatcgcttaatattaaatatcgtgcatgagaagaaataagaaaataaaaagggagttcgataacgaaattaacaataatatgtatatatagacgaagttaactaataactagctttctttataactatatttatatgaataaataaaaaacacttcgccttttcttcggcttattcatataaatttattaacgaatctcacgtacacgagctcctttatattaattatgtactaaacattgattttaagcactaaaataccattgatctgttaatttaagttgaaattttaacttatatatatttaccaaatgacattccattcccaaagcaaatgcaatctattcgacgattttttttcgtttcttagtttcgtttatgttttattttagggtgttgggcttcaaaaacaatttacatatgtctctttagtaaaacttaattttgatcgattacactaaaatcgtcaagaccaatttttctttcaaacacttatacaagtaaaaacatcctcaccaaggaatttagaacttgaaaaatatccactaccaaattgttttagataacatcaggcccgtaaagatcatcatgcgatacaatcttatatatattaccaattaccaaatgacaatttcgtaggaaatatcttaagaaactacacaactccaattgatattgtaaatccagtcccgtggaaatatcttctataaagaaagaatacaagagaaacccaactctattagtgagtaaggatatttctcgagaagcatagtgtaaattcacttcgtgctctttgcagatgttgatgtctgtttaattcagccataagaccataactctgtaatttacttcctcttttattcttttttgttgaaatgtaagggattaaaaaaggcttgacaaaagtaaaaaagttgaaggtcaaagcccacaatatgaatgggccttgcgagaaaatgcccgaggcagaaataagaagatggagtatatacaactgattaggaaacgtatgtatgactcgggatatattcaaaaacttacgtaataggagaaaaaaagtaaaggcaaagaagaaagaaaatactcgtcagtcaaaagaagtgaaaatacagtagtaatacaatataaatgttagaaaatttataatcagtactttcaaagaaaattaaatcttattgagttgtaatttaattttcctaataacaatgcggagatgtatcgatcaaaaccaactcatctagacatagttcgagacggcgagtggtcggtagctgccgggggaggagatccttgtctatggaggagttcatgtgctaatgcttggaggtcatgactgttttcaccaccgagccccacggcgacagaagaggaagacgatgatacaccgtattggtgacgtggatcaatgaatcttcgttgttgcgtggcccatgccgaagaagacgtcgtttgatcgaagatggatgctaggtcataggttgagggcaagggtgagactgatgcaggtaaatcggttatggcaagagggggaggaggagtgaaaaagagcggttgcggttgcggcataggctgtggccgcgtttgcggttgaggtagctctagtgatgccaaatgggcttgtaagtaagaaacttctgcctgtagattcaccacctatgtatacactttacgagttagaatttgttttgcatgatatgtaaacatataggtttaaggctaaacctgtacttttctggaatttacgtaagaatgcgattaatggcttacaatttattgcaaatattatgcacttagtttgatcagtgaaatctctatctcttacagtagttttttatacgcttaacgtgatagcttaattatcctaaaatagttttttttgttttttgtttttttaagaagatatcctataaatagctagttagtacgtgttattttaaaatttatgatttcatgtaattatcacatttctaacagtttaagcaattacctgttattcacctttaactatagcattcaggaatggaattaatgcatgttcgatttgctaaggttgttaggccacaaattatgtaaactattaacataaatagtaaaaaaataaaatgacacgcatcatataagatcatccccttattacacggttaacaaaaattgcgaagaaacaaaatgatttatcttcagttttcacaagaaagaaaacggtttttagtggaaaaaatataatggtgtatatacgtatcaacacagaaaattgtacccgaccaattcccgaaaaccagcaaaacaaaacttcgtaactttgcaatgggacttgtcacgaccgtatcatttttatataattgcataatagattatattaaaagatttcataagtaattaaacagacaaccatgctttttttttcctttatactcaaagtagaagattgcaaaaccaagaaaactcaagaaagtgcaaactctcgaaaaactcgacgatttcatttcatgcacaccaaaaaattgttcatactaaaacgaatttgcatgagtttaaaattatagattattcccaaacgaaaccgaagtttgctactttggaaaagaaaaagaaaattgtaactgtcaccaaaataaattgtggttagtttaagtcaattagtatgtttcacatatattgatttccaacgcattttactattgagaaaaagtttaataaattattaattacctgttgctgaagagcaaagatgtgagcgacgcaaccgtagataggatcccttatcctagcctgagcttcatagcaaattgttacgacagcatcggaccttcgatgaaccggtatgtgtaatagaagcttcgagacgttactggctccgaacactttatgcaccgccgcaaaataagccgatccttgctcggagtcaaagtacggtgcaaatatacatcccggcacacacttcctccttagaaacttacaagcaccacatggcccaccaccaccaccgccactacttcctcctcccccactgctgcctcctccaccacaaccaccacctccgcctcccacggcagtgattgtgttcccaccaccgctcatgaccggccaccccccaattaacgagttgttactctatctccccactcttgcgttagggttttaaacttgttgagtaaaaatatggagattatgtttggtattgtttgaagatgagaggaagatttgagaaacgggaatcaagagaggagaattagggtttggtaagaggagagtatagagaagaaagtctttaaagccaagcgacgacaaagctaacaaaaaaaaaacgatctctctctattttctctttttctctcacatttagttgtttgcgtgaagcaaacatgcgataagcctcttctattattctttttcacaatctttaactacataattatattatttatgaatcaaaagaggaaaaaagggggaaaatcgtttgattacctaatatcccttggaacatctcgtgataaaaaaaactattttccaagaaaaataaacttcttgctttctctttatttactgtgaatatacatgtgaactgtaattgttggagatatctcatgaatttaattacgaacaagatggataaatgaaataaaatattatacccttaattaagtttttttttggcatagtttttaaactattgacttgaggtccaacttaaattagccatcaaacactaaaattttacaatttgtaactattgataaaatagttatatatatatatatacatggcgtgtatacaaaatgccagttcttagttattttctttaatgattcgatttttcaaaattttatattatcggaataaaaacgcaaaagcttatgtaattgaagaaagacctttttgataagaagaagaaaattcataattaattgatgaaatagttagttacgcttactagaaaatgactcgttcgccaacttatctttccaaatttataaaaagagcattaactatgttaaatcattcattctaagttaaaatgagcattcacgttttccaaaatcaagtgtaatggattcgattccggtttagaaacgagatcagagtgaaccgggagtcaaaatgtctaaatttctcggtttgaaatggaaataaaacgtagttacgtgtaccaacaacaaaagtacacatgtcaataatgattgtaactgcctagcgagtgaaagatcgaagaaacgaatgacgtcatttttcacgtgggtcccacgcgccgttcccttagaaagttagtaacgcctctgtgcttcctcaatgtctcctccacgcgtatgtttttcttaaatgtgtaataatccttcattttattagtaaaaaaaattgaagtttgttgtaattttttttataaaataaatactgttaaataaatgaatgaaaaaaaaaatgttaagctcttgaacttgagtttcgtattcgagttttagatttaggtaaaaatatggttgaccaaaaaaattgtgttgggcatgaatgcataacagcatgagtcaaaagacaattcttgctatcatatttatttttatttttttagtttattgattagtcataaacatcgtcgaattatataatagcgtaataaattagagatgagatagtgtaggaggtggaagtgacatggtacctcaaatcttggggatatatgtacagaaagggtcgaccattttcgatcaaacataaactattttagttcactatattttctcttagattgtttcttgatatatatgatatatagctcattatatagttaattaaaaaaataaaatataattaatcacttcgcttttgttgatgaaactttttattccactcgtgcagtcaaaccctaaatctaacattctcgtcgaatttggtaaggaatatatataaggattgtataaattgatctgtcttacaaattaatagacgtaatttaaaaattatatatacacacatgcgttgtttaaccatatattcaaattgggggttgatcctatcatcctacgaccctattattcctttgaactctaaaatccactggtcaatatctactaaaaaatattattagaaaattatacggtgtcgcctaaaaacaaggcacagcgattgatttaagagttcaagtggaagctgatgatacaactatactactaatcttttattaaatatgcttaatgttttcacaaatgtacgtagcaatacaatctagttagggtaacttcacctggttggtcatttattcatagcaactacaacctgttttttctttttcttggtaatatatcatctgtaggatttatcgaaaaaaatcatatgtatcggacaatatgggttacaatgaaacttttgatcaaaacatgtagcgttttagaataagtcatcaggaactgaaaacctatagctaagttgaatatctattcggaataaattgttaaagtttccatggttacacgttaagtaattaaggcccaacgacttaatcgataagtggtttgtctccctattgcataaactgacaaatgattccttaaaagtagaaatgttgccttgaattaaatagctatttgaaattttgtaagtatatgtttaactaaactataaattatataaacacaatcccaaaattcttgtagcttgtttatgtaaccacaaacacaaaaacacacgcacacgcacacatatgagttcattttaagtccaattgatggaaaatggctaactggcaagaaatctttttttttcaattttttttgtcaaacactagcaagaaatcaagcatatggaattcattacttattttcttaaaattataaaagaaaacttatgttgtttgatataataattggccccttgtcggataattttcagacagtggttgcatttcaggcgtaaggcagtttcgatctatagttctggtcgcaagttcaaattcgacaatattttggtcaaatcacaaaattcctcattatttatttcgacgtacatcatcagaatgtatgggcctttataatgataatgtagaaaaatagaagtatgacgatgtacaacagaaagatttgaagagatcatttaagtaaattgtactaatgatcaatataaaatgtatatagtgtgtaatataattgttttaagaaagaaggaaatttctgcaagttcaaaataagaaactttggggcgttaaactaaaacatttgagagttaaggggcttaaggctaatagagtaaggggagattcacggattagtagacaaggaaccgaacggcgcgattctcttctccaacgctctcatttcctacttactctcaattaagtttatgaatatattatggatgctgaatattttaaaaatattttttacattgaatttaatatctgagaatcctcaaacctaattagataaaaacaatgtcttaaatccaagcagaagaagaatagttgagcatcggatcacttaactatacatagaaaacctcaaaccacattagtaaggtatattttagatcaatataaggtagttctatgtttagtttggggccacaagttcgactatcataattctctctctatgtatacatatatccggttaacttatagtccatccttgaacattttctaaaatcattcggttaacgataattattttggatttctgttttaaacctgtcacaatgtatctttcacaataaattaatacatataaattttaactaaaagaactttggaatgatgtattttttttttgtctggttggtaaaaattcgtagataattagactactgatcatattacgagtaaccaaaccaatcagattctagtaatctacgaaacatgtataaatatatattcagtgcaatacaaatgttagaccatagatgcaataaaagggcttgttataggttcactattagagaagggatggtgaggtaagtgactggaatgcttaggtccatgactccatgggacagtgaagtcatagaggatgtaagtcataccacgtgtctagatcttacgacgtggcttgttttgtgtattgatcaacgtactagcggttgctccatcgatctcaaccgtcgattctgttggcttctttgactgaaattctttgagaacaaagatattcctcactctcggaattcaagcgcgtggtttcagtattttcttgtacatttttttaaaatggttgacagaaatggattataattgaacagtatttcttgattgttttttgttaggtgactttggtttatttcaaaatttgttttcctaggatttaaaaccctcatatacgtgtatgtagaaccggtttatagctaggttttgctgatttattgagctatttgttacatactaaaacattattacaataattttaacaaaaccttactgcaattttaaattattctttgaaaagattttttattttactttttttgttataatccgaaactaaaactaatttacatagtataaataaatagaaacactaaaaagagaagactggatcgagagtgatttatgtcgggtggaacagaaacaaaaaggaagaagaggcaataaagaaggtcaatagattggattttcaaatctctctgcacgtatactaatcactttgaccgtgattgtgaccgtgattgtgatagtggagaacggagaagatagatattattaagctgtcttgtgtcacttacttacaaatgctataacttattgatacttacatggtttttgtgtttgtgtgtgtttcagtgtcaattatgcacccgctacgtacgtttgtcgcagtccggtttaaaccaaaccctcgtgatgatatgctgttatatatagggttatggtctgaatcagacatttcatgatctctccttcctacattttaaatgtctatgagttcatgtggggatatctatacacatatgacttaattcatatgctgatatgcacttatataaacgtaaagaaagagagtgagtgtgacaagagatgtgatagcatgaaaagaaatgtgcatggggaggggccgctagggctagaatacatgtacgtgatctttgaaaaaaatgcaaaggggttcagggttatgtgcattttgagttatttaaatcgatcacacatggtatgtgcattttgatatcgatcttgatcattgcgaatatatctttataacatatatatttcagctaatatacaatcttgtgaataattgtctttcctaggctttgtatcggtttaatttccacactaaatatatagaacatgttagcagaagatcatttataacatcgaattttggaacccatattaattgttcatacgaattatatacatgagtagtattcacgtaaagcccaatacataaaaaagatagtatgaaattaataaataagcggccgatcagtcaatagcatacagaaacttacattgacagtcaaaacccaaacacttttcatttattataagtgttgaaattagttcactgagttagcctgatgtaaataaacaaacctcctccttctctcaatacatctctccctctcttgctctctctctttacttgaagatgatgaccggaaacttgaacggcggtggaagaggaggagaaggaccatgcggggcttgcaagttcttgagaagaaagtgtgtgaaagggtgcgttttcgctccttatttcgatgcagagcaaggaactgcgagatttgcagcagttcacaaagtatttggggccagcaatgcctctaagatgttactgagattgcctctgcacaagagacttgatgcagtcgtcacgctctgttacgaggccatggcaaggattcgtgatcctgtctatggctctgttggccatctcttctctcttcaacaccaggttcttcatcaaaacatcttttataacacaactgattatatatacagagcaactaattaacaagcaagactgtgtataccttaggtgatgaatctacaagcagagcttgctcatgttcaagctcgtctttcaacaattcagcggtttcctctacagtcgccacaacaaatgcagccaccgtcttttgatcctgcgcataacaatgaatatgcgatggaaccgagtaacttggatagtgtgtggggggaagaacatttacttcaagatggaactggagatggggatttccaagaactggcgtcgcagttcgtctcaaggtatttaccggcggtcaaacttccggcttgcacttaggtcaaactacaagtcaagaatttatgtattatagcaatggagagtagaagcgagggaggtgtctctgttcccaatagttgaccattccgcttaagatcatcttaagagatatatagctaattatgtatcaatgtatgcatgttaagagttaaaattggttcttgcatgaagtgtttctttgacaaaacaacagatcattgtaacagagcaaactcgttttaagaattcagttactgcagatccaccagataggtatgcaagatggacaatgaaatgcttatcgagtagggaatatgtactatgtttcttcccgtgcacggtataatgaaactaaggaagaatcataaaaaggtaatgcagaaacacaacttgttttaggggaattcgccaagagattagaaacagagtctcagaagagagaaagttcactaaaaacgaagagattgaaagtaacatgtcaatctttcttatgaaataacagcaaacgccataagctcactatgataacaacttcaatcctagattaaaggtatcagtagtctccatcgtcacatactcacatattttttggattcatctagaggatataaaaatatttcgtaaagttttccaaaacgttgataaagaaggttttcataattacttgtaaaaaaaataaaaacatttacaatataactctttgattaattttacggtaaaagccctcataaaccctaaattaaacctcccatcccaaggcacgaacacaatgacgaccgaagaagatatgaggtcatcatcgaagtctccgaagtcgtttttgtctttacccaacgacgttgttcttaactgtctgtctcgtgtctcgagaactcatgatccaattctatctctcgtatccaagagtttccgatcactcgtcgcttcgccggatctcgaagccgcacgattccgcttcctaaatacggagaggtgcctctatgtctgcttaaaacttaataacaaccataaccctagctggttcatactttccgaaactcccaaacataaactgataccacttccttcgtttccttacccacatcccaattgctcaactgttgtcttgtctctactggttcagagatttacatgcttggcggattcgacgcaaagggaaagagtagcaggagagcttatgttctcgattgtaaatttcatcaatggcgtcgactccctaaaatgcttatagctcgaaaaggtgcagccgctaatgtaattgacggtaagatctatgtgtacgtaggattcagcagcgtttacaataacggcgtaaacgggggagagatttacgacccaaagactcaaacttgggagccatttccgcaaggagaagaagatttctccaataaagagggtgtgactcgatgtgctttttgttggattattgagagaaagaagaaaaacagagtaagagagacatatctcttctcttgtgaagaagacaagaacaaaactttgttttattgaaactgaaacttgttaatctttacatgacgatacaaggtgtttatatagaaaacaaatagacacaacaactcaattagttctgtcacttcatacttgtgtctctttctacttgtgcctcttgagtgaaacaacacaaacttacaacctttaactgaaaactcaattaccgaccaacactcccccttaattgagtttcggtcttgcacttagcttccttctcagtttgtcacaagttgaccttgtttacttcttcttcccttgcaagtaaatcatttgtgttttctccatctcaatggaaaaactcttatgcttgatcttaatatcctgtatacttcttccttgaggataattgatgagacatctgacactagaaacacctctttgatgatcttctctccttggcttgtcatcacttggatatttcccttttccatgtctcatcattcatgatgatgatatttcttcaacttgaggttcttcaccacgtgccttggcttgttacacacaaagcaccttcttgttgcaactcgtatttgacgttgcacacttttgagatttctctttcccacaacgcttctcgtttgtcaccttcaaatttttttttttttcacgtgagctttgtcacgtcatctccggttgttctcacaacctttttttccactcactttcttttaaatgagattacttctgatttccttttggtgtcctcttgatcaccaaatctgtgcgtgaactcctccacgtcttcttcggtgtcttcttttgatcaccataacgtctccatgacgtcttgtgcgtgaatcttcttcacgtcgtctttggtttactcttcaaccgacttatgctccatttttctccgaggtaagcatcctcttgtgctccatttttctccgaggtaagcatcctcttatggtgtcctcttttgatcaccaccacgtcttttcgacgtcttgtgcgtgaaaatctcttcacgtcttcgtcggctacctttgcaaccgaactgaactctgctccctctctcttaggtaagcagcttcacacacgtaagcaagctaacatccctgtgttgctttctccaacaatcacctcaatgtgatcgtcacacgtacaaatgtcacaccatttcttggccttcttttgacttttgtcgccccgtttgtttcttccttttgaagcaaacttttctccacgttttcgtgttgtagtcatcttcacaactcaacacaacgttttgataataagccttgctctgtttgttacaacagcggctttgccgtcttgcgcttcaccaagacgttgttgaacaaattttcaaaactctccttccacaactccaaatccacattcgttttctccattgcctctagagaagatttcctatcttcttcatcgcttttggagccttcctcttgaaggtacttcatgtgaatgtgtttgtgaaaactgatggtactctctgtagttaccacctcttatttcttcttcttccctcttcttcttcctcttcatctcaccatagatttgttgtctccatctctctttttcttttcgcagcagaacacatcttatttttgtagagacaaccaaggacaaccatcggctctgataccatgttggtttattgagagaaagaagaaaaacagagtaagagagacatatctcttctcttgtgaagaagacaagaacaaaactttgttttattgaaactgaaacttgttaatctttacatgacgatacaaggtgtttatatagaaaacaaatagacacaacaactcaattagttctgtcacttcatacttgtgtctctttctacttgtgcctcttgagtgaaacaacacaaacttacaacctttaactgaaaactcaattaccgaccaacaattttatagttggtgaattagtttttcatgattgtggcatcctaattagtggaaaagtttatgacaatcttctgatggacaagcttaacttgtgtccgaatgtttgcatggtactcatagattgcaaagacttccaagcaacggtttccaatgggaaactcaaactactttgcagtgatgattctaggccgtgggcgtggagtaccaaggttgggggacttgaaggactgtcttgtaattatcttgtttcggtggcaaaccctggcggagaaaggagagtgacagtttggtggaagacgtatactaaggaaaaacggagatttggtgtgcacagatttcatttgagatccgcatgatgggcaagctggtttagggagtcgtggaatggtctgagaacgtgtttaccttccatggatctgaatccgattccgattccaattccttccttttgcattatgaattagtagcgcattcgtagagtattggttcgagcaaggtaaggaggaggaagctatgaagtgttacaatcatgtaaagttgagaaaagacacgaaagcactactggcaacacacttttagagacagaactagatgaatcggacttagaactttcagttaaccgaaaatataagctggaagtttgactgcatccatctttgataacagtttgttttctccccttatactgtatatattaccagtaggacaccatcccttttgtaaaactacatttactactttatccaaaaaatgacatttttataagagacttgtagctttgctgagagtttcaaattttaatatattatgtgacgaataccaaacacctaacgtccaacttagttggttacgttctacaatgtataagtatttttttatatatgaattcaaattttgtgttcatcataaaatttatcaactagaatagttactgaatttcaactggaaaacaatattatatcagtacaacattaaactctttttaattgtacatgtagaaaacataaaacaataagtattcattttgtaaaataatcatcatccgtaaaacaaaggctactcggaacttaatttgtctgtattatgaggtcattaataatccttatattattttttggcaaataagccattaacaatcttgtattaatttcttttaattaatactgttttgtttcttttaaatggcattttaggaaaaaaatatatggaccatagaagcgtgatgtgaattgtgaaccaaacccaaaagaaaattatttagaattcatttaaatgtcatgcatcacgcgcattcactaataaagtagtaatgtttgtaatatattatagctgtagtcgtttttttttttttttttgggggtagctgtaatcgatataaaaattgtgagttttagaatagccatctacgatctagacttaggaacgtagggatcattgatccccccctaacactattgtattgttactgttgtatagtcatcgagatgtgttttctataattaatagaatatataaatatcgaagtctcaaatcaccaatgtccataagaaatatactatactctaaaacaaattaattatttttgcttttatttttaaacgtggaattttggatctctctcatgcttctctaaaagttggtgaagtcacgatatcaattacacaaacgttaaatatgttttaaaaaaaactaaacgtaataccacattttgatccagattcttacaaaattgatggaatattcaaatactgtttcggataagtatttaacggattacaacaaaaaacaaattctttccctctctgcttctttttttgctatacaggggggaaaacgaaaactatcaaatcacataattgattagagttttttttttgttttttcttcatttgttactttttgtttatttttgttttttttgtggttgttggaagttgaactcttaactaattaatcatacaaaattaacaatacacacatatatctctatggaagaaatggaaataagtatttaacattaataattagaacacttatatagtatcattttcaaatggtaaatacgtctataagatcaaactcacctaatgtttgtttgctacatcgctcagatgacaaattcatactggtgattgaaaagcaatcttgaactgcgaacaataaacatcaatcgataacggaatttccttgcattagcaaattaattataatgataaaatttatcagtgaatggccgatccaaaaagttaaatcaattatataaaaaaagaaaagaaaaaggaagagagttcgcaacatcaacaaagcaaagtcccgagaaaaacggtagctttgtggagacacaaaattaagatagttgcatgatcatgtgccacgcctacgctttctattccattccatctcattcacgcgttttattttctctcattcatattaattatatattaatcacacaatcctaataatatcccttaatctatgcctagaacatgcatggtattataattaatacattcgacaccactagaagccaaaagtatagtagtaaaaaaaagaagaagaagctggtttgtacgtaagaatgaaaataacggaatccaataacaatgtttgtaataaacggacaaagaatgtgaattattcacataaatgatctgtaaaatgtgagcatttgattataacggatataataaaacaaaaattgtaataaagagagaagagggcaaaacggggaacatgtcacgcggataggtgtgagagagtaaatgacgtaggttccgttatttaagaacccttctagagaggttcccacacaccagaagagagagaaagagacagagagaaaatggtgagagaagaacaagaagaagatgacaacaacaacaacaacaacggaggaggagagagaaagctgcttgtggctgatgaaacggtgccgtctttgttggacgaaacggggttggtttgtgtaacgggaggttctggtttcgttgcttcttggctcatcatgcgtctccttcaacgtggctactccgttcgggccacggttcgaaccaactcaggttcgagttaattaacttcactttctctttacttatacactttgaatcatcatcactgattaagcaaatgccaataaaattattgttgtcatatatggctgattggtccgttttaacataaagtacataaatagaaagatagattatagttttttttttatatatagagagagataacatttaaagttgatttttggatcgacaattaaaaatatatatatttttatggatgtgaaaaatttattgtacttggctggaattatctgtcagtttgtaggatcttgaagcttcatagctatgtaaatatgtcatgtttccatgcatcttctatagaaagtcaaccatatattttatgatcaataactaataagtaatcacggaccataagatataaatgaagttaataattcataagtttgtttattttatgcatattacagaagggaataagaaagatataagctacctaaccgagctaccatttgcatcggagaggcttcaaatattcaccgccgatctcaacgaaccggagagcttcaaaccggcaatcgaaggatgcaaagccgtattccacgtggcacatcctatggacccaaacagcaacgaaacagaagagaccgttacgaaacgtactgtgcaaggtctcatggggatactaaagtcgtgtttggacgctaaaaccgtgaaacgttttttctacacgtcaagcgccgtgactgttttctatagcggtggaaacggcggtggaggaggcgaagtagacgagagcgtttggagcgacgtcgaggtgtttaggaatcaaaaggagaagagggtgagtagctcttacgtcgtgtcgaaaatggcggcggagacggcggcgcttgagttcggtgggaagaatgggttagaggttgtgacgctcgttattcctctcgtcgtcggaccttttatatcttcgtcgttgccttcctccgtcttcatatctctcgccatgctctttggtacttaattctcatatctaataagttttttattttatttttctccatgattaaactaaagctgaaaattaataattttaaaaacttaaccactttgattacgtatacgttatatataggtattaatttttaaaactaaccaaaccttttatttctcaaataaagtaaagtaaattcatagtactagcctactagctagcttgtactctagtagtagttaaatggtttatggttggttcaccaagtatcttgggagatcatagctcgaattttctcaaaaaaaaaatttttgaacaaatgctcgaattttctcatttatacttttgttttaaatgaaaaaaatattctgctcaggcttagtagatttatgtttggacatagtggctattgaaaatgttagaattcgaaccaaaatatgtatattttatacgaaaaaacagaactaaaatcctaattactatacgtaactaataaaactcttttcttttgcttataacctacgtgcgtggaatttttgagttatttagaacgaattttgtgtgtgttaaactcgtgtaaacatgtgctaataatattcacaaatagtgttttgagtaataatcactattcactatagtaatattacgtttttttatgaaggaaattacaaggagaagtatttgtttgatacttacaatatggtgcatattgatgatgtggcaagggcgatgatatttctattagaaaagccagttgcaaaaggtagatatatttgttcgtcggtggagatgaagatcgatgaggtctttgagtttttgtctacgaaatttcctcagtttcagctaccttcaatagagtatgtcattttttactagtataattaatttcacgtgtaaatattctattgtttttttccaagagtttttattatgttctttttttgtgtgggtacgtaaagtttgaataaatataaagtagagaagaggatgggtctttcatcgaagaagctgaaaagtgccgggttcgaattcaagtatggagccgaggaaatattcagtggagctataaggagctgtcaagcaaggggatttctttaaattcttatgggatttttgtgttaaaatttgtatatgaattgaaaatatgttttttctttattggccatttccgttttgtaacatgttctagttacttgttgacgaaaaaaaaagaaagtgttttgattcagatttacaaagaaggtttgcttaaaaaaaaaggtttgccaaaaaaggaagagaaggttttagaaaaatgaaaagaataacgcccaccgtggggctcgaacccacgaccacaaggttaagagccttgcgctctaccaactgagctagacgggctttttgatttaactttcaatctactagatattctccacatatattttacatgtactttcagtattttaaaattcgcgaatcaaaacaagatttgaagtgaaatgtttagaaaagtgggtttatgcaaaacaattaatcatgtgctacatcaggcccttatgataaaaactaaataaatttccacctcgaacgaatatcatacattggaaaataatatagcatggttctgttttctgaacataagattcaaatagtattcaaatcaaaacaactagctgctactctcttactttttggtcttcaagtccaaaatccttaactaggcccagtaagcttgtccgtcatgacatgacaattttaacgtattgaaaaagaacgcttgcttacttctatcagcagcataattaactggatcaaaagagtaagcaagcctatgcaagatccatatcgactttatggaatgttaacaatccacagaacaaacatatcaaacaaagtgactgtgacattttctttggaatgcaaagccttaagtggtacctttcctgtataatgtaactgcggcttgctatggttatccacagatgtctttggataaagttttggaagacgaggttgttgaagatacaggggaatcacaagtctttaacttgcttaatccagaatttgtagactttgatacttgtttagatcctatcacaaacgaacttccaacttccggtgactgaaaaaaagatgcaagtacaaaactttatcaaataataacatagctagcaacatgtatactatttgagtttttttagagtttctaagccaatcagaaggctctatttcgtacccactcgcagaaagagcgcgttgagcgagtgagagcgattctgtgggtaaacccctttccaattcatgactttttttatcgacgcacatctctccaaattctccatcgcgtgactcttttagtttttttccacaaaactaaatgaaaccgaaccgaaatcagttttaatttcaaaaccaatgcaaaccaaaccgaatcagcaaatagtgtaaagcaacaattctggacagaaattttatcaacatctcaacaacgggaaaaagagaaaacaccacaactcaaaatcacaaatcatagaaaaatatccaaaaaaaatcacagtaacctttgattaaactttcaaattgcaaaaatctcagaatcaaagccaagaagaatcttgaataacaatctactgcttcaattaaacatgaaaaacattagaaaaagcttagttttactagttttagtaaaatttctcggcaacaaaatcaaaacagagatgaacacataaaaaaaaaactaaaacagaactgcatattcgataagaacaaagactatttgcaataattaaggtttatacatattagactcaccggttgaaatctaaaagcatgaagagctagctcttcgtgtttgcctccctttattatctttcttattttctcaactttgtgtgatttcaactcacaactaaaagtaatggggtacattaagaatatttagattttaaggggttgaagttgtaattttgaagaagtggaagatcaatagaaaataatagaagaacagagacgacgaaacctgccggggaactgaggagagaaaaaaccccggcgaaaaagggaaattcgaattcgtcttctgttgatcatcgcttcacttctgcttccaggtcttcatcggaaccaatctcactttcactctctaatttctaaattgaaaatcgatcttatcaattgtgtgtttgtgttttgttgcagagcttttactcagaagaagctcgatgatctcaaatctctctttgtttccctcgcttccaagtctcacagcaatgaccaatacgtctcgtaccctgttttccaggttttgaccaaaaaaaaaaattgtgttctgttctcatctggtttttgtggttgataattttgaattaagccttacacgatgtgtcggatttcgattttcacaggagtattttggtctgagtggttctttaggagaaaggatctttgatatggttactcaacacaggaaagatgataaaatgacttttgaagatcttgttattgctaaaatgacttttgaagatcttgttattgctaaggtacacacttaagtcttttcatcctcttaatcattggtttcttcttctgagcttttgaagatcttaaaatgcagagttcaattttgtaatctccatatgaaaagtgattgtagttataaatgtagaaccagtctcacgttgaatagaatccttcctcaggttaagtcactgatttttctgaaaagtctattcctttttgttaaaaccctggtttcaatgcttgccattggaatttttgtggtaaaataaagaaaattcgcaaggatgaagaatgatgaagaagcttctaggttatggtaacatgacacgtgtatcaatctcagacgtccttttttgttataattgaggttatataaaatcagagtgatgttattttgtcttttgaattaagagtactctgcctctggaatttctgggttcttctcggattctctcaaaggtactctcttttcttagctcttgttcgaactcttcgattatcttatagaacgataggttatatactctatttgaaaatcatctattagagatagagatttggtgaagtttgtattcaatttaggttcttcatagagatttttgcttgatgagtatagagaagagtttctgagatcatgatactatagtttatgcaaaaagattgcagaggtaaaaagaggaattaggaaaatgggtgatccatttggtggtagatttggaggatttagaggtagcttgtttggaggaagagatccttttgatgatcctttcttctctcgaccatttgaggatttgctcgaaccatccaacacctttagttcaggtgcttcctttagtaatgcacataagaacaatggtggaagaggtttaacaattgaagaattaccgtctgatgaagaagttgaagaaaggaaagatattggtattgatgatcaagaacatgctagttcagtgaataaaccatctgttgagcaccctgaagatgattctgatggtaactaccactagtgattagataactttgtttacggttatgtgtatgtgtgagacttgcttggttgttgttgtagctgagaggaagattcagaatgtgaatcaaaggagtgattttaaccgaagagagggtacacagtctcgagctaacacattcagacatcacatctctaaggttacatatggtggcatacatggtgcgtactatacatctactagaaccagaagaaaagacggtgatggagtaagtttgtttctattttccgatcctttctattagtagaagttttacacatactgatcagattctgtttctagatggtggttgaggaaagcaaagaagctgataagactaccggtgaagccactcataggatctcaagaggaatcaatgataaggtgattgattacactgttgatgttttgctccatcacttcttggttccaccaaggttcagttttagatgagtcttggctctcgagtctgagactgttggtttggtgtattcagggtcattcagttactaggaagctcaactcaagtggtggtgtagagtcgacacagactcttcacaacctcgatgaaggtcctgcagaatctacacagccttatcataacttaaagttctttgaaagaaaactggcaggattctaaaagatcgtttctttaatttttttgttttagatgaattaagtggctttgaagaagcatggaaaggcaattcatctcttggcaagcatgaattcactggttagtaaactcttcatctcaaaactaatctttgatctcaagagtttcagtccattatactgtattgtttttgttactgtacaatgttacaggctctgataatagttttggagggtgggtacttccatctcttgaccaaattcgtcgccaaacagaccaaagtcagactggttcgagccgatctgcaactggagctaagaaggttgttcgaatcaacattgaatgaatcatcagaaaaccatatatcaatctatgtgcgtgtaaatcaaataattttgtagttgttttgaagttgtagtaattggcaatattttacattcgtgtaaaaacacaacatacatacagtattagacttttgattatgggaaaagtaaaattattcaagctttgttaacgtatttatacatctctacaatgaagtggtggaaaaagggtaaaagaggaaatccaaatttagcgtctgaacaaatgctcctctcccgacagatgatccacgtgtctaatccaacggctacgaagattcctcgagtccccacgaccagtagctcccacgtgtacaatatccaacccactaccaaccggtaaaaacacggatctcaccacacgtgttcctcttttcaacacatcgtgccatttaaaaccagagattgctctatgcatggcgtttttacacaccaaaacggcacccttgttgctcagcttcgcaaacctcagcgttctgacgaactctcgccgcttcgagtccaccaccaagaaatccacaccgggaaactcctccatcgtgttctcaacagattctccgaccaccacaacctccgtcgtaacaaatcctctcatggccaacacgtactcaagtttagattgctcgtcaggtactatacacacgtgtcttccacccgtgtgagttgcagcaaccgcgagtccgacgctagtcgtgattggatcgccgcgtgaccatgtctcaacgatcagcctcgcgttccatccagccgctgtagctgataaaaattctgccactcctgactctttgtcgctcttacactatacacacatatatttacatgcaaaatcaaataaagattatataaaaaaagcatgtatttacacacatatgtaatctagttaaaaggcataccgatttaacggtgtcgatgtaggcgtcagaagcagtttccggcgaccagacaagcttcatagtgaaagtgaaatggagtttgatgatttgggaagaagaagaagaagaagtagttaggttttataaatggacaaacgaagcgttgacatttgcttacactaataacaacgtgtcaattggtctcattgcttccatttattactccttatttagcctcaccatcttcttttttataaaaaacactttgttacaatcaataaaatctaatttataattccatcctaataaaaattcgagaatttatgtcgtcgatttgcgttagcccacgctcttttcacaacctatgcaaaccaatatccataaatatacacagtaaaatttatctagacatgaattacatatttgaatcatttggttttgttataatagatagcagttgaatgtttttattttgttacttatttcagtttcgtcagaagggtagctagcgtgtgaaaaatacctgtagtagatcaaaggataatttttgattgctgacattgtggacttagtgagacaacttgaataattacatgagatggtcagcttcaatctttgattttttccttttcttttctaaattttcaatcttttgattaaagcctttgttatttcaacttaatgacgcgattcatatactatcttttttctttgacactcgctttcatagtgccaaccaacgaatctataatcaaaggttatataagaaacaccaagcctatacaaacataatttaacgccgcctagttttgtttattctgcacgtaacatataaagctaacagatatgcgacaaaatatctataaattacatatataagtatatataatataagaatgttggatgtatatattagtagtttaatcaatgaaaatatatctttatatctttattaaaaaaactaaaaatgtatctttatatacatttcgtagtttaaaatcaaaattcaagatagagcgaaaatgatttttttttttttaaatgaaccaaaagtacaacattcctacctttatttttaataactcgtttatattcgccaatcagacacacacatagacttttaaaatagtaaaagtaacttagccgattatttatgtaaaatattcgtataaaatttttattaacaaatatatttgatttctcatcttataacctgtttattgatcagattacacgaaaaaataactaaacagataaatttactcgaactgcatacaatagagatgtatttgtgcatgagtgtagcccaaaaatgtgtaaggaaataacacccattggtaggccgagacatgcctgtaccatggccgctgaaatagtagaagaaccaaatacctaccaaagtactcttaagctaacgttgacatgatttaattagattaacgattgagtaaacgacaaattagcgctttcgttttatattaaagacgcacgatatttaaatggcaactatacattaaaattatataaaatatataactataaccaatttgataaatgagaaaaatgtacgatatgtcgtaccactccatcctgactatgacttatggaggaagtcaatgcttatcaactacttgcttatcaatatcctatttatcactatcagtttttctcttttctatacatatattatttcctatagatcatgttggtcataatgtaatcaacttaaaatttaagatctactagtttgtgttgaagtataactgtataagcctaaattcgaacgttagtctgacttaatagttaattccattttgttttgggtaaatgtttcagtttcactgctgtttggaaaatctttggacagatattgagattgggcttataatatttattattgggccttaatttaagagcccttttataggcagatacaaaaacgacggcgtttaactcatccgctcagcgacttccacatagccgttaaaacgatgataataaacccaatccggttcatctccaacagaagaacgtaataactgatgcttgtcttcaagtcaaccatggagtgttcgatttcatccaccattcatgtccttggaagctgcaaaacttcagatgacgtgaaccaaatccacgggcgattgattaagacgggaatcatcaaaaactcaaatctcactacgaggattgttctggcttttgcctcttctcgacgtccgtatctcgccgatttcgcgcgttgtgtcttccacgagtatcacgtatgttcgttttcatttggagaggtggaggatccatttttatggaacgccgtgatcaagtctcactctcatggaaaggatccgagacaagctctgctcttgctctgtttgatgctcgagaatggggtttccgtggacaaattctcactgtcacttgttcttaaagcgtgttcgaggttaggttttgtaaaaggaggaatgcagattcatgggtttttgaaaaaaactggactttggtcggatttgtttctacagaattgtttgattggcttgtatctgaaatgtggttgtttaggtttatcacgccagatgtttgatagaatgccgaagagagactctgtttcttataattccatgattgatgggtatgtcaaatgtggattgattgtatccgcgcgtgaattgttcgatttgatgcctatggagatgaagaatttgatatcttggaactctatgataagtggttatgctcagacatcagatggagttgacatagcgtctaaactgtttgctgatatgcctgagaaggacttgatttcgtggaactcaatgatagatggatatgtaaaacacggaagaatcgaagatgctaagggtttattcgatgtgatgccgagaagagatgtagttacttgggctaccatgattgatgggtatgcaaagttaggttttgttcatcacgctaagactctgtttgaccaaatgcctcatagagatgttgtggcatataattctatgatggctggttatgttcaaaacaagtatcacatggaagctcttgaaatatttagtgacatggaaaaggagagtcacttgttacccgatgatacgactttggtaatagttctgcctgcaattgctcagcttggccgattatccaaagccatagatatgcatttgtacatcgtggagaaacaattctatctaggtggaaaactcggtgttgctctcattgatatgtattcgaaatgcggaagcatacaacacgccatgttggttttcgagggaatcgaaaacaaaagcattgatcactggaatgctatgattggtgggctcgctattcatggtctaggggaatctgcattcgatatgctcttgcagattgagagactctctttaaaaccagacgatatcacctttgttggcgttttaaatgcttgcagccactctgggttagtaaaggaaggccttctctgctttgagctcatgaggagaaaacacaagatagaaccaagattgcaacactatggttgtatggtagacatactatcgagatccggaagtatagagctagccaaaaacttaatagaggaaatgcctgttgagccaaatgatgtcatatggagaacgtttctcaccgcttgtagtcaccacaaggagtttgaaacgggagagcttgtcgcaaaacaccttattttgcaggctggatataacccgagctcatatgtgctactctctaacatgtatgctagttttggaatgtggaaggatgttcgtagagttagaacgatgatgaaggaaagaaagatagagaaaattcctggttgtagttggattgagctcgatggaagagtccatgagttctttgtagatagcattgaagtttccagtacattgtagataaaacgaatgtgcagcaatatattttcaagggcttaaacctattctgcaattccttggcatacatgaagacaatgtcacatggttggttttgtgcagctaagatatgtctggaaaaaaacttcccacaagatcacttaaaacgtctgaaaagtgattgtttttacagcctaagtacatcagctacagttacaaggagataagattgttacatcatgaaccgagtttttcggatcccctatactgaacctaaaacagagttaacatcaggggaatggtgatagtctgaaaccttggtatgctttatattcttggactatcaaaagcaagaatcatgttaaacgggaaactaataatccgcggcgagattattcagttcttggataacatcttccatggatggtctttggtttgaggattcatgagtgcagagaagaccaagtctagcgagctgagccgcttctacttccgggaagttctttcgaagatttggatccatgaagtcttcattcagtcttcctgactctacagcttgtaagatcatcaaatggctgattttgcttttaccactcagtatctgcaacagaatcataccaaatgcataaacatcgctcttatcagtgaacctccctgtagttatgtactcaggagctaagtatcccattgccgcacttgctttgagcttcgagaaaacgatatcatctgtgaaaagcttgtgaagaccggaatctgcaagagaaggattataccagtgatcaatgagaatcttctctgcagatagattctggtgaactattgcaggtttgttcccattttctccatgcaagtacacaatccctgaaaggaagaaaaaaaagaaatcagatttcacatacaaaaaaccgagtttagtttacgaaagaatgaatagcagaatccaacctctggcgattccgtttatgatggaaactcgagttgcccattcaagaacctctccagtctcatccttcacatcaagatactgcaaaagattaccattgggaacaaactcatagataaggaaacattctccacgtcctttcgagcagcagaatcctctcaacctcgctaaattctcatgcttcaacagtgtcagcatcttcaaccctttgagaaactcggattcatcggatttacagctcgatttagctatacatttgatagctgcaacagaaccatctctaaggatacctttataaactgaagagacattactcttccccaacaagttaatctcagagaagctctgagtagctctctcaatctcctcaagattgaacataaagctctcaaagacttcttgagacaatgcactgttgttgttactgctctgtcctcgtcctaacggatcccaaccacttgcgtactctaagctgatcaatggagaagagctttttcttctagaaacttctttgaagttgtactcagtactaatcctaccgtccattgcatcaagactgcttccaatcttctgtttccttcgtctgtaccatgtgaatgttgaaccgccaaagattgcaactgcgaggattgatcctattagacccatgacgattcctaaaggtgaagactttaaggattttgatgaacacccgccattgttgttactgcaattgcttcgttgtaaatctgctgattctggtttcacgtcaactgttgtgaaattcgttgggtttgttgggtctggtcggttagggttcggaccgtttaagccggtgcaagctttcaaatcagtgaaaccatctccgcataaaccgtgattgtttgaatactggaatccattgtttagcctcttcaaagcttcataattcataaaaatcaagaaacaaacaagtcagcaaaacatctttaatgtggttgtaaaaaccggtttagaattgatatggtttaagttctccacgatccggttttggattggttcccggttctgtttaatcggattggtcaacactgaaccggtttagaatctgaagaatttatgaatcttgagggaaaataaattattaccagagggaacgaagccggagaaggagttattacgaatgtcgagaacttcaagcaaaggagcaccggcgagtttcaccggaacaggaccaaagaggttgttgaagctcaaatcaagcctcgttaacgtatcaatatcgcctaaactcgccggaatggcgccggagagttggttatactgtaaagccaagacagttatcttcttaagagaaccaaactgtgtcggtatacttccacttaacttgttgtaacataactgtataactgcaaaaaaaaaaaaaaaagtgttatgaatatatagatgcaattatatttgcccttatttttgttgagttttacattttagtttcaaaaccccaaataaaattgtttttgagttttgcataaaaaagagtgaaagatgaaggagacaatagagagtatccctagtttctaggagactcaaaaatctaaaaacttgaatggatgattaaaaaaaaaaactaaaatctacaccattcaagacctaaactctttttagctaagttttaataaaccaaatttgacccgcttaaggtgttttagctgcaataaatgaattatagtgagtgaggttaacaaagaacacatgcataaatagaccgaccttgaagattgtctaagttcccgattagaggagggatttcaccggagagattgttgacattgaggtataaatcggtgaggagaggcagatttgagatatctttaggaatatgaccggtcaaggagttgaagtgaaggtataaaccggttaagcttgtgagaagaccgattgaaggagggatagttccagtgagacccattccttgaagagagatgttagcaacacggcggtttccgtcgcacgcgacaccgtcgaaggagccagaggagcaagggtcggcgtcgggagtccatgaagtgaggaaacgtttttcagggtcgagagaggatttgatatcgaggagaatgtcgagctctgaggaggaggaagacagtgcagaagaaaggaagaagaagaagaggatgagaaagagtgtgagtggagagaccatgtttggttggagagaagagagagagagagatgaggaagaaaatgaaaatgactctctcttgtggttttgaagaaaaaatcttgtccattgtatttataaaatagtagttcttgattgttaatactaagaaaagcttaaaccacaaaagtatagatatcgtgaacataataataataaaaagttagttcaactatgaaaatgtaaaatgataacatagagaactatatagatcacaactctaattttttaatatataaatgtatatagactaatctccaatgtaagttattgcaatgtattaagacattcatatagtagctaactatacataattgttattgcaatgaaagtatttgaaccatagtccatatgttactcttatgataattttaaaccacttgactttttatcactttttaattacacatattactgatcaaaatcaacagtaaatttttttaactacaatattttgattgtttgttcatgttacatcaagtattctacatgtatagtttcacattttgagtggattgtttttgattgattagtatatatatataagtttatttggaaattgaaggaaaacaaaagactcatgaaaattgaaaacattgaagtccacgagttcatttcattttctgtactttatacggtaaagattacttttaaagtcttttcagaggaaaacaataatagttaggcgaatcttagctttttttcaaaattgaaaatgataccattctccctggatttaatggtaagaaaagttgtttctttttcagtgcaccagctataaaattgtactttttatatcatttgtttttaacttttcatatatccataaatgttggatatatgttttcttataaatttctattaattagcgaattcataacttattaatgaccatatttactgaaaaacatcaaaattgtgaggttgggattttagttagaaaagaactatatttgactaaatcaaacctcgagtttatccgatcatcatcagtaaacacccttagatattacatgtacaaataacctgataacaagctttatatgttcacatggagaataaggtacaaagataaatgggatcttcttgatattattccattaaattactatatttgatgcaaataattgttccatgaataacaaaaaaaagggtagctaatattttatattatataagaacaaattaaaaggtaaaaaaggcatccaagaggcatggggctaagagtacatcaaatgggacaaagaagatgatggaggcaagtcaatagtagcaacatgtgaacatttttctaacacaattaataaacaaatttacgtaaaattttacaaacatgtgaacttgtcttgagttaatgtttttgctatcttctatatctgatcatagcaaaaggtaaaatggaccaacacctcgctctcctctaagtgtaacatgtgaatttacagaaacaagaaagacataaagcaagagaataaagcaaaaggctaaggtctacttaaaagatattccgttttctctgtaattttcttacttcgtgggtagtggtggatgatatttttggtggatgatagatgtgtgtgtatttcattatctatttatagaatgaaattattatttgagtgagaaaatgagaattttcagaaagaaagtgtccatgataacttaattagtgcagtcaaatctctatatgatgatgacattgtgttaattagacaatattaatttgagttcctaagttgattgaatatgattttactttacttttaaactatagtaatagtacgtagaactcatttgaaagtaatagtttatgaccaattaattagccgatacacagtacatctaagtggtaaattttatagaattacatcactagttcatctcttttgatttgttataagatgaaacagtagtgtgatatcatttaaagtcacgccttatatttggcttcgtctctagagaaatccatccctcacacgttatctaacccagcctgtcccatttttgtttgaatgcatgagtacgatgtttcgtatattgttacaaaaacttcaaaaatttatcaataatcattataattgtatgttggtacttggtaggcaccgcattttactgattatcatccatgttttgtttttgagcaaaactatgtatcttgttttgctatatatcgtgtctaattgtgagtggtaatattagtctttttattattatacataattttgttttgcttctcgtaaatttagacgttgaaaatcgaacttatgtgtgttcgatgtgttctttgatttattacatctaaaattggtccaaacgctatatgtcatataggcgtgcaaattaattatgatatgctatcaaacgcgtacattttcaaatgcatcaaatctttaattatatgattatactgtactagtttagttgtttcgtcgtcacatatatcaaattttcgattcgcatttgtgttaattagttaaactatttataactacagtaaataagacttttttttgtcatattcagaaaatgataagctcgccacttcaaaaaattccaccagctgaaaagatcatatttcaaattcagagaattcaaatatataaaaaaataaattcttctgtctcacctaacacgggaagacaaaacgaagtagtgtccatgatagaaaacagaagacagtatataagctcatgattacaaatatacaaaaatttgtgaagaacaataattgttaatcaaattcttttgtgaaaaacttatatgcttgtgtcaagcatcatatgaaaataagataagtatttgattattgtgtaaataatttcaactcttcatatagttgacaactgtatgccatttccgtatagttcgtcactcgattcattggtttctaatgatagaccataatgttccacctcaatcaatacgatttagtataaaatattatacatcaaatgtatcacatttcttagagaaaaaattacaaggtcttttcatgtgctttatttatttatattgaattgactaggaaacagtataagaaaaaaatgatatgaaatgtctgcatcacagaaaccgagttttgttggagaccacaagaaaccaagcaagtcgaagacaaagattgaagtataaagttttaaaagcatacactaattaactagtgctattatattcattctatgcctaaaagtaaatgttgcaaacatatcacgtgaccaagacaaatgtgcactttaaattaattaacaataatctcatcgacaatacatatctttacaagttttctcttttgttttcacggttctcactcttatattcttgcgtttctctatatatttttttttttggataccatgtttgtaccattcttttccttgaaattcggtcattatgatacaatcaaagaataataatacattaaagatttaaaggtactgataactgcagcttaaaagactaaatccaactttaagcatatgcataattacaacttttcagacgaaacctgcaaaggaaaagatctttcattgctcttaatattcctttcgtatagttgggccttgaacgctttttttttttttttaacatggaggggtttggggccttgggctttagggccttaaattatttaagaaccataaaacgctttttattaacagttgatttatttctgcacttctcatgtctttgggcaaaggaaacaacataatcttgaaagttttcataaattgtcatatgtgcaattgaaaacactgagacaacattacataatcaaggttcagaagaatcctcacaatcattgtcataggatcctgtcaatcttcgcatgatgttgaattatatgaatcagaaaggtatggattgccgatcaggccaagactcgatcttctggaagtaatcgacaggcaatacaccatcaatgccttcagtcaaaatcactttgttgtctgatatgtagaacgcaatcccatctgggtgcaccaataaagtggaattttaatattgaatctttcaagggcatatcactattttttcagacaagttattaagttctcataccttcaagagctttcttgatgtcgaggaagatgataacatttacatttcttctcatgccttagccaaattatgtcgatatggaaaatcagataaatatgcatatgaaataatgtctgaccaacaacaataggattaatcaaatattaccactaatcacttcaccatctgttggtaatccacaagagaagtgaacatgcattctattcatacgctttaagcccgatgctaagatggattccaaattcttcctataagttccatgtacacacactgccattacagaaattcaaatgaactcgagtaacacataacaataacataattttacaagtatgtgtcctagtagtacctggagcttcttctggtgacagtattggtttaagtaacttctctgactcaaccgtctgcgcacaaagacataagctaaagctattgatcaaaactaggagaacaaaaatccaatcatagtgctactgtgtctcaacgaagaagaaaacagccaaatgctaaggattcattgttcaagttctattaccgtgatcgaatggccttggttagcgcgaatcaagagctctccattctcatcgatgagactaaaccgttgcttattgtcccttctcacagcctgcaagttaacgaaaaccatacacaaactcatctcaaaaacgtctccaatcgaaaatgctcgttgacaaaaacaagtgaaaaaaatgaaactaacctctctaatttcatcaatcgtgtgtgactttaactgaatatttgcagaagttttcaaattcaggttaagtaaatcttcaactttaacaaaaccatcacctctcatgttcaatctcagctcagtagccatatgtcgcaatattctcgtcctgattatcaatccattatagattcaaaattcaagctaattctctaacatctagaatccagtattgatcgattacacttacaagagtcgtccaagtgcatcgattctatcctttccgcctccaccgtcgccacgaccctgaggtctccgtcgatcgttatctctctcatatcctcctcctctaccaccgctaaatccatcaaaatcaaacaccaaaccttacatgaaaaaacgagggaaaatcaaaagggattttgacttttcgaataatttgaaaaattagaattcaccttcgactggactgagcgaaggaagagacattagattttctagaagaattgggatttgaagcatccatgaaagcagaagaaacaggagacgatttcgagaagaagacagagctgctcaaagtcagaggaagaggaagtcgatgacgacagagacgcagcaacattatgtattcgccaacttaggaatcgatatacattatgtactgggcctttctattataaagcccactcagataagtgaatgacgagacggcatgatattcgatgacagttcaaataaacgtcacgtagtttgggttcttcccggtttagtttttttcaggcggtcagtagtcagtcctcctccgcggattcgtttgatcggcgattgcgttgaaggttgaaaatacgatattaatgggttcccggagagattatcggagcatgagatcttgtagcggatggcgtcgaattcttttacttattcctgtgctctttcttcttcctcatctctcttcacttgttgatttttcttcggattcggctacgaggaacgacgcgcgaaccattcctaataagaaattggatcaccttgtgctcggtcctgtagctggacaaggcttgtctgatcgatttcattgccgaggttagattttgcgtattcttctatttttaggtttgctacaattaagcacttttgtataggcacagatctgagcaattttgtccagcaatttgaacacaatgtctcgtctctgtgaatctcaggaacttttgttttaataaccatttgaatgagatacatcatacacttagccattgttctgcttcacaaacattgtagcattgttttcatgcaacttgacgcaccattagaatggtattgacaggtgttttacaatttcatatttgtttaggcacgaaggctctgaacaagactcatggttcaacttctcatgtgtctggtgctggaaatggcgtttcttttgtgacggtgtttactgtttataatacgtcgctcggaaatgtgaaatcctccaatccggtttctgttgttgggaatgttacctacagcaagccagagaggtcaatggctgttctaaatgcattcgccaacttcattcaggtaacttgctgagttttcctctgtatttaacaattttggtgtttcttagctgctgcgtttgctatctcatagactgattactactgaaaaatctgtttttaggtgactatgcccaagagcaatgttgtcatattgactgatccagcttctgatctctccatccaacaaagcaatgtgatattacagcctgttcagggtgattattcacggggtaacctgatgcttcaaagaatcaggtcttacattgtaagagcaaactcgcactgatacctaggtagaatatatttgttgcttttacctatctatctctttggcacccatttctttaagagcccatctaattttcttttattcatttcttagaaagtgtttagtgaagtagctgaattgttgagagaatatgaatgctcattgggtcatgattcttgttaaaatttgtctctgcagacctttcttgagatgaagctcgagaagaatgagggtgggataaaccactatatcttcactgattctgatatagctgtggttgacgacgtcgggactatatttgacaagcattcaagcttccatctagcactcacattcaggaacaataaagatcagccgttgaattcaggatttatagcagtgagaggcacacgtgaagggatcctaaggtttgcatttatccttcgtaaacttgaagcaaatctattatagttaaaagacatacttgtctcagcatattgatgactttgtcttacatgtgatcccaatgcagggccaaagtttttcttgaagaagtcctaaaagcttacaaaaccaaatacatgaaagcttcgcgcatgcttggtgatcagttggctctggtatcggttgttaaatctcatgcttcctttgacgcaaagagattcacaaagccacaagctttcacagaagaaatagctggagcttcagtgttatttctaccatgtgctctatacaactggacacctcctgaaggtgctggtcagtttcatggcatgccattagatgtcaaggtactctaaatccctaaaaccataaaccctcaaagcatcatcagagtctcattactcgtttttttgcagattgttcacttcaaaggatcaagaaaacgtttaatgctcgaggcatggaacttctacaaatctacttcaaacattccagatatgttgtgtcttgttctaggtagtggaagaactaaatacgatttctgattgttgacgatgacaactctgtttttttctttcgttaatctcttttatttgatcaaatcaactagaacagacaacatttagaagtaaaataaatgaattaaataaaattaccgaaatgggttatgtgttcaaatctgttacaacaaattcccaaaaattactcaaatcaattaaaaaacaagaaatcaaaagatcatcatcaaccagaaaaaaagatcatctagcggcggcttttttgtcgccggagtaataactcaaataccatctgacaaacttcttcaaaccggtttgcaaatccgtagtcggtttataaccaagctcacgttgagctaaactaatattagcatgagtaaacggaacgtcaccgtttcgtggcatcttaatcaaattcttcttcgccttcactttcaattgtctctccaatatcctcaccagatctgaaaccggcaccggcgacgtgtttccgaggttaaacactctcaattgcgccggacctctcttcttccctccactccctgtactcttctccgccgtatctagcgccgctaaacatcccttcactatatcgtctatgtaagtgaaatccctagccaccgttccgtgattcgccgattcgaatatcgaaatcgatttgccttttagaatatctttagtgaagaagaaatacgccatgtctggtcttccccaaggtccatacacggtgaaaaatcttaatccggttagagataatccatagatgtggttgtaggtatgtgcgatctcttcgccggcttttttagtggcggcgtataaactcgccggttgatctgttttatctttctccgagaacggaactttggtgttgagtccgtagacggagctagacgaagcccagactatagcaggttgtggattcacagatttgcagatctcgaggagattgacgaatccggcgatgttgctatgaacgtacgagctagggttttccattgcgtaccgtacaccagcttgagctgctaaatgcataacgtgtgtgaaggagacgatcttgaatagcttacggagtaattcgacgtcgtttatgtctccttctacgatgaagatcccacttctctcgagtaaagctcgtcttgctcgtttcagagatggatcgtagtaatcgttgaagttgtcgaggccgattacgccgtctccgcggcgttttaatgcggcggagacgtgtgttccgacgaaaccagctgctccggttactaaaactgtgattccgttgtttgttgaggttcggattcgagctgaggatctgagacgtttttcccaagctggtcctccgtaggtgttggttcggagtgaacggcgagatggatcggacggtgaagaagggttaatggacggtggagatcggaggaagagtagagagatgagacagaggaggaagaaggagaaaaatgcaaactttgtgagagaagattggaatctgagacgatgcaagtaggaagatttctccatcttgaatttgcctgggcttgaaggtatgtcgtcaagacgtgacattttctcttcttcttcttcttctttggactctcttcctttattagttttaatggcagcttcttagaatcttcaggtttcttggaggggattaaattaaaacacaaaggtttctttattatgactccaacatgagaaacacgaatattatctttttaataaaatatattcgaggatcaaagtttggtttataatagggtatatgataaagagagtgttgtgattttttaaattagaacatggggattgaagattttagagatccaaatcatagggaaaatatgaagaagaagaagaagaagaagaagaagaagaagaagaagaagaagaagaagagagtcaaaaaaattactgtaaaaatttgttgactcttctaaagatttgttgtcgagtcttgaaatttgattggtgagatactaatactccaagattttcgggaagccactcgtcccaaaagttttgaatttgaaccaaagttttaaacttttgttaatagatttgttttgcggatagttgctaaatacaaaaatggactctaaatttgaatagaggttgttgtcttgttgatgtccctaaatcctatgtttatacgttttccttgaatggtgtaacagagatattttgggctcttaacctttgattttagtgctttgatctaaaacaaaacgagtaatgatctaaaatacatttccaagacatcgaccataacaattctctaaatattggcatttttagtagtacaagtcatggtcttaaggtgtgtagggttaaaatcatggtttagtaaaaacccactttttaaaaatgtataaacaaaaaagttgttggaatcacacaagaagtttttagctttatatattgcaaaaaggcacaagtgaataaaaggctaataatggcacacaaggaccccatgtgaagatttgattacataagacaagaacatgtcctctttttcttctttatgaattggcataacatgtccccgtgccattgtcccactttctccaagatctactctcttgtctctttcccattgcagtttaaattccaagacaaaacaatagtgacccattaagcccatcttcttgatcatgagtgatcaaatgccttagagtcattaaattccattccaaaacaatagtgacccattaattcacaatttcactgttttatcaaatgcctcacctataacatcatctaatgactctaagtcccaagttgtgtgtactgaccaagcatgccaaattttgaaatgcccaaatctatcaatctgccatatgaaggagacaagagttgtgagatatattaatacacagttacattgaacaaaatatcattttgaatctcaattcagattactttaaactactctaaaaacaccaactttcatattgatgaaaatcttaatttcattctcgcctgtctaataatataaactaagacaaaaaatttttttgagaattccgacccaagtaaggttttttcattcattgtttcttcgcatataagactaagtaataataactactattattatgagaggaggaagggaggagctatatgtctactattttgagtttattagccaatcagagccctccatgtcataccccattctcaccgatcttaccatttcatacccactctcgcccatcttgcgtttggcgcgtgaatccaatttctgtgggttctaacccaccaaaacgcctattttgaaccacactcgcccctctctaaaaacgcctcgcgtgcgtgcctttttttcttttctcttctcaaaaccttattaattccaatgcaaaccgaaacccaaaaatcaattgaaaagttcgaaaccatgtaaaccgaactcaaataaaaaacacaaaagacaaacaagggattattgtcactttcagattgataattttgattcgattccacacagaatcataactccaaaacaaatgcaattgataagagagccaaatttgtttcaagcttttccctaaaattcttagctaaaacccaaaaacaaacacgagcttctttctaggcgaaggcgaaattgaaatgttacctgttgaaggattttcggtctttcgatgtctcagattgcagagacgagaggctcctgcttactttctcttggtctccatttttcaccggagctcatgcggatgagaatttccgggattttagtttactagtcggagagaaacgactgtgttaggacgtgggccacaaatgggctttgactcagatttaaacggcgtcgttttacgtgggccataaatggtctttgacgggaactcacagttagtttgctaattacgatgacgaccccaacaacactattctcctcctttgagcttcatctataatattgttctcgtgaccgatcaactgtgtctctcgaggatgagctctactacatcgtgtggcagcaattccaaacaagaacgatgtcttttcaataccaaactagaggaaccatgtctttccaacattattgtctctaataagtgatcaaaagagacgatcgtggctgctgtctttatatattcgagtcgacgacctaggaattggaaaaaaaagagaagaaggaaaactcaatttctttccatcaagataaaaggaaatctctacacattcatttctctcaatcgaactcaaatgattgcatctcaaaactcgctcagttcagttacacgcaaacaaacactctcggtttctaataatattacagagacaagaaaaatggaaacagataagcttggatcagaagaaaaaacagagtttattgtttagtgctttgtgattctttcaagtacttggaagtagtcggggaaggttttcctggtgcaaccaggatcgttgatggtgattggaacatcagcacaagctgcaagagagaatgccattgccattctatgatcatcatatgtatcaatctctgccgttttcacctttttgggcggagttatcacacaataatctgaaccttcttccactgtagctcccagctgaacacaaacacacaaaatttatgagctaattacttagaatgagcactgtcaagagacagaaagagagagataagaatctcttacttttctaagctctgtgcaaatggcaatcatcctttctgtctcctttactctccagctagccactatattaaccaaacagaattaagtgatcatgaatattgagaaaccttaattataagagagagctttttacttaccatctctaatggtggttggaccgtcagcaaagagagcaacgacggcaagggtcatggctacatcaggcattttgttcatgttgacatcaatagcccgcaagtgtctcattccaaaagcatctctaggtggtcctgtcacagtcacactgttctctgtccaggacactttacatcccattttctcaaggacctcggcgaattttacatctccctagagattcatcacaaaaattgagcttagattcttgcgaatatgttatatacaacttgtcaaaagatgaaactttgacctagacgaatttcactataaacttaacagcctcgtcgatgattcagtgtacaaatattacctgcaagctggtagttccacaaccttcgactgtgacagtttcaccggtaatggcagcaccagccaagaaataactagcactagaagcatcaccttctacatacgcattacccggagacctgaatcattcaccttttagtcattatattgtcaagctaagggatgtgatttcagaaaaggaagaaaagaataactcctacttgtatttttgcccgcccttgacaaagaaacgatcccagctatcactatgctcgacactaaccccgaaacgttccatcaacttcaatgtcatttcaacatatggaacagaaattaatttatcgacaatctcaatctcgacgtctccaagagctaagggagcagacatgagcagagcagtcaagtactgactactaattgatccagaaagcttcacctgcaaatgcataacatgtctcctaattgttaatcaagaaatcatacaacgaaaacggtaatcgagaacgaaaaccaatcaccaaatccgattctattttaggatccatccgttgagagtagattaaaaactgaaatcttgtcaagctaaggctatgatgaacacacatttctgcaagtgttcatagagtaaggaacgagattacatattcacatgccatttgcaagatctaacctttccaccgggaaggccaccattagcgttgacacgaacaggagggcagttagttccaagagtacattcaacatcagcaccaagctgcttaagaccaacaaccaaatcccctataggtctttctctcatacgaggcaccccatcaagcacataactggaataaatggatcataaagcatcaacaaaagctccattccttaaacatcaaataccaagaagcatcaactccttcaatctaccttgcgtttccacctgcagcagtgaccgcagcggtaagtggacgcattgctgttcctgcattaccgaggtaaagttcgatatcactctttgaatctatggaagctgggaatatcccgccacatccttcaactacagcacgattattttcactgtcagtttccacattaagtcccaatctcttcaacgcatcaagcatgtaattgatgtcatcgctattcaacaagttgtccactacagttgttccctataaaaccacagcaaaatggtaaagtatcaatctttataatctaagttcagattacagagaaggacgaaacgaagtgatatatacctcagacagagcagcgagaagcaggatccgatttgatagagacttggagccaggaagcttaataagaccggagatttctctaatgggttgaagtacaatctccgacgctttctccgccgtggaaacagaagacatgaccttaagaggacgaagctcagagccaattaacgtcatcccactcttcttcaatccccacgacgacgaaatcggataagctcgtggatgctgctgcgtcttcagagaaaccgataagggagatttgcgttgactggatttcgagagattggagataagagatgggttctgcacaccattgcagattctgctaacttgcgccatcggagaaacttcaattgaagcaatcgaagaatggggattgaaaattttgatcttcctccaattacgtaagatcacagaaatgaaatttataaactttcgtttacactttggcggctttgctaatataaacacttttgttgggtttggagggagttggtgagaaatgagaagaaggcatccgtcaaatctttcaccaaccaaaaactctatgactctggtatggtatgagcatttatcataaccactggcagtatgacacgtgttagtttggtgttcacgtcaacatgtgcaaaggctttggtgggttaggtgaaagaaaatgtgggttttcaaattgggcctcaagaaagataaatggggtttctaacaaaaagacatgaaaggggattatgttttttgttgggccttaagaaatgggttttctaacaaaaagacatgaaagggaatttatgttttttgtggacaatctcccatgttatgaattatgattctctggagattacgagtcatttgttttttggtcttgcacgttgtatgttgaatctgctatttcttttggagtattaactataggtaatggtgtcgtgaaggcaaaagcaacaaatttattctacgtatcagtgcgagtttgctcttacaattttattaaatgcgttcaattttattgattagcaaaggcgatctcttggagctaaaaatttttgcacttaatttataaacaatgtgcaaaattaaaacaaaataatatctattaataatatgttatagatacgttagatcataaactgtatgtacgaacactagcggcgacacaacatacaagtcacccttttctagcattcgaccaaaaccacttatattgagatttgagaatgcgatgtcccaaacctcacagactctctgttatgtgatgttttgaataaaagagaggtcaatgctctttcacgcgggagaacatcataatcgcaagtgccctcaattaatgtagtgtattcaccaacgagcaaggcaaactacaagaagaaaaaaggaaaagaaaacttgagaagttctttgaaaacaaaacgtccaaacaaaagtgtaactgaaaaatacaaatagatataaagattcattacgttaaaacataagtattattccataaagcggactaaaaaaagagtcttcattgaaaaaagaggattcagaaaggcgtcgacgaaatctttactatcgatgatagagcgtcacagcatcgacacggatcggaatctgatgataaatttcgtcgaaagcctcgatagtatttcgaagatgagtttaagaggaatgcttgctgtggagttttcggcatgatctaggttacgtgatgtacacggttgtgaatcttccattgtggattggtagtgatagccctacaaacataaaaagggaccaatatatataacacatgacacttttgtttttccataaataagtaagggaatttccggttgtgccatatttgtaagcaaaaatggaaagattctagacagaattccgtaaattccttttgtgtcaaccaattagactacaaagtagatgtaagactagttgagacgattgcaattaacatgtaaggattacatgtctttgcgaaataaaatcaactaatcaagaataaaagtacaatagagttgttgtttacaaagatcaaaactatgttaattacaagaaaacaataaaaatataaataaaagcctaaaacatcatttatttaatcaaccaataaaaataattttgcattgaaaatttaaaacatcatttatttaaaaaccaaaatgaaagctttaaacatcatttataaaaagattggaaggagtatatttttatttggacaaagaagataatgcttatggaatgtctcttacttcaaatgcaaacctcggtagtacctgtaagatacttttttaaataagtgacttggctgcttcaaccatagcttcaatggtgataccaaactctttataaagctttcctgctggtgcacttgctccaaacgtatcaattccaatcgatttcccttttcctccgacgatctttccccatccaaaagtcgatccagcttcgatactaactctagctgatacatcagatggcaaaacactttccttgtatgcatctgattgctcgtcgaaaagctcccaacatacaaaggaaacaactctcacacttttgccttgttcccttaacttctctgcagcttgagcagcaatctctagctctgatccagttccgatcaagatcacatcgggtttgttaccggttgagttgtcagaaatggtgtatccacctttctcgacgctctcaatagatgttcctggaagttgaggcagcttttgtctagataaggctaagacagaaggtgtcttacgttttgtgacagcgattttgtatgcaccggctgtttcgttcccatcagctggacggaacatcataatattgggcatggcacggaaactggataagtgttcgatgggttggtgggttggtccatcttctccaagaccaatggagtcatgggtcataacgtatataacaccagcttcagacaaagccgagattctcattgcagctctcatatagtcagtaaacacaaagaaagttgcgcagtaagggataaaaccggggctgtgaagggcaatgccgttgcagatagctcccataccatgttccctgacaccaaatctaaggtttctttcttcaggtgtggctttttggaagttgccgaatgctttaagcattgtcatgttggaagatgcaaggtcagcactcccaccaagaaaaccaggcacagctttcgcaagtgcgttaagacattgctgagacaggtttctggtggcatcacccggagagtctggtgtatatgtctaaatgaaaattttaagttgcctaaaataagagccttatatatgaagaatactgataaaacgttatagattaccagaaagttctacttacaggaagtgccttctcccaaccaacgggcaattcacctgagataatagatttcaactctgcagcttcctccggatatttcttctcataagctgcaaatttggcattccaatcagcttcaagagcagccccttcgggcgtgtgacggctccaatggctagaaaacataagaattatagtaaattaccaaagcaggttctcataccacaaccataaccataaatagaagtgcatagttaagttctacttaccttttgacatcctcaggtacatggaacggctcatatggccacccaagattgtttcgggtagcctcaacttccttctcaccaagcgcagctccatggacactgtatgagtttgccttgttgggagaaccataaccaattgtagtagtgacctaaaccatgccacaaaacaattaacaccaaaggccatgagatcaaacgttgcttaatgagttcatggctaaaaaaagtgtgcagataccttaatcaaagtgggcttgtctgttacagccttagcttccctaatggcagcacggatctcatcataaccattgtttccattctttacccagataacatgccatccaagagcttcaaagcgtttgtccacgctctcggtaaaagcaatatctgtgtctccatcaatggaaatgtgattgtcatcgtagaaagcgattagctttccaagtccccagtgaccagctagagagcaaacttcatttgaaatcccttccatctgacaaccatctccaagaatcgaatacctaatccaaagcagtcagtttacaacatcacaatccaagaaagataacaataaaagtgccgttgaaggagtcaaaatcttacgtgtagtggtcaacaatctcattgtcaggtttgttaaatctagcagccaaatgcttctccgcaagagctaaaccaacagcatttgcaataccttgtccaagaggacctgcatgttggcaaatacaagcaatgctatattacaaaagatcaacatcaactaaaacacacaaaagaagcagagaaaatctaactaaccagtagtggcttcaacaccaggagtctcaaaattctcaggatgtcctggagtcttacttccccattgacggaagctcttcaaatcttcctcctaataaaaaacttcaacactgcttcagcaaatcttaagttggttctacaattctaaatctcaagactccaaaaatcaccaaatgagcagggaaacggaacaatctgtgtatttactatgtaatctcaataatgtaaactaaaaggatacaaacttaataagcagagtaagagaacacaaaccctaacgctgtcgtagccagcaaggtgaagcagagcgtattgcaacatgcatccatgtccagcagagagaacgaaacgatcacggttaaaccagtaaggattcttggggttatacttcatgacttcatcgtacaaaatgtgagacatcggagcacagcccataggaagacctggatgacctgatttcgccttctcaaccgcatctattgccagaaacctgatcgtgttcaccgacttatcaaccagggacgaatcagaacttgtcacgattgcctctacggcggctgcacgaaccagagggcggagagagtgactgatcgtggaggcgtttcgtcgacgggaagagatggtgccactggtgcgtggagaagtggatttgagagcagagaaagctggtatagagacgcagttttcagagccattgtgagagatggctcgtgtaaggagagcttgtgagagcgctagagaagaagtagaagccattgatgctctctctggttaactgagagagagaaaatagaagagaaagcttctctgcaaacctattttaggagactgttgctattaataaaccaatgagatctcgatctgaccgttggattcagaaaggacacaatcttgacggctgtgatgctctatggctttaacaatttttcgaatctaattcttttgtttaattttcaactaatcattgctttttacgctaattattaaaataataatttaatttaagtaaaaaatagattgacaatgcggcatggttggtgtgttaagcaaaagccatggttatgacaagggttggtgaagaacctaattactttagattttttttttttttgggggcaaaattgctttagatttaggaaatacattttagtcaccaattcaccaactccggtattgacccagtcggtgacggcgtagctgacgaaacctttttttctctcaacatcccacgttgcatagcacgtgtctttattttgctcattttttcttgttatgtttgcaattagtgggccttcttatgaccttcttttgtaccgaatatttgcccatttgggctttatgaaacaattgggccgaaaaaaactcatgcagtttaatggaatcaagaactgaaccaaaactaaaccggagaaagcttactcatgtccttgtgactgtgtcgtggtgtgtcattacatcatcttgactcgcttgctactcgaggatgagtttcttagacctctactggttacagtgtatgaagccgaagctgaaggaagtgaaggggacttatcgatatatgcgtaacgctcatcaccattccaatacagaatgactcggttggtgcacgaatgagaccagctatcgcctgaaaacagcacaagttgaccatttaagtatcataacaaatgaatgatgatgatgataatagcaaactgagatggtagatttgagtttggctcacctaaagcaagcgctagttgaaacgagccttcactaaactttgtggtcacctggtttagtaacacgacctgagattggatcataagagttgattaggaacctccacttaagctagtcaaggattgtattgtgaattagatcatttcttcttaccgcaagtgagaactttttggcaagcttcatgaactttaaagccatttcgctgagcactcgtgtcctctgggctaagtcatcatagtcctgacggaaatgaaaggtgatactgtctacgattacaactttaacctgcaaccatgaaagattaaagagagtcttagtgagccgccgaattatgtcacaatatacacttgtagcagcaaatcaacgggatggaacttcaaaattattatacctacatctttgttttcagagatgaacttttcaagatgattgaccaatgcgatttgctcggtgtaactgcagacacggaagtagaatatgttctctaagatatcttctggtttcatttgtacttgatttgcttgaaaatgtttatgcatgtatcctgtgtattcttccatgtcctctacacaagcttctgctatctgtaaagcacgctccaccatgaagctaccttctgtatctgtagcatacaaaaagcattaacaaccaagtaagtgatcaaccaaggcattagtcatcactactaaaagaaacataccgatatatatagctttccctccaagaccaccacactcacgtggaatctgaacattcacagagagctggatcctgaaaccagatcgaagttaacagaagaggaaacactctgatgatgatgagaaagtagaggaaagcagtgaagcggatttacccaatctgagtcttgccaatccctggtaccccacctttgagaaaataagcaaaccactaaatcacttaatgatctcaaattggaccagagaaagaatgataatggagatgacataccaatctctgtaacatccctacagctaattccaccgcccaaaatgttatcaagatcagagcaagatgtagtaatacgcggcaaagactcctcctcgtgaagcatatcccaagcgttctttgctcctttgtttagtcacaaaatttcataaagagaatccttgagtgaaccatttaagaaggagaaaaaccaccaacatagctccaaggaggagttcatcaagttaccatttatgagtgaacggcttccattgcaacaactttgattagccagcttcaaaatctcaaatgcttcctcctctgtgatatttgcatctactcacacaccaacgatatcaaagatgactcaaaacacacacacacacatatatagaattattccagaaataagccttaaacaagagactaaatagaaccctaattatcaacccaaggactaatcaattgaggtgtactgtctgtgctaatcagagaaaaacgagcaacagattctaatcttctaagattagggtaaagcagaaatttacctcgagcgagatcagaagaagagacggaagcaatcgaagacagacaagtataaccggccgatatcagttttcctctaatcgaaggcgataacggtaacctccatgcctccatgactgaagtcgcgagtgaagtttcttcaatcgccggcgatttacgccgcccaaatgaaatcattgttggcgccacatatataacgatgaaagtcttttaactccctatcgttgaatcaatatttaaaaactattggattaaaaatcgtataattctcagtagtctagtggttcaacgacatctaaattttactaatgtcgtgagttcgatccatatttgcaactttttttacgtttttttaatttttttccctttttttttcgtcgaacaacttttcatttaaagcccaaaatgggcaaagatacaaatggatttgagaccaacaaccttaaaacaatgaagcctgccatttttcttcaaatccatttgaaaactccttagcagaacagactctgtgacaatcgattggtcttctccacatcttcttgaccggaaatccatctctgaccgcctcgaagctacagaacactccgctccacaaccgatttatcgataaaagacgtcccatgactttccatggacgagcaaaggcatcattactccctgcctgagaagattagagcatatgttgaagctgaaagaattcctcacggccactgaatctttagagaaaaattgatctctgcaagcttctttttttctcctcaatgttggcgccatttaatgttggaactaggaataaactaaaaagtataatgaaccagacacggtttaggttaaccgggaccaatgattgaacgaaattaaattaaccggaaaagcgtttgttcctcagtgaaaagaatacaaggatttggatatctggttttaagttacaggagacaatcttcttgctacgtttgtgtttgttgttgaagagaatctgctctaatgattgaagtaagtgacggatggatccgtgcagttctcatagaacgagcttcgcttcttcctttcgcatactcctcgccaagaggccacctcggtcgaagatcatactaaattcataaccaacaaaacatcaatctccaagttatcagtttttcaaacaatagaatctttacaagtaccgagttttgttaagaaaaagtaccacataatcctcaggttcagttgcaggtggaggtggatcatatcttcctacacgaaaatgctcgagaccagtccaagccaccattactcctggtgagactaatgaatacttgttagtttctattctctgtgtctctaatttgatcagtaggagaatttcaaactctatttaccattgtctgtgcagaggctaggaggagggcaaacaagtttcaggtttttgttttcgacaatgttattaagtcggagtcgtacatacttgtttgaagcaacaccaccagagattacctgaagcttagtcaatattagtctagaagcatttgtcaagcaaaacagaggtttctttttcttgttctaaacctcaccatatgtttaatagaaggctctagttctaatgcccagtctattgctcgctcacatttttcttccagatgcaagacagctactcgctggttcatacaaactgaaaatgtttagaaatcagcatttcactagaacattaaaaccggagataaatttgtacctggaaagaagcggcaatatcagcacggtttcttctgtcttcgtttgttgcagaagagacgggacatttagcatcactgcacatccagcaaacgaccaatatttttgtaacacaaagcttcagcatatgtgacacaacgctgataaacaatttccgaagctgattataagatctcactattttacatttctttggcttcaatggctagcctcacttgtgtcttcaaaccagcataagaaaagttgcaatctttatgatatttcattggaacctgataaacatggtaaacaatatcacagaaatgatgtgaacattgagtagaacatgaaaaaagatatctaaccaaccagcaactagtttgtcacttacattaaacttaacagactttgcatcaccctccagagcaagttcttcaacagctggtccaccactcctgtgcatatcgaggccgagccatttagctgtcttgtcaaatgcctcacctatagcatcatctactgtagtcccaagttgtgtgtactgaccaagcttatgcgcaagaactagaagattgtgccctcctaaatagaaaaaaagaaaaggggcgtttcagtttagatagaaacctaatccctacggtgaaactgattttgcttaagaataacttcactaagatgatagtttctcacttacattaaacttaactgattttgcaatacctgatataagcaatgccatgaaagggaagcttaattcttgttccactaatctacatagacaaatcagacgctgatgagccagtcacaaatctcaaaaaatgggaacaaaaccataacgcgagcagattaagcaatacctagcaacgagagcatgagcctccatgtgatgcaccccaacgattgggagactgaagttaccagcaactcttctagccttgcgcacaccaactgtataactcaaaataaacacttgtgtctaagtactctaacaacactcatcattccaaagtacaatgagtggattcttatttctccaacttaccacgtagacagaggctcaaaccaggtccaatggtaacagcaacagcagagagatccttctcggtcaaattggctttatcaagcgcgtcttgcacaacctgcaaccgatgaatcaacatttttgtgtgccgttagcattaaaccccaccggcctaaaaatatgcacatctcagggcaaaatgaagaatctggaccaattgtgaacaaagactgaatctagatacttgagagttatcgagtcatgcaatgctttgtaacgatgaatagtctatattaccttatcgataactcgggagtgtgcttcttcagcctgtttaggagcgacgcctccatattggacaagcaattctgccttaatgttgccaattccgagatcagaacaggtgaaacttaacgaatcatataaaggatagaaatttttaaaagtgaaaggctttctcagacaaaactatgtattcaagtcattactggagtcttctaaacatgaaaagcacgccaaagaatccactaaagcaaaggagtgatcgttacctgagaagaaatgacttgactgagaatttcaccattacctctcacctaaaagccacacattccaacatcagaaaggttcagtaaactaatactataagttaacacgacaagaagaagaaaggtgattaaacggacttacaacagctgcggcagtgtcgtcgcagctcgtttcaatacccagaacaaccaaattatcatcaaaattcgggttttcgctatagggtaaggaggaaattcttgtttcggtagaataaaaacgtgtcctttgaaaattgggtgaagatgaaggagagattaacgagaaagtcggggttttggttttaagcttatggtgtttttgtaatctgagagaattattatttctcgctagaatagagattcctggataaagattgaatcgggaaatcgccggagaaagtgtaagaaacagacgaaccatttcaccgaaccgaaagagaaagacggaaacttgagctgtgtgcagaagatgagctgaggtttggattgcagcctaatccggtttaaatcagaaccggtttaaatttgaccatagtgattgggtcctggtttagaggttttaagcaagtagaaaaataatgagctttaccatttccgttcacttcctagaaaagtaagtatatacctttctctgtatttccttcacctccggctaaatctccggcgaccgcgtaacttgttctccggtctgaatagtgaataaacacacacacggagccaaatccaggtgatctctttagttttcgatctctttctctagattcagattaaattataacagctgattgtctaaccacaaacctaaattgcaaaaagcttgtgaactttatctggaaatgaacactgtcgaaagatctttagggtttgtgaaatttattttttacattttccatagctagatttcatttgaatgataattcacttcgagatctgtaaacacaaaatgtttcaaattgagtcttcttctgttccacaagtttgattctaagacatttttttgcaggagaaattaggtttgaattagagagattaggagaatacaaattggtttggtggttttcaagtatgctaccaagtgggttgaaagaaacccaactccgtgagagcaacaacaaccaaaaagtccatcctcaaccaatggaagagtctatcaatcagaatcctgaagctatggaagcacttatctccaatctcttcggaaacatctcgtctttgaaatctgcttatatcgagcttcaaagtgctcatactccttacgatcccgagaagattcaggcagcggacaaagttgtcatttctgaactcaagaatctttccgaaatgaagcatttttacagagagaataaccccaaacctgtatgtgtctctccacaagactctcgtttagctgcagagatccaagagcagcagagtttgttgaagacttatgaggttatggtgaagaagtttcagtctgagattcagaacaaggattctgagatcacgcagatgctacagaagattgaggaagcaaaccagaaacggcttaagcttgagaagaatcttaagttaagaggaatgtctacaaacgaaggttctaatggagatggaaatatgcagtttcctgacttaactactgaactctatgtatctacttacgaagctgctgctaaagccgtgcacgatttctccaagccgctaatcaacatgatgaaagcagcaggatgggatcttgattctgcagccaattctattgagcctgatgttgtttacgccaagaggcctcacaagaaatatgcatttgaatcatacatatgccaaaggatgttcagtgggtttcagcagaagaacttctcagtaaactcagagagtgctgcggttatggccaatgatgacacagacacctttttccgccagtttcttgctctcaaggacatggatccactagatgctctaggtacaaaccctgattccaactttggtatattctgcaggagcaagtatctcctcttggtccacccaaagatggaagcttctttctttggaaatctagatcagcgtgactacgtgacaggaggtgggcacccgaggactgcgttttaccaggccttcttaaaacttgcaaagtcgatatggatcttgcacaggcttgcttactcttttgatccagctgcaaagatcttccaagtgaaaaagggtagtgagttctctgattcatacatggaaagtgttgtgaagaacatagttgtggatgaaaaagaagagaacccaagagttggtcttatggttatgcctgggttttggattggtggcagtgtcattcaaagccgagtttatgtttctggtgtgaaggtccttgagtgaaggatctcaggaactctcttaatgcttcttcccactttgttgtgcaacttttattttctctttgttataagcaagcctatatgtatcatctattgttaaaaaaaaaaaggaattaatatcttcttcgtctcaacatctttgggtcgatcgttattcgatgacagtagcaactagcaagtctcttgtgataaaccgtgaaatggcacgattggtaaaagtggggtatgaagtggagcactctcattggctaaaaaaataaaaatagtaggggagctcctcctctcatatattgaaaagaataataaacacttatgaattttctgtgttttcagagtgaatttttattgatttctgaatttttattgatgtgcataaatatgtttgttttttatacttcgcaaattgttgtatattcacattttataatatcttttatcatctactatatgctacactaaggcgatggtatatgtatatgcaacataacagtgcactaattaaaaaccaaaacagagcctaagaagagaggaaaacagagcatgaatgattgagaagaaataatatttagaagcaacgtcatttgcattctaaaataagcaaaaaaactctgaaaggtaatggcttactctgaaactccataaacgaatcccactcttcagctttcactatcctttgttccttacacaatttcacaacaaaacattacaatggtgtttattagaagtaaagtttcaaaatccattgaagccattgattctatagaggtaccttgtaatactcctcgagtcctcgtcctcgaaatggagatttgagcagatgggcttttggaggttggaatcaaaggaagcatcggatttgagggggttttcgaacattctcttggctatttcgagttgatttctcttcgaagttgtgtcgtctccatttttgttgttacagtggccgagctttttgttttcacagtttttatgggtttacattggttttgaaattcaaattgatctcggttcggtttactttggtttagagaagaaaaccaaaaaaaataagacacgcgatgggtttttgagaatgaggtgcgtggatccaaaaaggaatgatttttgtggattaacccctttagaaatcgtagacacgcgctcaacgcgacatgggtgagactggctgtgaaatggcacgattggtaaaagtggggtatgaagtggagctctctcattggctaaaaaaataaaaatagtagacatatagctcctatcctcctcctctctttttgtcatttttatattagcccctactgagaatgaaattcagattttattcaatctgaaagttgtgtgtgttttagatacaattgaaaaaaacttgaatctggactttgtgatactaaaaaatttcctcatcatttgttctgcaaccatttttacaggttggagcttataactgaaaacttgattcaaagaatcgcactaagtgagttgaatatattctaaacatgtgaaatatattggtacaagtttgtccaatcattttgcttttctgaaattggtacaagtttgtgaaattgtagagactctcttttttagcaatttaaaaatctcatctcttcaaatctatatataaaacagggggataacagaaaatgcaatggacttggtagtattaggctgagtctcaagtacaggtgtaagtagatagatacagaatgcaatgggatcttaagcccaagtctcaggagtttaacatcaagacctttggagggatctaatctaatctattgaaatctcctaactcgtgggagcatctctccaaaatgatttactaatagtatgatttccagattatgaatccttcttagggtagaacaaaatatggatacctgtcaaatatatatatcttctcttcgagtcacaatcactgctgtaacaatatcttggataatgctcctttctgcctcattactgactgccctttctcctttccaccacatgtgttctggaaatagacaccaagatgtttctactgatcagtctaacagagaccaagatgattcaagacaatctaatgaagccaagtgactagtactaacaacacttacgctgcccatttcccttcactcatttgatgtagattttatactattcacagaccttcctaacacgtttaaagctgctacgcgctgcatctctctcgctgcaccagaggatcaacaacattatttctagcaaatacttgattccagatggttcatagctacaaacctaaaagcatgtgactaaagcctatatagttgtcagcagatatggaaaaaatggcttaagcagcagcatgaataatccacttatggatggtcaactagaactgtgccaaacagatatgattcagcaatggtaggaagtgagagagtggaagcaaaggagtagagtaccttcctcgagagagaactgaatagacctcttttccaagtcaacagcatgcttgctaagctcggcggaggaaagtgaccaaagcactaataacagaggaaacatatctataaaaacaaaagcgcatcaaggtcaggaattagagtgatattgggaggagctttactctgaacatgatcggtccgatcagattgattaagcttgttaagaagcatttgaagatgaaggtaacgctcttcccagtctaacttatggctggtaggggttggttcctgtgcctgtgcctgtgcgggtgatgaaggtatctggggtggtgccttagtaggaggcggattcggattagtagtgctagcagcggctttggatgtgtcaacctccactcttctccggacataaacaagtcgaccgctagcagcattagtagtggctggagagtccactggaggtttctttaccccaattgatgatactgtatcttgttcgatggccttttctgaatcttttggtgtcccctccggaatctccatttcactgcgattaaggagaaactaagaagaagcttacaaataacaggttcaaagaggatctgcggtgcttcaatatcaaccatacgaggactcaggattataattattggaatctgatcagtgaataatcaatcggaggagcgcgaagcaaaacaatttacctggagaacggagatggtgatggagatggatcagagagagaatacgagcagagcagttccgctccgagagatggtgttttcctcatctcctcgctagctagagaggagagtaaagcattgatgggccagtttaaggcccattatgtgcattcacgggccagtcttactccctctacatactgtatagcatcgcattctatggcccatgcttttcagtcacgttgataccaacaaaaaaaacacaagtgaagaacaacactcccgagtgaaattgttgagtttcctttggtgagtttttgcgagtttgagaaaaacaagagatttggacactattccgacacacatcgtgtaaggcttaattcaaaactatcaaccacaaaaaccagatgagaacagaacacaatttttttttttgtcaaaacctggaaaacagggtacgagacgtattggtcattgctgtgagacttggaagcgagggaaacaaagagagatttgagatcatcaagcttcttctgagtaaaagctctgcaacaaaacacacacacacaattgataagatcgattttcaaattagaaattagagagtgaaagtgagattggttccgatgaagacctggaagcagaagtgaagcgatgatcaacagaagacgaattcaaattcccattttcgacggatttttttctctcctcagttctccggcaggtttcgtcgtctctgttcttctattattttttattgatcttccacttcttcaaaattacaacttcaaccccttaaaatctaaatattctaaatgtaccccattacttttaatgcgttgatctcgaagcagcagagtaaaatataaaagttggtgagttgaaatcacacaaagaagagaaaataagaaagataataaaaggacgaggcaaacacgaagagctcacaacgagattcatgctttcagatttcaactggtaagtctaatctgtataaaccttaattattgcaaatcgtccttgttcttatggaatctacaattctttttggtatctttttttatgtgtcactttgttgccgagaaattttactaaaactagtaaagctaagctctttcggtcgtttttcatgttcttcttcatctattggatgccatggaagtagaaatcttcaggaatcttctttggctttgattctgagatttttgcaatttgaaagtttactgtgatttttgagttgtagtgcaatttaagggtcaaaggcttttgtgattttcttggatattttttttgtgattttgagttgtggtgttttctctttttcccgttgttgggatgttgagaaaatttctgtccagaattgttgcttcacactatttgctgattcggtttggtttgcattggttttgaaattaaaactgatttcggttcggtttcatttggttttgtggaaaaaaactaaaagagtcacgcgatagagaatttggagagatgtgcgtcgataaaaaaagtcatgaattggaaaggggtttacccacagaatcgctctcactcgctcaacgcgctctttctgcgagtgggtacgaaatagagccttctgattggcttagaaactctaaaaaaactcaaatagtatacatgttgctagctatgttattatttgataaagttttgtacttgcatctttttttcagtcaccggaagttggaagttcgtttgtgataggatctaaacaagtatcaaagtctacaaattctggattaagcaagttaaagacttgtgattcccctgtatcttcaacaacctcgtcttccaaaactttatccaaagacatctgtggatagccatagcaagccgcagttacattatacaggaaaggtaccacttaaggctttgcattccaaagaaaatgtcacagtcgctttgtttgatatgtttgttctgtggattgttaacattccataaagtcgatatggatcttgcataggcttgcttactcttttgatccagctgcaaagatcttccaagtgaaaaagggtagtgagttctctgattcatacatggaaagtgttgtgaagaacatagttgtggatgaaaaagaagagaacccaagagttggtcttatggttatgcctgggttttggattggtggcagtgtcattcaaagccgagtttatgtttctggtgtgaaggtccttgagtgaaggatctcaggaactctcttaatgcttcttcccactttgttgtgcaacttttattttctctttgttataagcaagcctatatgtatcatctattgttaaaaaaaaatggaattaatatcttcttcgtctcaacatctttaggtcgatcgttattcgatgacagtagcaactagcaagtctcttgtgatatatcctagccaagcgacctcaaaactttttttatttcgtttgttgtcagtatttcagtttcagacgtttttagcaaaaaagttctcatggtgataaaaataggtttgaaacagtatgactctgtctttaagattcagtttcagatagtaataataaaattacataaacaaagacaacaaggtaacaacatcaaatggtctataatggcaaaaagatgacactattattcccaagtttacgaatcacaaccaaaaaggaaccaaacacttaatcacttggtaagccaaggatatacgtcaggcgatgaaggaagcctcgctgttaaaacctcaacaccagtctccgttaccaatagggtatgctcaaactgagcgctgcgttttccatctgcggtaactgcagtccatccatcaggccatgttcgatccctccacccccctatcatgacaatgcccttatggttgtaaatagataactcaagtatggagtaacaaatttaaaacatttaacgaatgcaggttaaggacatttaacattgaactcacctgcgttgatcattggctcgattgtgaaagtctgacctgctttcatcactccaactgctttgtttcctgattttgaggttaaggacgtttacactggaatagactaacaagacaacaacataccatctcacgaaattctaaagtaacaaaggatacttgcatagtgaggaatgtttggagcacaatggaagagatctccaataccatgaccacaataagatctcacctgtttaaccacaagtcagtttttaagtatacagacaggtgctgtgattatcctaaacagcctataaagaaatcaagactttaccactgataacccagacattgtagcatggcggttgactatctctccaatttcacgaaatcttactccaggtttaactgaaagagacaagcatagaaagtcttagcatctcttctcaatttttgaatatattacagtcaaaacataaaagctaagagcaggtaagaacttagcacctaccaattgctatagctttctccaggcactcgtatgtgcacttaaccagttgacgtgatgcttcgtcaacgtttccaacaaagtatgtctcattaaggtcacctaccgataaatcattccatgagacggcaaatctcaacaagcaacaaatataaatatcattttttcagcaggagaataacttaccatggcaacctttataacagactgttacatccacatttactatatcaccatcttctagtttccttaagcaattaaagcacgagtgattagcgtaaaatttcctaggtcatttagctattttgtcagaaaggctcaaataggtctagatagtaagagcatacctagcatccggaattccatgacaaattacttcattaacagatctgaaagggaatattcagaacatacactttataagcagagggaaaacatggtagggtgataacgtaaacacaaaagaagtacctacgtgcagcaagatttcggaaagaaatagtagttgaggggcgatggatatcctcctgccagaacataagattatacaatagttataatgttgctgtgatgatcttgagtgattgacttccgaaaaggataagaaaatctacaagattaaagtaaacagtgaatcataacagacacaaacctgctgcaatagttgcttcatgaactactcgatcaatctcatcagtagtcacaccggggtgaatcaccctagcggctgcatccaggacctctctggcaatctgataacagaatattttcaaataaaaatcttgaaaaaagctcagtgggaaatgtagtccactggcattacaggaaggaaagaaaataacactaactttacaggtttcacgcattctctggatttgttcaggcgtttttatctacaagacaacaaaagaccttgttagcgacaatgagataaaaatttgtgttcatggctccggattcaggacaattgaatgagtagaggctaatctatcaaggcatcaccaacctcaacaacatgttgtagatcactattcggttcaactttgggagtcccctgaaaaagtggtagaaagtataacagggaatattagaaactataaagtcactgcaagtcattggaagacaagtgagatctacacagacaaagcacagggaactgtttatatcaattcgtgtaaaagtacaagtcttgagacgaagtcattcttagctaaataactattacactaaccaagacgaaataatccaaattcaactttgctagtagtagagtactggtgcagcagaaaaataaatccagatcagggcacttacatcaattgcccagtcaggtttctcaatctcagcaggcacaacacgcttggtagatatgggatattgctttagaggcctatacaacgcaagaagatataagaagtccaaagaagaagtatcaacataaaaacattacacaatatctaatcaacaaagaacactgggtaatattggttacaaacccagtccaatcaaagtgtggaagcttaggtgttctagcctggcctttcttgacgcaatagagccagccttgagaaataagatcagagttctgatcaccgattgaagacagctgagctttcacatgtactgatttgtgcgagctccaagctgccttgaaacattcttgagtgctgtgttagacataagaacgaaaaatcaaaacttaagaactaaagactcaccaaatcaaaaaaggttaaagccagacacgtaccagaaagaggcttgttcacgaggaagctttaagtctatgcatttcggacacctgcgagttcaattcgaatcaagagccataaataatgaaactacgcatattaaaaagccatgaatccatgtgaacatcagcatcccattcctctaacatatactaaaagcaacagttatcgaaatcatctattaaaaactcgaactttggagctaaattgactaccaactatgcaagtcaaatagagaaaaggaagaagaagagtaaatacgtactgaagatgtgcaggcttctcgcagcgagcacaggaaagagtagcaatgctcgatgcatctgattcactggccattcaattccttgattctctcggattaagccaatcagagaacaatctcaaaatcgccggtgtgaattttgatagagaaatagagagacgagtctagggtttatccaagacttgatgaaaattaacatattctaaacgacgtcgtgtgactaaaataattctcttttttgttttgtcaacgactaataattcttcattatttattcttttctaaaatctgaaaattcaccgggagaagagtctcaggtttcaccatctgtctttgagcggttgggttctggagaaaaacctcagcagcccccttctgttttcgaaaggttgggatcaagcaatgaaaaagcaagagaatctggccatcgtaattcaaatgacagagcacaccactctccttctgtctttgaaaggttagggtcacaagcttcatcttctagctcaatctgcaaggagaactctgttcatcaagatcattctgctcatgtggcagctcaattatctaatcattctgcctcctcagtggcagccaatcgctctcactcttctggtatcttacctgagaatgatagcaacaaaaacttgaaagaagggttgatggttaattccaacccttcgaatttaaaatgaggattctgagctggaactgtcagggggtggggaataccccgacagttcggcacctgagggaaatacgtggtctgtatttcccagaggttatattcctctgtgagactaagaagagaagaaattatttggagaatgtggtaggccatcttggattttttgatttgcatactgttgagccgatagggaagagtggtggtctagctctaatgtggaaagattcagtacagatcaaagtgctacaatctgataaaagattaattgatgcgttactgatatggcaagacaaggagttttacctcacctgcatttatggtgaacctgttcaagctgaaaggggagaactgtgggagaggttaacaagactgggattgagtagaagtggcccttggatgctaacaggagattttaatgagcttgtggacccctcggagaagattggagggcctgcgagaaaggagtcatcctgccttgaatttagacaaatgctgaactcgtgtggattgtgggaagttaatcattcaggctatcaattttcatggtatgggaatcgcaatgatgagttagtgcagtgcagattggaccgaacagtagcaaaccaagcttggatggagctctttccccaggctaaagcgacttatttacagaaaatctgttcggatcacagtccgctcattaataatcttgtgggagacaactggaggaaatgggccggtttcaagtatgacaagagatgggtacagagagagggtttcaaggatctattgtgtaacttctggtcccaacaatctacgaaaacaaatgctctaatgatggagaaaattgcaagctgtagaagagaaatatctaagtggaaaagagtctcaaagccaagttctgctgttcggatccaggagcttcagtttaaactagatgctgctaccaaacaaattccttttgatagaagggagctggcgagactgaagaaggaattgagtcaggaatataataatgaggaacagttttggcaagaaaagagcagaattatgtggatgaggaatggggataggaacacaaagtatttccatgcggctaccaagaatagaagagcccaaaatcgaatccagaaactcattgatgaagagggtagggaatggacctccgatgaagatcttggaagagtggcagaggcctactttaagaagctatttgcatcggaggatgtaggttacacggttgaggagttagaaaatctcacgcctttagtctctgatcaaatgaataataaccttcttgcccccattacgaaggaagaggttcagagagctacctttagcatcaaccctcataagtgccccgggcctgatggaatgaatgggttcttataccaacaattttgggagactatgggggatcagataacagagatggttcaggcattcttcaggtcgggcagtattgaggaaggaatgaacaagacaaatatttgccttatcccgaagatcctcaaagctgagaaaatgactgacttcagacctatcagtctgtgtaacgtgatttacaaggtgattgggaagttgatggctaacagattaaagaagattctccctagcctgatttcagaaactcaagcggcttttgttaagggcagacttatcagtgacaatatcttaatagctcatgaactgcttcatgccttgagttcgaataataaatgttctgaggagttcattgctatcaaaactgatatctctaaagcctatgaccgagtggagtggcccttcttggaaaaagcaatgagagggttggggtttgcagatcattggattaggctgataatggagtgtgttaaatctgttcgataccaagtgctgattaatgggacccctcatggtgagatcatcccatctcgaggattaaggcaaggtgaccccctctctccttacctctttgtaatttgtactgaaatgctggtcaagatgctacagtctgcagagcaaaagaatcaaattactggacttaaagtggctagaggagctcctcctatctcccatctactatttgcagacgatagcatgttctactgcaaagtaaacgatgaagcattgggccaaataatcaggatcattgaggagtacagtcttgcctcagggcagagagttaattaccttaagtcgagtatctattttgggaaacacatttcagaggagagacgctgcttggtgaaaaggaagctaggtattgaacgagaaggcggggaaggagtctatttggggctaccagaatcgttccaaggctccaaggttgccacattgagttatttaaaagatagattggggaagaaggtcttggggtggcaatcaaacttcctctctcctggtgggaaggagatactcctcaaggcagtggctatggcgcttccaacctacacaatgtcatgtttcaagattccaaaaacgatctgccaacaaatcgaatcagtaatggctgaattttggtggaagaataaaaaggaaggcagaggtttgcactggaaagcatggtgccatcttagcagaccaaaagctgtggggggacttggatttaaagaaattgaagcttttaatatagccctcttgggaaaacagctttggagaatgatcacagaaaaagactccctaatggcaaaggtcttcaaaagcagatatttcagtaaatcggatccgctcaatgctccattagggtctcgaccatcgtttgcttggaagagtatttatgaggcacaagttctcatcaaacaaggaattcgggcagtgattgggaatggagaaactattaatgtgtggacagatccttggattggtgcgaaaccggcgaaggctgcccaagcggtgaagagatcacacttagtaagtcagtatgctgccaattccattcacgtggtcaaagatctgttattgccggatggtcgagattggaactggaatttggtgtctctgttatttcccgataatactcaggagaacattttggctctcagaccaggtggaaaagaaacaagggacaggtttacttgggagtatagtcggtctggtcattattcggtgaaatcaggatattgggtcatgactgaaattattaaccaaaggaacaatccccaagaggtcctacagccaagtctagaccctatcttccaacagatctggaaattggatgtgcctcctaaaattcaccacttcctttggcgatgtgtgaataattgcctctctgttgctagtaacctggcctataggcacctggctagagagaagagctgtgttagatgtccttcccatggagaaacggtgaatcatctactctttaaatgcccttttgctcggttgacttgggcaatttctcctcttccagcacctccaggtggggaatgggctgaatctttgtttaggaacatgcatcatgtgctctctgttcataaatcccaaccggaagagagtgatcatcatgcactgattccttggattctctggcgtttgtggaagaacagaaatgatctagttttcaaagggagagaattcacagccccgcaagtgatccttaaggcaacagaggacatggatgcatggaataatcgtaaggaaccacaaccccaagtgacaagctctacacgtgatcggtgtgtaaaatggcaacccccttctcacgggtgggtgaaatgtaacacagatggtgcatggtctaaggatttgggtaattgtggagttggttgggttttgagaaatcatacaggaagattgttgtggttggggttgcgggccctaccaagccaacaatctgtgctggagactgaagttgaagctctcagatgggcagttctttctttgtcaagattcaactacaggagagtgatctttgagtcggattctcaatacctagtatctttgattcagaatgaaatggacatcccgagtttagctccaagaatccaagatattaggaacttacttcggcactttgaggaggttaagtttcagtttacgagacgcgaagggaataacgtggctgatagaactgcaagggagtctctttctctaatgaactatgaccccaaaatgtattctattacgccagattggattaaaaatcttgtggatttagaaacagtgtaattgttctttggaaaatataaagttgttgttgagcaaaaaaaaaaaaaaaaaaaaaaaatctgaaaattcacaataacgtttttttcctatcttatatagcagatgttcaaaaaaaaaaaaaaaaaaaaaaacgtttttttccaatctctatgaatttgcatccaattttgtagaatcaactaaaaacattgatgaccaaagaaagaacacacacacaaattgctttactacatacacccgacccaattgttccataggtggcccaattagcatttacaccagacttgtaaagggcccaattacttactacatactatctcatgcatgcggcgggctccaagtccatagccaattttaactacattaagaacaaatatattccaaaaatataccaatttgttttactttcactaagatgttcacttaaataaaaataaaatctcacagtaaactcaactttttaaaaaaaaaattatgcttttatgtattctcagatctcaattctcatgcatgaggagggcttgtctctgcttttgtttttttgttttttttgtttttttttaaaaaaagttaaaagtctatgcctttgtttacaaaatttaagacacatagatgatatctcagatttaaaagtatgctaaatgttatactctctagtaaaaggttaagcgacaaccaattgtcttatcttaaacgttgaaaccatctagaaaataaattgtctttggtttttggatgttttctgataattgaaacagtttcccattttcgtaaataagaattaaagtagcttcacctgaaaagtacgaatggttacttgaaaatcacgataagctatcaagtttataaggcttcagccatgttttccaatatagtgtatcgaaagtattaagatttgcaatatagtgtatctactcagtttaagttttatagttcattagtccataatatcaaaattttcttatttatttgatagtctactctgcttaattatacgtaccatttgagtacttggacaagaacaaaatttttgttaaatcagaaatagtgaactgatgcgagtggcgttggcaacacctagttgtaaaaaaaagagatggataacaacaaaatctgaaatagtgaaatgattaggatcgaggccaaaacgaagacagccaaacaaagtctttgcgggcctttaacggaaacttgagttataagtaatcagtacattatagtcttatactaaactattgtggaaaatcgaatattccatttcattacttaaaatgagaaagtttcaatataatattcgtacgtcctttcgataacgaggttttaacgatcttaattaaagtctatctattattgctacaactacttgtacctcttttcttttgcgtgagaattttaaaaactaatgtgtgttcattttacatatagatatgattaatacagattagatgtgtgttgattaacgcatatatgcactgccgcatataattttaaaatatgtcaggattgcttcaaaattaggtcttagctaacatgactgctggttgcctggtcatgtacaaattagatcaaaatcggcttaatttttttgttttttgaaagattttttttttaaaaaacggttgcttcaaaataacagattataattatttttcattttataaagctgacttcttctttttttttgcccaagctaaattttttaaaaattaagcaaaaaaaaattgtctctgcgaaggtgagagcatcataatgtgtccttacgaatgtcaacaaaaacaaaactgtccctatggaggtgataaatatcgtcaaccgaatagttgttttttaatatttgtaagtatattcatgatgtaattttgtcaaacgatcgagtagattgtgatagtactcaaattggtgattacctcttcatatacatagttgatttttagttttttcctgaatatgaaatttctatggataatccatgagaagactgattaacttccagagtcaaatcatatcgttttatcgatcgttacttcatcttcaaagcttttattcaaaaacaattaatttcgttacctataaaataaggaacgtgttaatactattttgtggccgtgcttaaaaagtcaacttagaccaaatgataatgttggtaatctactcatggattgagacctctctacggcttctggtagtttttgaaacctcgtttcttccgtcgacgttacgtgtaacgcagtcttgctttgaacgaggacgtttcaaaaacccatagctagaatatgatacttataccaattaagtaaacattcaaacaaagtctaatctctttacaacacaattcttttttggattttgattttaaccataaaccaaaaagagagagtctgattaagtgagcacaaaagtgaaaattttacattattgtgtaagagatttttttttttaaaagaaaaaatattcttgggcatgctattgaggaccgcccaataatgaccacaacaatctgtgatgttttatatttagctcgcataaaaactgtctttgtagtctcgaccaagcggtcgtacatgtgtttagtatttatttattataatagtaaaaaatgtattaaaaataaacatgaactaattaacctataaaatgtaactgaaaattattaaaaaccatattgatttcctttgactacttctttttatgccaataacttcacatatgatcactttaaaaccataacactcaccaatctttttgtttatctaaagttaaggcggattgtttagctctatactatagattatgatttttcgaagttacttttattaaaaacaaatctccaaattgggtgatgtgtaattgtttttaaaaaaaaacttgccaatctatttcaaactgaaatcaatatatgatcatccacaatttgtgtagtggatcctattcaaaattaacacgttcttaaattggtccgaccgatccaatcccaagttcgatcttatgataaggttttgttgagataaatgagtaggaaagtctatcatctcaaaacgtctttaaaatattacaatatataaaaatgtaacaaaacatataataataaatcatggaatcaaaccaattatctactcattactaattttgttcacaaactccaaattctctaagtgtcacggtattaggtaggttcgtattggattattataagtaactagattagaaaaatataagaaaaataaaatcaatatgatctgactatgacgatgatgccgcctttctcattactggtttttaattcgtactcgtgacagtgtgtgttttttctcttacttgatagtattacgttaattagttatgagttctcaattcaaacgttggcggggtacatttctagtattagaaacatatatagctttgcattgcatgtaaccaattcttcaacctcttaataatcagattctggacgggataagatcatttgtatcttttgcgtttaaatattagatgatctacctaccatcgtcttacgtattctcgatttttttattttaaaagagaccaaacatatatataataataaaatggtttggatctattatctatatatgtttccttaacaacttaattagtttaaggcttaagcacagttgacaaacatctaaaattttgtccaccagcccggagatttcatagttccattctacccaccaaaacaagagccctttcaatatatatagggctattcaaacatgaactttaaccccacaaatttttttatctattattattgaaagaaataactatgattcgttagatatcatgattctataattagttggacgatactaatgatattttttcgtaattagataaataggtaattttgtgtggatagttcatttggtgaacaaagttctcttgcatacaaacttttcactgggaaaaacagtgtatattttatcaaagtattatcaactataattggttccagatctctaaagattattataagatcaaaaaccttttctgtagtttttgtgtatgaaaaaaagattaatagtttagctagaaaacctttaggaaatcatcttttatgtagtcaatctgattatgtacacaagaagtcaataaactacccaaaaaaaaaagttcaccaatttcaaaatacttctatagttatatttcacctagaaatagcatcatgaaccaattatcaaaataagaataaacagaatctttattaaaaaaaagtaccccggccctttatactgtcttttgtgcaaattgatgatggtcgtatacagtgtgcgctacggcaaggagacgattatattgattaaaaaaacttctgcatacagtattgcgaagttaacgtcgacgtttgatatgtctttgtggatagcgattacatgtttaagtcaattgagtttaagtcccatagacgcgtttatgccagtaagattattaaatttgagaaagaaaaaatataaagggtagactagttacgatttatgcgtattcgtaaacctattattttcttgctatcacatttaatctgtgtccaatactttgtaccaagattagattgtagactgatttttttctggttattactgaatatcacactaaaatttgtttcgtggtcaaatcaaagcgtattagtatacacgtcaaaaagatagcacaaacaagaaaattaaaattcaaaattgagaatatatgacggcatgatcgttaccaatccattggttggtataaacatatatacttttcttttttgcttcaactacaatgaaattacatattaatatatttgattattaatttaaattaaaaaacataagtccccacatctatataaacacatcgattcaagactcaaatctcatcaatcaaaatcttcaaacacaaacttctcgtttctcaaaacatttggtcttatgatggcttttcgagcttatattattaactttgtgatcttatgcattctcgtggcatcgaccgtttccgggtacaaccagaaagacgtgaaagcatggtgcagccaaactccaaaccctaaaccttgcgagtatttcttaacccataactcaaacaatgaacccataaagtctgaatccgagtttctcaaaatctcaatgaaactcgtattagaccgagccatcctcgccaaaacccacgcgttcacactaggaccaaagtgccgtgacacacgtgaaaaagcagcgtgggaagattgtatcaagctctacgacctcaccgtctctaaaatcaacgagacaatggacccaaacgtgaagtgctcaaaactcgacgcgcaaacatggctaagcacggctctaaccaatcttgacacatgtcgagctgggttcttagagcttggtgttaccgatattgtccttcctttgatgtcaaacaacgtctcgaatcttctatgcaacacactcgccattaacaaagttcctttcaactacaccccacccgagaaagacgggttcccttcgtgggtcaaacctggtgaccggaaacttttgcaaagctcgacgccaaaagataacgcagtggtggcgaaagacggatctggcaattttaagacgataaaagaagcgattgatgctgcttcggggagtggtaggttcgttatatatgtgaagcaaggcgtttacagtgagaaccttgagattcggaaaaagaatgtcatgttgagaggtgatggtatagggaagacgattattaccggaagcaaaagtgttggaggaggaacgacaacctttaactcagctactgtcggtacgtatggttacaaaacaacaattgattaattttgtttattttagtgatgagatatatactatataatataatatggtttagtttgcaaaatcttacgtgcatgaacacaccaaactagatagcaaaattgaaagggatataaaaaaaacacgcacaggtcttgaatttaagatttggtctagaattttctacaattataggttaatatatttttcttgaaaaaaataataattggtccgtacagttttatgatagtgaaaagtcataaaacatataagtcaacgcagtttttttttaggtttgataatatcgtgaaatgagtcaatgacacataagctgtttattttttcccgtaagttttaccaaataaaattgtacaagatcacatattttacgaataattgatttataagctaattgtagttaaatataaatcttgacgattaatatatatatatatatatatatatatatatcctacttactaaaaaaaaattattcaaaatttcgatcataattaatcggctttctcaaaatttcgatcataattaatcggttttctcacattattgcagcggcggtcggagacgggtttatagctcgtgggatcacgtttcgaaacacggcgggtgcaagcaacgaacaagcggtagctctaagatccgggtcggatctgtcagttttttaccaatgcagtttcgaagcttaccaagacacactctacgttcactccaaccgtcagttttaccgcgattgcgacgtttatggaactgtcgattttatcttcggaaacgcagccgcggttctccagaactgcaacattttcgcacgtcgtcctcgtagtaagaccaacacaatcacagctcaaggaagatccgacccgaatcaaaacacggggattattatccacaactctcgggtcacggccgcttcggatcttcgacccgttttgggatccacaaagacttatttgggtagaccttggagacaatattctaggacggtttttatgaagacttctcttgatagtttgattgatccacgtggctggctcgagtgggatggtaatttcgctttgaagactttgttctatgctgagtttcaaaatacgggtccgggtgcttcaacttcgggtcgggtcacatggccagggtttcgggtccttggttctgcttcagaggcttccaagtttactgttggtactttcctcgccggtggctcttggattccatctagcgtgccgttcacttctggtctctagtgaatatatggtatgatgcaaagttgtatatacaacgcaattgattcgtctattacaaagaataaatattgtttgttacattatagaaactattgtataattttatgtattacaatcatttatgcaatttcatttttctgtaaagatattgtattctttctcatctgaaatataatgtcatatgatcgatgattctattaggtttgtttttttaactctagatgattctattactgttttcagttttaacaaaaaaaaatgatttaagtcgagtcattattgtgttgacttgaggcgaatgtcgaatattatggatcttatggcccattaaccttctccataacccaaaccatgacccagtgttatgttaataactaccctaagatatttcataaaagtgtataaattaatacaaattgagttctcctttgttaataaaaatagaatcataatggaggttttcattagattaacaaagaagatacccgaatataaagtttcttacatatatactcaaaacaatacttgttataaaaactatgataaaacatcaaagcaaaagtaatatataaattaattgggaacataacataaattatgagtttattgttcttaaaaagatgtaattatatatgtgttgatatatgtacgacaacatggaatatgtaaatttgaaccccttttttttgaactttagtgtaacccattatgttacaagttctggtcacatgtagatatatgatacattcatctaatggcctcatgcagcaacaagttggtatattctttttgtatggaccaaaaccgttaatggttcgaccacacaagcaaattaatgtcaactcaataattaaatcttaaacttggaccaatctataactcaagccaaattatagatctatcaacctatgaaaattatttgtctagttgcggatctgcgattaatacacctgaaaatgaaagatcccaccgatagataatatgcatattacaggtcaagtggagaaagttattccaagaaccgtggcatgtattatttccataacttagtttctatttacaactactgaagcagtgcccgagccggcacgtcgtttatcgttttccgttcatacatgcatgcattgattgtacggatatttgtaattaacatcataacatgtttggttcgtctctgagattacgattcatgttatgcgtaagtgcgtagattctcactaagtgtttaaataaatcagatttaatttcgactatgtatgtatgtgtgtgaacattttgaaaaatgtgtaaccagaagtcaaaaagtcaaaatatatagataaattagttgttctttcggatatcaatcgcatcgcgacgctcattttagaattgaacatctttcacgtcaaagtgtttcgtatccaaatcagacaaggcaaccacaaaagccaaaatattttgtcgtctaacctagctaggcctagccatacttaaatagtattcgaaatatatttatttgggtataagtagtattcaaaatatataattagttagtgggaataagcaagcaacaaacatatccttgcaattgatagctaaaaatcttgagtagacccatatagagaatagaatcgtgttacacttttcctttggtgtttcatcaccaatttccatttcatctttatatcaatgtccaaagacagtataccactaagtgtccccatgctaatcacatcattatcgataatcactattagactcttaataattatttacgttatcagcttactgtataattgagactatcacaagaaaagtgtaaagtgacaaaaagtaacaagattagaaaatggtaaatgaaagggaacaatatctacaaagaaaataaaagcttgaaaatcctaagaactatttccataattgtcttcaattgcggcaatgacggccccatggaaatacccgagaacttgaccccgatgcgatccgggtcttgacccgttcgaaatctgaatacagacaaggaatagtgatacctccttcgtggcaaaatccgtactctttttcggcttctcgaagcagctcaccgaacaaaggatggttaaagtaaacgatgggtaccaaaactctatgacagtcgccgtctttttgacccacgtagatagctaagtgtccccttggaaccgggtcggctttcttatgatcaacgggtatgtatgcggatcttctcgtagacctgcgtctgaaactttgcttgagacgttggccccaacttttgagtttggctaatggtctcatcagcatgcaagcttgctgggtcgagtgtatccggttgtatcctgaacgttggatccgggttttgcgaaagatccatcttgagactcgtctcccgattctaaaccctatgatcttcctcatcttcttatagctaactttaaaaaacagtttttgtcacaaaactacactttttgagagatctgagaggaaatagagattaagagagtgagacgagacatggactaacgagtcaaataaagagtgattcatttgaacgagaataaataaatatatcaatcttttttacattttcttgattttctctataagaaagaaaaaaaaaaagacaatttctagggaaaacacaaattcgaaaatgatgtgaacggacaaagaagaaatgctttcgatgtatataaagtataaacgttaaagaagaagagatcaagagaagaatgagtgaaagacaagaggtctttaaaggagtttatatggagtctaaataaatgaacggttagatgaagactaaggtctatgaccgttggattagattaaaactgccatatttctcttgcttggcagatagtccaaacccgaagaatctacattaaatatgacacgtcccattaacctttagcctacatttatcattatcactgaaacgttttgatgggttatcaatcacaaattcacaatacgaaaaaaaacagtagtgtcaaactattatggtattttagcgtgtaattcgttacgcagatattattatctatggttgattttgaatctgaaaatatgatctatcgaagaaaggcctgaaattattttattatctgaatatgttttgtcggagcttacatgcttagcatgtttgaacttcgaagatgaagacaactatgccaccacacgtgtgctggccaagtgggacaaagttttgaacctattcggtaacactcacacgagatcaaatccccaccatctcattttataatgtcgtttatttatttgttagtgatcatctactgttttttaataaggttagtgccctagtgatcatctacttgtctgtgattttgtaaaaaatatatatagaattaaaattatattacgagaacaaaatgtgtacggtgtgtcctctagttgcgttacttgtgtacgttgatgatggttgatatatatacatattcatatcaggacaaaaaagcttttaaaaagaccaataaagatagatctagttttgagtaattggaggattcactaagctttttggagctaaaatggtgaatttcccacgaatcaaatctgagaagagaagctttctatattttgagttactttacacaattacacgttcatttgtaaattaagatcgtgtttgtgctgcatccaaaaaattcttggaattttaaagtaatgaaatataactaaacaaaatgaccactaaaaaataaaataaaaagcacatgagagatgagtgattatactctgataaattagctaacaaaattatgtatatataaaaaaggttttatgcagtgtaaattgtacttacacacttaatcaaagcaaaacaaaaatattaaaccgacaataatacgtaaaccaaaaaaccaatattccttaaaatcaatttgtgtttccaaccgacaagttctttgtatatatggttaatcatattttgttgtagtccgtatcctagctaaaagacgtttaaacgttcataatggatatgacccacccagctggtgaagatattcgtttttcgtgatcatatatatatgtttctttttgcccatccctgtttctattaacccaagttaaattagctatatatgagcaaaaactatgagttgaagttaagcacaatttccgaatcacaaaaaaaaaacaaattgatttggacctttcgataataggaatcagaaagaagtttgttccaaacacttctcttatataaatcccaactcatcagcttcgtgtttccgtacagtgcgtacatatacgaacgtgtcactcggcttttaacgtcaacttaatcgagagcccaattcaggcttactataagccttaataagcccaatattaaaagtccctgattattgtgagcccaatattaaaagtccatgactatggtgagcccaataataaaagtccatgactatggtgagcccaataataaaagtccttgattaaaaggcccatcaccagtggagcgaagaagcggaggagggaagagggatgcgatcctctcgtcatcgctggttccatcagtttcagtgagaatcagatcgtcgttgtactgagagctccggcattggttcacggcggagctggagagttatctaagaacggagaggttactgatctgaattgttgaagatcggaaaatgacagaatcgagtctggatctgcaggaatctggttgggaagaacttaggcgggaagctcgtaaaattgaaggagatctagacgttaagctctcttcttacgctaagctaggcgccaggtttactcaaggcggttcgttcttcttcctttccgcttgatcatgctatctgtgtctttctttgttatttccattgctttgaatgttgctgttatgtctactatctgaatgtgggggttagtagtctgtaatgtgatatagatctaggaatcaatgttggatatgatctcttcaccgaattgaatttgatcgccattgtttgctcagtctatgttatgcttccccaatgcttaattcatgtgtggtgtttggtagagtaaagttaaaattggtaatgtttctctcagattcctgtcaaaattatttttctgtgaatgactaaggtaagaagaatttttgtgtgttaagcttactgttttgcattagctttcagtttttaagaattgcattgttgtatgtatcagatactgatcttgttatgaattatgagaaagtattgaaatgtgttttggtttcagggtatgttgacactgggtctccaaccgttggatcggggagatcatggaagtctatggagatggaaattcaatcgttgcttgagaagttgttggatattaatgattccatgagtagatgtgctgcatctgctgcacccacaacatcggttactcaaaaactagcaaggcacagggatatacttcatgaatatacccaggttttcttgcaccatatttgacttctttcctttctaagctctttgttgtattcaatagctatccccatcacgtaagtttatttgttatttttcgaagtttgaatgacattttggagaattataacttagtaatatatcggggatctcaaacttgaaaattctgatcatgctattgatgcaacaatcttcagctaaataattttggtgcattatgcataaggtagataagttgatagatgcctttgcatagaacaaagttttggtactcctatccactgtttgcgtatcatgcatcagtgatcagtgatactagctgagtaattgcagtcccattttgaaaaggaaaacccctttgcactagtgtagatttgtttagtgatacttatgtgtgttctgtagtaatatgaaatcatacgtattatagggcctattttttcattataatgatattttaatgtgaacttgtaggagtttcgaagaataaaaggaaatataaactcgttgagagaacacgctgagcttctgagttctgtcagggatgacataagtgaatataaggtaaagatcctatagcctcttagtttagaaaatgaatattcttattattggagatacacattcttctatgctcacattttgattggaagttgggttctgtttttgcttctgcaggcttctggtagtatgtcaccaggtgtgcaagtgttaagggagagagcttcaatccatggaagtatatcccatgtaagatactttctgtaatcatggcatttgtaatctgagtgttatattctgttaataatagcccactttgtaaggtaattttctaatgaggatgttatggagaatttggctgcagattgatgatgtgattggtcaagctcaagcgacaagagcagttcttggctctcaacgatctctgttttcagatgttcaagggaaagtaaaaaatctcggagacaaattcccagtgattcgtggcttacttggtatctctattcaacctctatatgatattctcaactaatctcattagccttctattatccttaagcaacttttggttttttcaattaataggctcaattaaaaggaaacgttctcgggacacacttatcctctccgctgtcatcgctgcttgtacgttgtttctaatcatctactggctctcaaaataaacagaatgttcatacacctaagctataaaacgagtttgccttgacatccctagatcgatttttttacaagttttttcttgcttttgtgtttttgccattatgttgggttatatgtttgtaggacaatattacaccctgaatcatatcgtaaaagtaaaattcgaaacatatatttcacaacatcaaagatccacccatgtgacttcattcaggtacttactttttattaccacacgcttaaattcttcaacattggtccaacatacaatgtggtccaatacaacacattatgctctgttttattatgttagatttttattactctctctttcccttagtttggtcctctcgaccacaatactttgtacgaaaaagtaatccaactcataaattcatctttcagcttacatttacatccactcaggtcataatatctaaaggcctcactctctttattttgagtgggtacacacttcactaatgatgatccagtcccttgtatttattttcctgtctatactcttatgtgccctacatatagtttcaagaagtgctaatcaatgtggttcgtaccggtttagagatattgtggtgggccaaagcccacataatagccaggcctgattgacttttctaagttttcgttcctaataagtaataactatatggtcaaattattgtggacctatcaaaaacaatttgggttagaaaaatatagatggatatagtctcgtaaaagatataggctaaacgaggaaagtaacaaagagttactccaacgtatgattcgttatctaatactaattatagtttgaatattgcttttggagggaggagattgtaatatattttagcttttggctttttgctttacattggctggacataggactaggaatcagaggctcttttttaaataaaagcttgtttagattctgcgcttcccaatgggagaccgtttcttacgaattttcagacaataaaacactcgagagaatcagaagaggttcagtttctctttttggttaaaagtgaaaaaaataatcattataatttttgtaaagacagttgatatgtgatgtctatagactatagtatagtacactaatcaaccattgaaccatcaccgatattcgattactcacggatcggggtatacaaacccttaggaacaatcggacttatgaaactcatggaattattcttcgtctacgttggtttaagactcataatttttccgtatataatttaccgagatttttatctgagatttgtaatggttaatattgagttggattgttaaatgcaacaacattcttatgattgtttacattttagcggtatattttttcgtttgtatcacatcacgtttgagttacgatttgcagatgatgttatgtcaaagagtaaatgtgtctttaatgtaattaaacacaaaatattaaagaggtaaacacatacataaatgccaaaaagttaaagcaagctatcgtcagtgcaatatacacattagtgtggttgaaatagtatggtcaaatttaaagtatttaatgggaaattatcctagtaaataattaaattgaagatatatagactattaaccataaactaatgaggttttattatgattgatatacgaggtgcaattctcgattatcttatatcaaaagaggaagtgcaggtcgtacttcgaagttcatttatcagagttgtaatcgggactcatcactcatctagtcatatgttgcattcttgcctttgattaggcttcgctgaaatgtaggacgtgattaataattaagcatcaaaagatttaataacataacaataatgaaacaagaatagaaaatacatatagtgggagagagagggattgaatatgtccaatttggcatgttgctgtgccctaacaaggaaatatgaggagagaaaagaatgcacgtggcagagagaagcctgcgacataaagacaaagagacggaccatagggtcggagccgaggagcctggacggtccataaacatgcttaacctattagcctacatgactctctaccctatccacctatgacctacctactctctctagctctccactccgtactcttcttttattttacttttctactcgttgcagtgaaaactactgtatagaatttaaaatacaattcatacacccatacatacataggctatgtattaaagggatcgcacaaaattaactctctttataatttttttgtttgtttttattatgtataaaaatgagtatttctttatctaatttgtacagaatgaaatttgtattatagtagttttcattatagttgttacgatatcacgatctgagttcgattgactaaaatttttcgtagttattaaatatggttttgtagaatagatgatatttttcagaaaaacatatagttttttttggtgagtagaaaaacatatagttgaagttagcctttctctctctgataaatttgagtgttaatgctacttaatctctttgtttcaaaaataaatgttttggtgtacacataaaacattaatacgtgaccaaagtatataatctagtggtttgtattagtatgggtgaagtatcaacatcaggatatttaaattcaagtaatttatattgttgacaaaatgaaataaaatgcatgtacatgtgaacatcgttctcttttttactcactttcagagtttgaacccactcgtaaattttgttttacccacactgtcgctctccttgatatccgagaatttgttactctataatttactcaggccaattatataagaattatgtagaaagcggaatcttacaaaaacccatttgctttttaataattgaataagattttcagaatcgtagtttttgtataaaaagaagatagaaaatagaactggagaaaccctatagtcttcatatctgatacctttttcaagcacagaataagtaaatgctttattcacacacatctatgtatgtatataggaatgtgtgtatatataaaaaatatgatactttgaaaagccattattctttgttctgcgcaacagcccatttctaactcatccctgccaagtagcaagcatagggcacatttttgtttttattaattttgtaaacaacagagtttctgatcttatagatgcgtacatacttttactattcggaactagaatggttcaaactactgtatatttaactaatacaagtagtactctcttctcaatgtctttagtagctaaaatgagtttaacgagtgaagcagaaatagtattaacaattgaagtgtactgccatgtaacacggttttagtcggtgctgataaatttgatattaaacgacataaaatttgtgagatgatattttaaaagttgtcaacatctgttgctatttcttatatagtaatgggctttgtctacttttttgtagtgaacttgattagtgtctataattgatctccaaagacaaatgatggttgacttccattgacactaatatttactttcagacatgtggggttcagtttatacctttacaatttggatgtttgtgaaaaaaaacaaaactaatataataagtaaaagatgatatattattctcgaaaggagaaagtccccagacaatctattatgcacacaccatttgaagaattaagttcgttttaattaatggatatcaattaattgattgaaacatcattggcaagttaattagttacttttttcgaaaagtaaaaaactgaaagaattatttcataatcatgcatatatatgagaagtggagagtatgaattattgcttcaattaaattgtaagtactttctcattagatgtacaaatagattgggggtttatggcaaaagcttttctaaaccaatcagaagagaaaagaatagggaaatgtcaatgtcacgcctatgatctcagaacacacatacatgcatgtatataaacatttaaatttccaatacatgtgtgtactatctctgcattcccatcgcccaaattgcgacaaaagtgtgggctaaccctaacattatatacgtttctagtaaagtatgatcagaccaacattttcaacgtttccttccttataaccaaaaattatgcacgccttaatactcaaaacttccgccttttatatttgcatctttggtcgaccttttaccgatataaccacctttttttctttgtcaaacacttatatgaccacttaaatgttattaattgtgaggcaataaatagtagctgattgcaatatttcggagcttgattcttcatatgttaagttatgctgaatttacaaaataatgtgtttttttcggtaaccgaatgttagggattgcacaaccatatgaataattgcttgtgagattacgaaatattaactaacttaaccacttaaatgttgtttgggggcaggaaatactagtagcaataacacgattgattttgcattacataatctaattctatgattcttcggatcgattagtaacaaatactaattaatattgatatacaagctaaggagttattttcaattggtgggacaaaacatatatgatatatgcattgcatcattttcgcaagtaggtgcatagatattttcttagacatctatacttgaaatgagaatggaatattatataaaatcatatgtaggtttgaaattaattacgtgtggagttttgctcgtggctttcaccaatatggtgttcctatatatacgtacatattcatggcgcttttaaaactatcattgagaaacactacattagtatattggctgtttcccttgtataattcttagttaaaaagagttttcttatccagcaaaagcaatacaaactaaaaataaaattgtaatctagaaaatagctaggaagataaatcatatagtttccttatcctaatcaatgaaattcggatacacatttgagagcgtgcgtaaattattaagtgataaatgccaaatattttaaaacaacaaaataacgatttaagttaaacggaaatataaaactagtatattgataagcagccggttaactcggaaattttaactacaaaaatagaattaatttactttcgctttcatggaaagtctagacttggatgattccaaatattcaaatggagggggaaaaaacaatcatataattgactaaaaagctaatgataaccaatcaataaaaatggagcatcatgtttatctctacatatacatacatgatacaaacaaacaaaacaaagtatgtttcaattgaaattaaatactaataattaaaaaaaaaattaaaaaaataggaaaggaattgtatagagaaacgagaaaaagtaatggcagtggtaattaaggaatgacaacaacgggtgaatgaggcgacgcttaatcactcccatgcacacgtccctttcttccccccacctctgccgccctctctctctcctctcttctcttcctccattgggaactgcgaattctattgtcaaagctttaaaacttttttcacttaaattttttttcaagagcttcgtcgtttcttaacttacttgcaaacacattacatgtgtcatcacgtgcaaccccaaccccaaagcctaagctcgcgaatcttctaatgtatgcctcaatcttcccttgttcatactagtactacaatatcttcttcctaagatttcaaaattgatcatgaagtggtttgtagtttagtggtcatcgctatattgatccaatctcatatttttgtcgaaagttttgtatagtagctataaatttgattctttagttagaatttcttgttctatttatatagaaacataaatgcctatagctattttcatatattaacatgtgcttttaattgtatagaccaaaatttaattgattgcaaaattaggtttgtaattgtttgagatcagatagaaaaaggtccatctttaagcgataatatcctcaaaactattttgtcatcagtcttgtctccttgtgaccacaaggtcatcttagaggtacaacggtatagatgcttaatgtctacgttttctagtaagggtgagaccgcatggtcaaccgaatttctaatataggcattatcaaaaagaaatcttatattggatgttgacaacaaagatttaataataactcgcatcatttgactaattaaaaattaaaaaagatctaagtgagatgtatatttttatcaaaaaaaaagaagtgatatttgtaaagaaattgtccaattcttttgtcaattaatattatgttcaaagtaatttaacatttgtttaatatctggatccacttgtcaagattatgcattttgtgataaataaaaacaaagagtgcggtatagtggtggtacaattcaattgttatgtggcaatacaatttataagaatatacggaaaaggtataaaaaaaactgtttgtgaaaaaaatgaactgcttattcaaatggtgtttagggtgtagttccgaaacttattaaaaaaactaatgtatgtttattttatcgatcataaattttattcggccacttgatttaatgaaaaattatataaatagttattgtcttattaaacaccggcatatttatttttatttggtttgtgttatctgttctacaccatccaaacttattccatttatgttgctggttcactaccgctgactctgttatactattcaaaacctaaaattgtatataacccattggagaatttctttaaagaatatatgtatcgctgaattgaaatgtataatacaccacattatatatatacacacagtattaccgaattaattaacgaaattaatagtagacgacctagaggctacaattagagcatttgttgtttaatttttaccctctaatatattaatatcccctttcccttctcactcctttcacctcttctctctctatatatcttcctttgtggtatataatacacagcaacccaacaatcaagaagatcagatcatggtggggttttttattttctccttatcaagaatcctctgatcagtcaaatacccatcaatcaatcaaatccccaaacactcccaaaaaaagatcagcttccaatatttttccccttcttacaaaaaagatgtctatgtcgtctatgtcctccccttcctcagctgtttgttcaccggaccacttctctccttccgaccatctctgctatgtccaatgcaacttttgccaaaccatccttgcggtacaaaataacctctcttcaatactttctctctcattttttctcctccaacttctcatcttcttgatctatacaagattaggggttttttaaattcattgtttcttttgtgtgcttataggttaatgttccttacacaagcttgttcaagaccgtaactgtccgatgtggttgctgtaccaatctcctttcggtgaacatgagatcatatgtcctcccagcttctaaccagctccagctccagctcggtcctcactcttacttcaatccccaggatattctggtacttaaacaaaattcaaatacataatcttatagggtctcatttagcttattggaagtaatctcaagcctcaaggatataaatattattgtaggaggagctgagagatgcaccgtctaacatgaatatgatgatgatgaatcaacatcctactatgaatgacataccatctttcatggatcttcatcaacaacatgagattcctaaagcaccacccgttaaccgccgtaagatactaattcttctcacttttatgatattaacttctatgctaaccgtgtttataatttggttgtgatgatgaatcgccattaagacatgcatagcttttcttatttaactttcactggatctcgttcaaaccctagcaccattgaattaagtctagaaggagattttttacctttcttttctttgtatactagaaggagacatgagagattatgattttgtatatttaaaatattcattgatccatgaactttagtatgtgttgattgtctacatatcctagatggcttttagcgttggtaaacattaaaatagtgacgataaaagaaacggggagatagattcatggatcccccggaaatctagctaaagagaaaaaatctatgtaatatgttagaagatgggcttgtctttaaaaaaacatgatgaagtgatgatgggttagagagagaaagtatttgtgtgagagagaaaaaagacaatgaaagtagttttaatgagtgtttgtctctttctgtctgagtttttgttttttcgctttgtctttgccgttgaatttcgccattgccagctccagagaaaagacagagagtcccatccgcatataaccgattcatcaagtgagtctcttatttaatttttacaatcattcatattctaaccataactgtgtaacattaatataattccttgtcacgtttttattttagggaggagatccaacgtatcaaagctggtaatcctgatataagccacagagaagcctttagtgctgctgccaagaatgtaagaaccttatttctcacatcccaaaaatttatattaaactgttatccattggttgaatcaaattttaataatcaaaagagtccttgataatccatatttatctctagttcaataaaaaaattatttttttaaacgctgaaaattctagttagaagtgatgcgttttaagtattctttgttttcctttactaaagaatttaagccattgatactactaacatcacaacttggtttagattgccggcagaaactagggtttgattttatctatgcgtatagttgctcttgtattagttgtatatatattaaacagtcatatatgtaggtatagctgaaattaggagtaaagaattttgtcgggttataacacaagttgatatgtgtcttgtacgtatgttgtttatgtgtaatgcagtgggcccacttcccccacatacacttcgggctcgtgccagacaatcaacccgtgaagaaaaccaacatgccccaacaggtaaaccctaatctgtcgacataccttacatctttaatgcatatacttttatgtaatatcatatatacaaatataatttcaattgatttggatcatatcttaaacatgtgtgtaggagggagaggataacatggtgatgaaagaagggttctacgctcctgcagctgctaacgttggtgtgactccttattaaagagataaatataatcgactaagtatttgaggaattgaaatccaatttcttagggtttatcatgtccaaaagttgtggtttcttttcctttcttgaacttatttatatatattataaatatgcatgtgtctttttctgttgttgtaatcaaaaatcttgctaattaatggggtttcttaagttaattttcatttgtagttgtataattaattaacttatcaaaatgttttcttattattactgaaagccgaatttgaaatttaaataatcagacttttttaatagatttttacaccatcgccatatgtaaaagaaactcaaaggaaattacaaccaccaattaatccaaagctttttttcctccagaatgaatatatcacaaaaatttaaccgaagagaaaacaagaggggaatgatcatattacatttcaaaattcaaactaaactaagaatggaaatatgcacaagcatttgcttcccgaaaacatgtaaaacgatgtgattctgttcaaatttctccattcaaaatctgattcttgagattgttgcatatggttcaatcttattgctcccattaatggttttataatagtgatatggtataattaaataagaactggggcatgcatcaaacgacaattgttgtcaaaatagagggaaattaaaagttaagataaatttatttcgtaagatcaaaaattcagtgatagcaataagctaatctaaaagtgtatatcagacttaaatttaactcgtctttttttcttttggtgcaatatagagcggtggatataagtagcaaatcaaacaaaaatgacattaggatatgagcaagcatgataaataacaaaaaaaaaacgttttgggtcaagtgactatatgttatcaggcctactagaattcggcccattaatattaatgacgagtttccttagcaatcagtgggcctggtatacaataatgcgatgataataaaatgatttaaatccttcttttttttttctttttttttttggactaaaaaatgatttaaatccttagcaccggatcccaacggaaattgcttctcagaatagttttcttcagtctccgactatatttatttcattttccgatcatcgtactatacactccccaacatcgagtaaacaagcttagttgtcaatttacgagttccaaaagaagaatccaacaaaacgcagtgtttcgttacttctagacccatctaatttctacgtgttgtatgcaacaatgacggctttaccctttcgctttctaatgtggtccatgttgttctggacttataggtccatatgggcctatgttgggttggataataattaaccaataagagaccacgtagagaccctctaaaccaaatagaggcgttgaagcatgagcacgaatagaagagcgttatgattgaatgtcatttatggacgagaggagaaatactaagaacataaaatccattaacaagctcaagcattacatcaaactcaatattgagagaacaaaggttctatcatgaacaagctcaagcattacatcaaactcaacagtgacagaacaaagctttttctcacaaaaacaatagataacagtagaaacaaacatataaaaacatagcaaaccaaagagatttttctcttttaaagtctcaaatcttcaagaacattggaaaccatgaggaactttcttgccacaatagttcaacagcaaggttagatcaataggaacattgagattaatccccaagacattggctttaagagcggtgcagagacaaaccgcagcttcaagattagcaagaccttgaagaagtgtacaacaaggagtctttggtggagaaccaacaacaacgttaactaggcccaataagtctgcgcaaacaccaagcttaagtgtgtcggtaggacaagtgggtttcacggcaggagccttcttaggcgatttcggggtttttgggggtttaggagtagttggtggacattttgtggaggttacaaaggtgaagaaaagaagattaagtgtaataagaagagctgtaactgcaagagccttagaagccattgtaacgttttgtaatgttttgggatgaatgtgaaggagagatataggacatggtttatatagaacaagttattactaattacatataccgagagataaaatagcatgtgagcgacttaagaaaattagagtaagaaacaaaactatccagctagttggcttttgcaacttgaggtcttgaaattgattagactattttttaggaattgttaatttatttttctatcacagaaagggaaaagacaagatttttgtcttgtttgtttgtgaaagaagaggctccacaaactttgagacagagtgtctctctgggtggtatgcatcagtttgatcatagttgtgtagatccattatacgttgttgataagatattgttttacattgcattagtccccattcctttagatttttttatgaatgatagatctttcagcatcaaccgattatatttccaaatgcaactggacaagataatcccaaaaacaaaattcaaagagtctacatctcatcattactcgtttccaatatttggtttggtctagtttatccaaatttgtaagataccttctagagtggtccgtttagtatccaagaaagaattcatgtagtagcatcatcaaatgataccagtctaatgaatgaaatctttgagggagaaagaaagccacacaaacttataataccaaaggaagataatattataagattagtctatgtacattttaacaagtgaaaagaagatagtaatcacaattatttgagaaatgataaatattgagaacaaactatacacacaaattgaaagttgggaagaagcattaaaacgtggcggattctcagaggtcagagattagattgaagaagcaccgaatgtgttctcgccactgtaagtgatgtaaaggaagccatcttcgtctttcttatcctcgtaaacgcttgacattagctctcctgttggaggaagaacattgtctacgaaaatgaagatagctttctctgcacttagtttgattctcttccgaatcacatacacaaattgaccaactgttaggtctgatggcacaaggtacctgcatttatcaaaatccagaacaattccaaaattacatacaagtcttgaaaacattgaacaaataacaagtttaacatgatcaacaaaaggtacttacttcttcttgtctatatttgggacttcacttttctcagccttttccacaatcacctgcaaccaaactacaatgtaagataatctgaatcttgtagaaaaaacaaacagtattggattctcaaacaacgaagctaatgttctgtaacctaaactaaatttcaccacgaagattcatgatattgtttgtgaaaccgaattc

SEQ ID NO: 379 - DNA, 91854 bp, Arabidopsis thaliana
gaattcatttcttcattgctccatggattgaccaggttccattatttcattactaggtgatgagagcaaaccttcggttcaaaagttcttccctgaggtatctgataaatgcttagaagctgcaaaattctcaagcaacaggaagaatgatataattgcaagaagcagagaatggaagaatatgaatgttaatggtggtttgtttcatggtatccacttttctccagacactgttcttcaaggtattttacctttgcaaccttggcttatcgtcatttcatagggattttcagacatgaccttctgggtcttatatcttgcttcttcgttgtagaacgtggttgttttcgtttacaaggagttgaaacagacaatgaaccaggaaggtgccgaagaacagatgggaagaagtggagatgcagcaaagatgttttgtctggtcagaagtactgcgataagcacatgcatagaggtatgaagaagaagcatccagttgatactactaactcacatgagaatgccgggtttagcccgttaaccgtggaaacagctgttagatcggttgtgccttgcaaagatggagatgaccagaagcattctgtttcagtcatgggaattacactgccccgagtttctgatgagaagagcactagcagttgcagtaccgacactaccattactgacacagctttaaggggtgaagacgacgatgaggagtacttgtctttgttttcaccaggtgtttagaaacatagaaatgttgtcgaggttcaaatgatgtttttagtttcaatctaaggatctttctgtgttagatgttagaagaagtcaaatcacaaaaaaatatcgagacacgaattttagctaagattatattgtgctgaaatgagataatatatcacatggaaagtgcttttgctaaacttctaagacattagtctcataacattaaattacatataagctacttgtcctgactcctgagattgggagagaatacatcaaatatcaattgaggcacacacacctttcggatctgcgttcttgacaatccatggatgttgcatgatcttctcaatagagagtcgtttggagggatccttaacaagaagctgcaaaagatttaaaacaactatatgttaatgcttaataactagtcaagcaagagagtcgttgtgggtatgctttagcttggttgggtgtgtacctgactgataagatttttggcttcttctgaaacattcggtgtaagaggaaaactcagatcaatcttaagaattctgcatgacagtgaatacaaaacgtcatcaggagctgagcttctgtaattttctacaaaagataaaaagtctagtcttttcttacctcttgaatgtatctttttgactctcggcttcgaatggagggttaccgtagagaaactcgtaacacagtatgcctaaggtccagttatcaactgcataatcatgatctctattttctaccatctcaggtgctaagtaatccaaggttccacacatggttttcctcttgttacttgactgaactgaccatccaaagtcagcaattttcaatctcccctgcaagtatatgacaataccaatgatgcatatcctgagttctcaatgcaaaaactataaccatacacacatacctcatgatcgagcaacaaattttcaggtttgatgtctctatgaatcacacatttgccatgacaataggccagtgcctgactgagacttgcaatgtactgaaataaaggaaaagccatcagtttcatcacaagaatcaattgagaagcattgcacaaccaacattgcaacaaagtgaacatttcaggcaaaattgggattaaaaggggagagggagcgagagagagactcacagtggcggcttgttgttcagtaagatgaccattctgtttgagcacaccatagagctcaccaccatgagcatactcgagaatcaagaaaatcctctcattgtcatggaaccaaccaaaaagacgcaagatatttgggtgccttaaactcgtttggatctccatttctctcctaagctgatgatgaattttatacttctctatctgttccttgaatatgactttcagcgccactatgtacttgctctatatcccaaattcaaccaaaacagcaattgattcataaaattagggtttcgatgacagtaaaagctcaaactgaacgaaatttctaccccaatctaacaattacaacataatcgaaaggaaacgagtaccttggcttctcgggcgagatagactctgccaaatttgccttttccaagtggtctcccgatctcgaaatctgccagggaccattgcttctcagtattgccagcgtcagattctgtcgatttcttactcatttttccgatcaccgtactgctaacgactcagacgacggcgagaaagcaagagcaagagccttagttttcagaggaagttcgagagagaaagagagcggagataaactaaatttgaaattctaagtccctgcagaagtaacagacccattcaatacgcagcgtttcgtagtttttaattccgagtttcacttttatactaacatgacgattgtaccctctacgctctctctaaatttcgaaactgctactcgacaatcacattacccatctcttcttttttgaagagtatataacattttaattgttttgttctgttttttgaactctacatcatataagtacaactaccttcagcatctttcgtttatttccttttaataagttttaggatgtgttggttaaattagtttaagcgatttgtcgctttgatgcttatgagccggcgtgtttcctttaaactgatgattacagattttgatttagagaattgcaatttgtgttgaagaaatgaagtggtttccgacgtttattaccatagctttgagctgttatctctttgtggagcttcaattagtttatcccgataaattcccaaaaaaatccatgactgatttcattatctgtggtgattctttaccggaattgatgctcggacgacgaaagatgttatcagaatactttggttactcgtctaacacgtgttatgttgttgacacgttgtaatcgatggagtcaaaatgaagttttcttcttgcgtcgacaattctcttttgggtctgttagatcttgttaacatctgtaatcgggcttttgtagtccagtttgtatgtctcgtttctttaatacaatatttcacttatgagaaaaaaaaaaaaaaaagtacaactacctaagatttacaacagaaacaaacaatccaagaagaaattcaattagagccaaactctgagttccaacgttcaagctcttcccatttgcttttactcaagcttggtctgatcactgccattgatttccgaaaatcatcatatcgtagagatcttacctgttacatggacacatctgttgatcaaaccttttaaactcaaacacacttcaacattaatttgagagactgagaaatttagtactttatttgcttggatcgttagaatatttgcaccgagttctctgattggcatcattgcagcttcttcacacaatgcttggagatcgcttcctgagtatcctgtaacatagggatagcttacgcttatcagttacttgacttatgaatctgtgtttttttatacaaagtctatagagcttgccttcggtttctttgacgattttatcaatgtcgccatcggataacgagtgaggctggcactttaatttagttttaaaaagtagttttctgacgttggaatccggcaatggtacatatattctcttcacctaacaaagtgataaaatcaaatcatataaccagatactttcctagcaattggtggacaagaaaaattctgatgacaataatgttcttaccaatctcctaagcactgcatcatccaactcctgtggcttgttagtagctcctgcaaaacattacatcaaagtaaatttttaggaaaggaaaacagactatatgtaaactgatactccgagatgttaaacagaatgaagattgagtttgatgtggactgatttagcagaaatcataccaatgataatcaccaaatcatcaggattagaagtcacaccatcaaactggataagaaattctgatttcagccttctgcttgcttcattctcactggttgaccttgttgacattatactatctatctgataaccagagcaaaaacatattcagatctccaagtgacaatatgttgatatgaaaaagatcctttttcagggatctttaggtcttcagtcaaatacaacttatatggtattatctagaactctggtaagagtagttcttcccatataagacagaaaaaggaaaaagtgtgcatacttcatccataaatataacagacggttgtctggatattgcaacttgaaacagcgttttaactagcttttcagcctcacccacctgaatcaatacagtaaagtcagtttgtctattcgaattgacaaataaattcaacaagccttgttagttattacaaaagacagtacagtgacagaataagcacacacccattttgatgtcaaagaagatgctgagacattgaaaaatgttgcctgtgactcagaagcgactgccttggcaagcattgttttcccattgccaggtggcccaaagagaagcagacctaacaaagaagttactttaccaaggacggcaatggagaagataaagaagaaaccaagcttgaaatgttacctctcgctggtcttcggagaccagtgaacaaatctcttcgttttgccggtaaaattaccatctccaacaaagcttgtttagctccattaagtccagctgcaataattaagcataagcttgtttccacatactgcgccgaaaaggaaaaacaagaagaagagcataacattgacactcaccgacatcatcccatttcacagatgggcttctatccactattgttgtatttatcatctcaaccaacttatcatcatagacatttccagattctttcacaggttttgggcttgcagcagcatctttagggttccttggcgttgcaacgccacctctggcaaccggagtcttttgcgataaagttttcctataccttgacgctgtagaggaaactgaagctgaagaaggatatgccaccgtcctctacataacaaagaatcaaaaaaagaattgaagtatacaattaatgccttaaaaatgaattatgttaagcaatcaataccaatacagaaacatatcactaataatctacaaacatcacattctccttccaacatttatgaacaaaaaagaagcaatacattaccttattctcagacattccaacacctaaaatatgaacaccattgatgacagaaacaagtaaaacaaacaaccattagtgtgaattcacttgtgcttcttcatattaatatgcaaaaaaggtcaaaaatttaaaactttatcacctgtacgcttacccaaagcttgcaatctctcagatacttgattttgccaatttgaaatcttctctcggtacgatctcaccttctccttttcactaccatatcattcaacaaatcatcatcactacaactttatttttcaacataacatatataagtcaaaacaaacttatcaaaacctggaactaatatacgaaggagaaggagtagaagtagcttcattcatgatcctttgagcatttctataatgaagaagagcatcatcatgtaaaccccactcttctgctctaacccctttagcgatttcctctttcgctaaatcgaagtatcctttaagcttatacgcaattcgttcgttagtaaccggaactccatcgataccattcatggactcagaagaagttgatgatgatgaaacactaggatctttcttagattcttcgttgagaatagagctaaacgaatcaattatacctctgaggaaactcatatctaagcaataaacaataaaatcgatcatcacttccgagtttaatcaaacaaaaaacaaaaaaacatcaagaaggcaaaattggtttcacgcaccatgttgtgctcgtatatataactcatgtcgagaagattcgaatcaaaatcgaaatcaaatccagcgaattgaagaaatttgatgaaatcttatgaactgggaaatacgcaaacgatgaacaaaccaaacaacacacggtcaagtctttaaccctctacgtagaaagaaggttctaatgggctttacaaggcctatacatatataatcttaggcccaatgatattttatcggtggcccagttttgttttgttttcgatcatcttcttcgccgttaaatattttattctctacggtaccttttgtctctttgtactttcagatactatcgttgacttcgaagtaagaaaagaaaatggagattttgacgagcatagctattacagtagcaacaacgatcttcatcgttttgtgtttcactatctatcttatgatcagaatctttaccgggaaatcaagaaacgacaagagatatgctccagtgcatgccacggtctttgatcttctcttccacagcgacgagttatacgattacgagacagagatcgcgagagagaagccgacttacaggtttttgagtccaggacagagcgagatattaactgcagatcctcgtaacgtggagcatattctcaagacaagattcgataactatagtaaaggacacagtagtagagagaatatggcggatcttctaggacatgggatctttgctgttgatggagagaaatggagacaacagaggaagctttcgagctttgagttctctactagagttttaagagattttagctgctctgtttttaggagaaatgcatctaagcttgttggttttgtctcggagtttgctctctctggaaaagcttttgatgctcaagtaagtttcgaaacaaaacaagactcattatttccaaatttggaaactcaaggatgccgttttgtattgatgtaggatttgttgatgagatgtacactggactccatctttaaagttgggtttggtgtggagttaaaatgtttggatgggtttagcaaagaagggcaagagtttatggaagcttttgatgaaggtaacgttgcaactagttccagattcatcgatcctctttggaagctgaaatggtttttcaacattggatcacaatctaagctcaagaagagcattgctactatagataaatttgtctatagtctcattaccactaaaaggaaagagcttgctaaggaacagaacactgtgagtagttctattaagctttatcttgttaaagattgcatttactgttggttaaaccttttgaaaaatgtttaggttgttagagaggacatactatcgagattcctagtggagagtgagaaagatccggagaacatgaatgataagtacctgagggatataattctgaacttcatgattgctggtaaggacacaaccgctgcactactctcttggttcttgtacatgctctgcaaaaacccacttgttcaggagaaaatcgtacaagaaatcagagatgtgacatttagtcacgagaaaacgaccgatgtaaatggtttcgttgaaagtattaacgaagaggctcttgatgagatgcactacctccatgcagccttgtctgagaccttgaggctctaccctcctgtgcctgtggtaaaataaccagtctttaagagactcttctgtgagtgaacattttaagatttttcttaatctttcttggtcctcccaaaggacatgaggtgtgcagaaaatgatgacgttcttccagatggacatagagtgagcaaaggggataatatctactacatagcctatgcaatgggtaggatgacttacatttggggtcaagatgctgaagaattcaagccagagagatggctcaaggacggcttattccaacccgaatcaccattcaaattcataagctttcatgtttgtacactcttgctgacaaactaagggatcaagagtaaggtattattttctaatacctgagatgttttatttctttggctatgtatgtaggctggtccaagaatctgtcttggcaaggatttcgcataccggcagatgaagatagtatcaatggcacttcttcacttctttcgcttcaaaatggctgatgagaacagcaaggtgtattacaagagaatgcttactcttcatgtcgatggaggactccatctctgtgcaatcccgaggacaagcacttgagtacttaaccagaatactttccatacttttatagtgcctccatgagttttggtaacattctcaataaaggtggaacaagacaccaataacgttccatgtaataaataatctgcctttatagatcttgggatgactcaactatcacatatattagaatccgatgaacacgacacgatattgtataattttacagtcacctagtacaataaagcagataagtcgcactgtaaacaaaaaaaaaaaagagtacattcatggcatatcttattgcatcatcacggcaggaatcggaacacctggtctagcggtccatcccttgcgtgatctgtaagcatcgatggcttgtaatcgcagcctctcctgggaagcacttagagtagactttcttgcctgccaaattaacatacatataatcatttgaaccaatagcacaatctctttcctgagttttcctaacaaacaatagcaagactatataccttcggaacaacagccaacttaagtggagcttgcacaacatcaccaaatcttatctgttcatgcttggggaagttttcacggagggtatcttcagtctttcctttattcttcttttgcttcttggcctcccaatacctgcatcaaagtagaacagtcattaaacacaaacacatgaccaacaaagatttagccatttaagagaaatgaataaggcttacttcttcttgcgttctttccttttagaccgaccatcaatctctgcaagttcgttttcaaaacgaagatccgtcatttgatttctcttcctctttttcttcttcttctccaccacactatcatctccatcactctcctgatcacacaaggttgtgtaccctcagctttttaatccaacacatttctaattctaattgaaacttccctcaacattaatcaattcatatcattttaaagttgttctatagcacaagagtcaaattaatatctctaaattacaaaaccccaagttagaaaactataccgttgcaggaacaactacttcagctttcttaagcttttccttcttctctacgacttgtttagtagaatctgaaggaagaacattacaaaacaaacagtcacagagaagaaatcacaacaacacacacacacacacacaccaaaatcgattctattcgttctaatttttaccatggggagaaggagaagtgtagttcatgaggatacggagcgtagaaggaacatcatcttgcttcgaacgatcaggcggcggcggaagtctcgccggtccgccgtgagcagctaggtaatttttctctctcctcttttttcctttccctcccatctctcgctctttctctctctaaacaattaattctagaggtccagacctaaacttgttttcttaagcttccagaaagagacggaactcggcccaggtccatttacttaggcccaatattattatgtaggcccatttatttatggcccaattacattaaatactaactaacttgtgtcgaaacaaaacagaaatcagagaactaataaaacatatagatttacaaagtaaagtaaaaaaaagttgaatctctgtttttcgtctggtcccatagtgaatcgtggctcagatggcttcctagggtttgtggaaatcggagaggggaatacagatttgagatgcaaagtagctccagctccggtggtgacgaccttgaaaagcagcagcagcagcagcagaaggacaagtctccccagaagcagagcgagtcagccaatgaatcgaaccacctcacaatcgttgtctgcaatggagattctagtcgggaagaattggtgggtcagatcccaccggaaaaggaggttagcttatccagaaacggaagctcgcacgagcagtgcagggtttgtctacaagacaaagaagaggttttgattgaactaggttgtcaatgtcgtggtggtcttgctaaagctcacaggtcttgtatagatgcttggtttcgtactaaaggctctaaccagtgtgagatctgtcaagttgttgctgttaatgtcacacctcctgagactcaaccaactacaaactattgggtttggaggattgatcctagctatagacaagaagagcgtgagagaggatgctttagtccgctttgggttgcattttcgattctgatcggtggtttaatgcttgatgtgttgatatctatcacacttggggtctctgcgcttccggtgaacatcattattggagtcatagttgtgcttgggctaggaacagctctaaggctgactttggagttctgttatgagtggagcttgagaagagcggttcacagggcggtgcagagggcggaagcgaacaacttcagtaatattgcgtacccacctgccttgtaggggggaaactatgtcaagttaaaaactcgtgtgtgtgtaaaagttgtgtgagacgtgtagaactacaatgctggatttgttgggaaagaaccaaaaaagagcaaaaaagattattacgagttttttcaatgcatagttaaaagaagtaacttcgaaacaaaattgctatgaataaatgaatttatattaaaatcatcagtgagacaccatttatcacacacgtataacccaacaaacaaactcaatgggggagagaaaaaggaagcttcggtgtgtgtatacctcaacaaactcaacaagcctttgatatctgtaaaccatcttcacaaaaactatggaccgacgaaatcagaacaaacaaaaatatgaaacgggttcactttactgggactaaccaaacttacatatgttacagacgaacaaacatgtccacaatctgattttaagatttccacggcttgctacacctttgacttccccgagtattcaaacatgagattttccttgccgtgagtttccgccattctgtatcagtgaggtttgattcttttctctcattcccacccgagcttcagcatctgatccaccacctttaagcttaactgcagtgattaacaaacttcctttgtcaaaaactatgtacaatgagagaaaatttgcgtctttgataaggatactgatttgtatggagacttggtagtaaatcatagcaactgaggattctaaccctaaacaccctctaattttgtagtagattataaacttacagccggatcagtgaagattatcaattgtttatcttctgtggaaactaagaggttcgtgttgtcaacgttcagagccagtgcggttatatcctggccttgaccaagctttagcacatggaatacctacaagacaaagatctcaggttgtttcgaccagcaaatgaattagttgatcttttcacggagttatgataatacctgtagtgtgtataagttgaggaagcaaattgaaggagatggaacatccagtctttcaatttctttgctatctttcgatgtatcattactactcgaataatccgagttggaacatgagttcatccctatcaaggcattttgaccatccatggatatttccatgcaaccaacgctacaaaagaggggaaattttgctttggcaatcagaacaccgttaatggtgaacacgctaatagaaccttctgaactactccacgccattataaccccatccgatgaaatgcagagagaatctgccttcacaccaactaatcgtctgatcagccgtccttttctaatggaatgcaatagaacatctgaggactcagaagacgaaacaacgactccttggtctgagctgacacaacaacaaactaattctcttcgatggcctcggagcacttgtataggcccttcaaggcgacattttttgcctttgtttgccaacgtattggccagattcgtgttgcttgtggaggaaggcgctccagagccagttgatggctcagacacgcttgttcgagaagtaaacgccttgtgaattctccatagcaaaacagtactgtcccgtgaacccgtcacaaggaagttgttgtctggagaaagagccagacatgtaacaggggcacagtgcccaaaagctgtttccagagtttttgccccatcagatgagactagcttgatactattatccgcatgtccacctataattaaacacatgagtcccataaatatatattaccaacaaacttgggatcgtataattgcttgcttattacctgtgattatttccccatcgctagtaatagcaatcacggacgaacttctgattcctgatgaggcaaatgcttgtgcctgaggaaattgccagtcaccagttccagaactagctggacccttgaacatgcgcatcaatgatccactagttgaagttgttgttgccttcccgtgatggaagaggaaaggagtaccttggccatcaggagtgtttggttgccacttgtgctgtgcaacacgagctgctggcacattcatgtccacaatcacaacactatctgaagatgcctgaatggctgaggctggtaagttgcagcgctctggggtttgaacagtatatggttttatttcttttggatttcgaaaaatagtctgcatatgtaggacatctttcaacggcatcctcttcatgtgaggaactgtcaacagctgggatggtgtttgcccaaaataagctatctggtcttgtgtggcacgttgttgtaccttcatcaaacattcacgggcaagtcatgtcagcatgttaatactaaaactgagcaaccccagcagtacagaaaaattgccttaccgggtccgtgatcttatcaatatcaacagtcccctcgtaggtaatgtagaagaaaacgttatttgccattatagcttctttgccacgttgcttatacctgaatgaaaaaacaatttagtggcttacaaagacacttgtgaatattttgctgaacacactaagtaaaaggagaaactaagttatggaaaaatgtgctgacagtatatcatcagttcaagggtgaaaacctacccaaatatgagatcaatccattcatgcaaatgagcagatacatgctcgctctcaagagcccttcgttgcttgtgtacaaaatccactgggtttttggcccaaggaggaagttttacagcatctaatagataaaaaaaccgcatcagataacaaaattctcaccatgccacgcataaattttggctatgacaaggaaaagaatcacaataccaagcttttctcccaactgtgttgtaccaaagtcaatcgaattttcgttggtcagcacctcagggaggtaaaacaactctggaacctgtaatttagtggctaaataagggtaggctcttgacttgttaaggaagaggcgaataattaatccattcgatgttttatggagaccaatacgtaccaattctttcacatcactcatgtcttcaagaactccattccaagtgcctggaaagtctgaaaacatgcggtctgcatgatcaaactttccaccttgaagttgaattgatagggttgtgaaaggttcaactctggcaagataatacaacacctgcgcacatgaaataaatgataaaatgtcgaaaagtgtacaaactccatctagtagcataaaaacagtatccattgttttctgtccacgattcagggaacacaaactttaaactgggaatggcagtaattgtggcaggatattatagagaagagaaattactgctccagcactcgagtaatgtgagccatagtggaatttgggaataactggatcttcgaagctagaataccgctcttgaaattttttgagccgctctgggttcaatgcaccaattggctgaacatatacagacccacatcaaaacaagattctctaggtttatgatccatcatatgcagactaagaacgtaaaattggaaacaaactgcaaaggattccaccttggaaagatctctgaaggtagatggatttgaaaggtccagactttctgaactgttgtcagaaataatccacgggaaaacaggatactgcaaagaataacatatctatctatcaagcaagtaagggcattgacaagttcaccaggaaaacgtaaaagagcacaagatctacctgagtaatgtcattgtaactacggccagccaacgtgttaagctgcattaagtattcaaaattgctgatctgcagatattatccagatgtagatctttctgtattagatgttattcttggataaggataaaaattgcatgacaagcgtgagtgtgcagtgtagttggtacctcccatctagcccagcgctccattaactgagttcttctcaaaagctgttccggcctctaaaaaggtaacaatatttgtaagtttgcagtacagaacgaaaagtagctcagcctagtcatttgcgttatcaatcccccattgaagaaaaatatgaaccaagagtaattcaaaagttaaagaaaataagatagtaaggataaaacagaaacctgagttgctaggtaaatattgtttaagtgaggaggccttgcttgcacgatagctcgatatgcatttcttcttccctcagtattctatgatgtaaaacaagcaaattgggaaaagtaattgattacagcatgcggagatttacaaggtcagagagataaatatatcatacgtagaaagagttttagatgcagataccccaaaatcaaagaagaagtttgaacggtcaaccataaaaagttccagggcactccttctcaggagatatctgagaaagaaataaacaaagaaattgatcatcagtcatatcactaatcccgaataaaacacaactcctacagaaagagtaaaacttaaccgaaaaaagtaatattcagcaaccaaggtatgaaattttcatctaaatgacttgttggtgttgggtttgtgggcaatcaaagtgcttcaaaattttcatttcactctgtcagggagtgcattgaacaacaataggtataaactataaaccattcctgattttcttttagatgaaaattccatatcttggttagataaagataaaagttccagatactaagcagataaatcatctgaaaatattaaaatgaagtagtgactagtgaataggaatatatgagctaaacagaattttgatgatgaaactttacctccggctataaatctgatgaagagaagacattggccaactacgatccttttcttgatcacctgattgggactcatctgagtgatcagccaaattctggctttctctgttgtcaacaataaaatttattctccttgttgtaatctgagaaatgcacagcaggtataatcagcaatccaaatgtcatacaagaaaagcatatttggaaacataagccaatttctggttttctatgatgtctacatgccacaattcttgacttcacttggatctaaccaatctaactaatctagttgattatatccaatttttcctctcttttcatgttagctacttgtagaaaatccaaaacattcaggttggtctaacatacttgaaaggttcctttcacaacccttagtggccggaccatagatgttggaagttcaagaaggatcctttcatcaagttcactgggaacaaagccaggtgctactactgaagaatctcggaccatttcaaggtcatttgatgttcgaggatcactgtttcctgctgaagttctggatgcatgctcatgtgacccagatattctcccttcatcccttttatgttcttcagcattacctttgacatcaagctgatcaccctctccatgttcatcctcttcatacgctatttccattaatattacttcagcagcaacaacaggaggatttgattgagaacccttgctaccattatcactttttgtttctgtctgatcgtcataatctgctgctgccccgtgatgatcagtcccagaataattcctccttatagactgtctcatcctcgaaaagctttccatagaatcaagtttccagaaaacctgcatgttaaatgatatcacattactaagaattttcttaacatgtttcaatttttctttttttaaacatggcttacgcgttcaggactgcatattccatctccaaaaggcccaaaaaagcatcgcatctctgccaagtaacgaattagttttcgccaagcacggcttcccaagcatagacggtttgccgctatgatatcatcttgcatacgcctatcaatctggtgagaagttgaaccaaaaatgagactccagtatgctcacaaaaccaataaaatgtgacataggtggaaaacaaacctctgatctttgcatgttacgtgctaatgcaaaactcgcaacaagtacagcaataaatttgtaggacaaagcattaaaatcttttccataaactgattttgtatccactggttggagacattccatccacgccactcccatagcttcagaagtgttccatctctgtaaacgctccatgtcaccgatattcctccgctgtgcagatgttgccattgcaacagcgctcagacctcttcctgaaccaatctttgcattccgttcaagatctcgtgcggctgccaaagctgccgcctttgcagcagctttgtctcttggtcgaggtggtgcattgttgtttggaggctccagtggtttctggaagcttgaaaaggtctgaagtttcgcagtcttacgctcaagcattgaagagtctcgcctaagatgtgaaggtgtaggaggtggtggtgcttcccaaccagctgcccctgcagctatcattgccagagacattgcagcaggcggtgaagcaaaagcagcagcccactccggagtaaccatagaaagagcaccctaaacagacaaatttggatagctcaatctaataactcaagcataacaatattggtatctcatcgactagaaataaacagtggccaatctagaaacatataactatgaaagcaactgagggaatgcaaacagctttaagctacctcaacggggagcgcatcagcagccaaggcacgatcatcaacgacaaggggattcataccatcagcagtggcaagttcatgaatgcccgccaaaagtggtcgccatctccggaggactgcaataaatggtggtacaatagcctctatatactgcttacgaagtggtcttctgtctctgctgatagcatgccatacctacacagatttgttctggaatcagaaagcgaagaaagacaatatgtatacacgaaggacacttgacggcatcagaagaaagacaatatatatacacacagatgacaactttccaatcgcagcatgagatttgagaccagaatatcattaaacatgccaatctgattatggaagactaacctcagaatagagaacacatgcagtaaccagtactctctgcctctttgaatcggatattggcatgtttatgataggagatagcacactgtgggataaggaaaaaaaagtcaaacttctcctaataaacagcagacccaggccaaatatccattgtggaactaaaagattaagcattagataccatgttataaacttctgtgcaaataatccaatagaaaatactatatgagatgtagtcatcatcgtgaatgacccacaaacgactaatggacacaactgaactcagagcatcatagtgtccgcaccagattacgatggtgcaaaaatgctgaaacaaagtatctaagcagatggatatctaattgtccacgaagagagaaacaaaatatttcattgagtttacctccacaataaagctgatcgggattgtcgcatagacatctgagaaccactatctaatgtaactgaattccctgaggagcgttcagaacttagatttctcatcaacatattatcttcgccatagtcttcctccctcatagacagaagcaccatccgcagcatacataagaaaggctgatcactgtccagcaactggtagagggctgtcatccctcccatccccgtaccagatcctccacctattccaaggccacctccgagtccagactcatctaatagcaaagcttgaagcatggatacagattttttaaccaatggaagttcaatccagtttccatgagcatctttttctaaagtagatttccaggagtctgaaccactgccaccaccaccaagtgaactgggtttagagggaaggccaacaccataccacaatcgactcctgtacttccaaccctcagccaaatccatggcacagctgccatatgaaacaaaagcacatgaaacagattcataaggctcagctgcagaagcagcagtaaggcgctccattgcgactgcagaaatctgtccacttgaatcagccattgatgcgagtatctgaaaaaagaaagaaaaaattacttgaattttcttagcataaagaacatggtgtttacaagaatcccaaataacaaattcaaatctgatattaaaaatggcatgctcgtaaaagatacaatgaaaataaaaaagaggtattaaccaacaaggatacgaattaatcaggacataagagaaacatgaacagatcaacagcatacaaaaatatgattatttctaagcgtgatttctttaaaagcacttgatcatgacaagagaacctgagaagcaaaatattggaaagtctaattcagagaaattaggcatttgagaatgttttccacttacatctaaagggactttccctgaatcacttgacagtgaagcacggctgctagaaatctctgatgattctccgatcgctgtcagtgtgcttgtacgttttttaagaggggatggagaagcaactgcattggttgcacaagtctgtttgctttgtgaccgcaaatgatcttcgacaagcatcaaaatcacgattgcattttccaccagaaaaacagaaagctgagcagcattttctgctcctgcttttgcatcctttggtgctagaccctctgcagcaacaccagcagctgctgcagcaataacttgagtctgttgagggaaaaaacgattgtgtagataaaaatctagttctatcccagtataacaagacaggcgaacacacaccacatgctggaatggataatctgatatcaccaacaaagctttacagcattgttttcttgcaagcaaactccctggaaatttatctatattgtgcattcgtaagaaaacagacactctacaatttcctttatcaagaacttaaatagccatttaatagctcactggaaaaggtctttcaaggaaaggaaggaattggcgatctatggaactatggaaggcattaagaatcttaatttcaataataagaagaaaaatctatataataatatataaaagacaagaaaaaaaaaacgcaaggaatacgttacctgagcttgcagttctctggcagcaaagtctagcaatccaccaaaaagtcgtcttttaaaaattggtagtgactcctcacgccttcaaagagtagaagataagaaaattttgacagacttctctcatacttctcaaagcatatgggaagagacactagcgtacaatatcatcagctagagaaagtgactaaaaacgacatagttcaaaaaaccaaaatagatgacagtgcaaaaggcttgaaaaggtgagaacgtcataagtggctcaagaaaaataagtcattcaaaaatgtgaaaaagaaaaaaaaaagatgaagaggtacatggaaaaaaaaatacctaattctttgctctccagtgctggaaccaccaacgatagaaagccactctgcacaatgaattgtagcctcgatatcctgggagaaggaaatagatgatgcaagtaataataattgaaaacaatgttgctcgaagagggctaaagtgtaacccaatagacagttaagacaaaactttaccttccaaccatctttctggcgcattgaatgttccaacattatgatcaagaagttgtgaatcatatcttctacctcacaagaacccactgaagcagactgcttccctgcatccttctgtgtacactcaaaagtcagcaaaattggcagagctgttggcacttcttctacaacttaccagctaacaatgtagattattcactctttaagagttgcgcacataactcggcgcagttatactacaacaattaaaaggtttaggttctaaggttgatgagtacctcatagttcgagatcagtatctccaagatccactcaggccactcttccattgttgtcagactgcttctattttccggatgactgcaagccaaaaaaagaagatcctgacatacaaacagaaaagagcgagatcagaaagtcattgaatgaagaggaactggacaggtgaacgctttcagaataaaaggtccagacaactaatcttaagttttattatatttcatgacagctgtttggaaacaaaaatggtcataatatttcctagtatagttatactaacccagggttcagaatatctcaagcatctttacaaggacatttgttccttgacacacagtcgggaaatatttcaactatgagatatacctgaagtgctcggctttgtagagccttagatgcagatggtagagaccgcaggaggactaacaaaagttgggaatgttcaaagcgatgacctgaatcgtaaaagttaaggccatcttctgttgacgaagcattgatctgcaagaaagtacatgtgatagcaatagttttaacttcacaccaaaatcttcaagagtaattgatatagaccaattatattgctggcatatgaatttgaaccgcacaatagccgtagcaaatcatgatagtcaatatatggtatcagatagcatttcagagagccgttttgaaaccaacttttatcaaagttacacacctttgtaaaatttcaaaaaccaagtagaaggtttgaagcgaaagaaccatgcaaaaacaccccaacattttctatatataagaaacgctatatgctcccacttctttctacccaagtcatagtaagtacaaccatgaaaatcagaaagaaacccaatatacttttcaatcggattgttagtaagaaaaattaaacaaaatgggatatcaagaacatgccataccgaggccccaagcaaagttgtatagacgttgtcagtcatcagcctgtttggagcagcttgaaatgccttcagcaaagcaaatagaagcaatgcgactttatcatcaaacattgttccaccattttcatggagcccactacccaggatgttacttgtcacatcagaacgggcatcgaaatcaaatgttaggtgcccactagaaattaaagcaccaatcaatctgatgatcccaaccacaacagcatcgctattgtcaacattgtacacgttatttcttgcactatcagcacttattgaaagacttataccaccaatttcagctgatagtctctcagtatttatggaattggagatggaaactgagtcactatcacaaacgacaggtgtggaaccatgctccttttcttgtcgaactgactctggtacattcagagacccaacattatcatcctcaacagaatttccatcaggaccaggaaggtcaaagccaatctcattatcgtgtggattggaatccaactgttttaccgaaccagactcgttgtacggactcttttcacttggatcagtcgatgacctttttccactcctacccatagctaaaacattatcctcaccagttttagcttctctctgcagcagaacaagaagtgtttctataccaccagacgttataaatacctctgcaaacatctgagctcttgcagcattcggctgtacaaccaacctatacataaggtgtaataccctcgcaacctaagaatatcaaaaagttggacgtgtcagacagcacgtatttttcaattaatttggtaattgcacctaccaacacagacgagtgcaatctgtaagaccattctctcttgaaatgacccacatttcaccatgcagaccattataagatggttttctagaattcatatacataatctgactacggaataacggaactagtttaattagtaatagtgcaagcaaactacaaacggcggatgcattggcattgaatttgcaatgaacctaagatattagaagtgcaacacacttaataatcaacaagaatatgtcactcaagacaaacaatactggaatagggagtatacaaaaattggaaaaagaaactaacggttggccactaggttattaatccaaagtaaaaaagaattttacttctccattttagttgtttaattgaagggaaaaacagttcttacctgatttggctgtgggctgtcaattatgaaaccaagtaatcgacggaggtcatcagcagctaaagaaggagatgctgctcccattagaagttcaataatcaccagaagttcatcaatcagagcattgagttcccccatttgacgcgtattcccatcaagaggaaaagtggtctcagaatccttctcagaaatcatccaatagcatcttcgacagccatctagaagcaactgaatagcttcggcatccctcatagctgttgcttcagtgaaaaccatatcttgaagggatgacaatagcttcttttggagtccataattgcacaggctccatattttcaaatctaataaaagcgtacgaaagagctgcactttgagaacatgattgatcttctgagattggcaaagcgaaacaatggcagcaactagctcctcttctcctactccatcatgcttcctgtcaagggatgcaagtgagtgtagaagataactcagaattctagcaagaatctcgggtccctgagtacgacacaactcttcattgttcccaggatgttgaatagcgactgacataattctaaatacaggtgcagcaagtgtaactgtggacaaagacagtggaagatttccaagacatggctccaagctatctttatgcacactgcttacggtcaaaggaagcagggacatgggtcctccataagctaaggcccagaaagactccactggcttcattctcgttgcaacatggacttgtccaaggacctcagctggtcgccttagagtgccttgacgaagaaaaaaaaaagtaaaacaaaaagattagttcaaactatatcaaaactggaaatgattgattccgattctcgaccagaaacaaaatgacggaaggaaatcatgaagggaaaagaagaccacagatagagagaataagcaaatcaaagtacataacaaatcaaccatgacaatctgatagcatatcaacattcatgggaattgcacgttttcacttttaaagagcatttgataagaaaaaaggagtataaatatacgcacctgctgctccagaaagtgaagcatctggacaaaatctcccacttagcagacaagggtggtaaagcaggtgggtatatcctccaatatctgcatccaaaatactactttcttctgccttattacgtacatagtcatttgtagctagccaaggaaggcctgccccattgccaaaacaaggcaaaacatctccacctctagacgccaaacgcgccattctctcaggaccaatcggttccttaaatatataaactggtcccatctctgcaaacaaaggacattgacgacggcgacgttgtagaccagccatagtaggaggaggatttgtgccaatgcaacagaaagaaaggggcttggatatacgaggaaaatcaaaaggacgactttcatacaaggatccatcaatatataatcgtagttcactctctgctttccccagaagtccttgcttgcagctatgctcaagaccaataaaataccaacattgaggcttaaatgcatgagtaaaatgcagcgaagactttcttcctttcccactaccactctcaaccaccagaaattgagcgtggaaatatgcttctattccctgattatcagcggacaaaaagctgaacaaacgtggcatatgagcagtgccttcaccagcaagcgcactcgcagccgctgcagctgacattgcggatgttttccctgacttggctgctgcggcagcagcaattgcagctgccgcagttgcagcatttaatgtgtcagcaaatgattcaatatagatccatgttgcaaatgcgtagccattggtaaagggccaacgactttctccgggaccaagtaacccagagctttcaccatcaaattcaaaagtacaagcaggcccccttgattcctttccactcattgccttctccaaagcaagcatcaacggacttgaccaggctgttgtaattgcggcttttataacttgaagccacctgtgtaaatcatcgacactaagggagtgcccggctaaatgttgaatacatagtagcaaaatagcagcagcattccatttcatatcaacgtccttggaaattatcgcttccactgatcgcaacaaaactcctaataaccctgccgtggaacacatagctctatttctcgtgcatgaccgtaaaataacaagcaaaccccgaaccatgcgagtcctgggggacataaaatttacgttatcacctaaaccaggaagccaaggaataagctccccagaaacaatagcagcacgggaatttaacatgacactaggagggttgctatcttcatcctcttcaaaactctcaactccacccatggtggcaataagtgaatcaacaacaaggaaagcagtggcctctgactcctctccacagccaaaattctcaataccacatacaacattctttagtttgtctaagctttcaggcttccccatgatggctgaatccacaagatgcagtagctctggagaaacatttggaacagtggcctttggcttgggcttctgcggggaatgaacaggggaatatccagattctggatggtggacagaatccagactagtttcagaaagggactgctgcatggaataagctgcctctctctcaggtccagggctagaaagtcggtcactttgcacatcgtccataggcatgagatcatacatctcctgagtcccggataattgataagtaactacttcagtgccaccaaatgaagacctcccatgatcagaatttgaaaagcttccaggttcctgaaggtcaccctgagattcattcgcagccttttcctgatctcccagagaaacttgttcaaaatcatcatccttaaaggctctatcagctgaactgatcccttgcaaagtcgtatcaaatgcctctatcctattgtgcaaaggattagctatatcagcttcagggagctttctttcatcatcgtcttccattctataaacttatggagagtacagacattcacagcgttttctcaccctccacctgttacacagagcaaaagttgagcttctgagaaaaatgcatctgacactgatgaagatgagaactaaagtcgacactgtgattgaaccaaataaacctgcaaaaatgcatctgaaccaatgatccatatatatactcacttggatctactaaatttaacatatacagcatcaaaaatctgcaaaaggagctcaaaaatcttcagaaaacaatcaattagaagattctctgtcagatctcagagaggatcgattttgaaaatcataagaaaattacattccgagtgtatcatctagaactatgaaaggataaaatgcttatagaaatcaatgccgggagagagtacgcacggatcggaccggagaaatgttcggagatgatgaaccaatgaatggaagcgaatcggaagctcaaacaaatctggacggaatctctatccgccgacggcgcaacgagagcttggaagacggagaatgcgtaagattccagaggacgacgaaagtaaagagaggtgagacgacgatcggagagagactagcgaaaggaggcgacttgggcgcgcgggagagagagaaagaagagaagagagattgtggttttttactgatttgggattttagcaacacataaaagtcaattaacactaaagttttcatttaattcctttttaagtattttgctattcatgtcaacacaaatttatttctttttactactctcagtaaagtgattcatttatttacttcaattttttcccaacagtaaagtgattcatttataaatctttttttttccaacaatttcatttacagtataaatctttatcttagacattagacaaggatgcaaaaaaaacaaaggtctaccatacacaagtgtttaagaaaaaaagaaaaagaaattaatattttcttaacctaaaaattaataataatatttttttacactaaagtctaaaccaaacaacaaatcatctttctattttttctttagcacaaccatcaatttagattgataactagtcatagtaattttttaattgaaaatttgtaataacttatgggctttaaatttacctaaaagatatacataggcccaatacaaatctggatactggataccttgacttcttcaggccttacccatttcataagaagaaaacttttaaccgagagaacacagcgttttagatgattttgttttatttttatcacaagggtttgagcaatttaaacaaacagaggaaagtattacaatggctaattaatggtctgtttctttacgggaatggcatataacgtgttggtcctgtgtaatgtgataccaaaggtctcgtccatatccaagtcctctgaaacgacaccgttaggaagcttccagtcaaaggaataaagaagagaagcaagcataagagacactgttttcacagccaaaggcaatcccggacatattctccgtcctcctccaaacggtgtaagctcataatctctacctttcacatcaatatctttccccataaacctctctggctcgaactggctcggattctcccatacgcttgggtctcgtcctatggcccacacattcactagaacctgagtatctttaggcaccatgaacccaagaacctccacatctgattccgcttttcgtgggactagtagcggagcagccggatgtaacctaaaagtttccttcacaaccgcttgtaaatatggcaatcctgagatatctgactcttgcacaacactgttttgacctaacacacgatccatctctgcctgagcttttaccatcgttttagggtttctaagtaactctgccattgcccactctagagtactagagcttgtatctgtgccagctgtaaacatatcctgaaatacaatcatatataaataagtgagcttgacattgtggaaccgtatataaagattcatgtggtttcatctcaagacattgataaaaagaacataacattgcgaaaccgtattcaagatgtctttatatgatcaagtcatatttttgacatttccgtctcaagatttgttggaagattgcgagtaatgaaatttcatctcaaaacgaatgaacagaaaattgactacaatcttgattatctgcaagctggtagaacttaccaagagtaggtgttcaatatcgttattgtcgagctctgcttcatctccttcgttgaggatgagaagcgaatccaagaaatctctgttggaaacatctttagagtaattccctaatgatttttctgctattttagcatccatgaacccacggaaaaccctaaacaacctctccgtcagacccctcattgccttcctattaccttgtaggtcaagaaaccccataaatggaaagtagttagcagcgtctggtttcccagcagcttccatggcaccaatcaccgtgtcctgaaattcgttggattttttcgagtcatagctaccgagatcaaccgaaaacagaatgttggatatgatattaagaactgtggtgtaggatgcacgagaaatatcaactgcttcttttctctcgctgctttcattcatgaagcttacaagctcttgcactttcttcatccgcagagctttagtggcttcggtacgctgcggtgagaacatgagagtcactgacagttttctcaacatcctgagacaaatcataacagcgatccattatactctaattggtgtctttgttacgtttgcgtttatgtttgaagattaacaattggaacacctcaagacaacactctaaagtttttactcgttacaagcgtcaataaaccgtaatttcgactaagattgtatccaaaaacagttgaatttattagaaaccgacaaaccgtaataaaattattaattatgtttacgtacaaatacaaaattttagtttaaacaagcatttgaaaattgttaaactaaatacgaagtggtaaaagaaaaatgaaattaggtttgtacctccaacgagcggacgacggaggaagccagatgacggaaacttcttcgtgaccaaagcaccgtatagagtcattggacttacggccagacaagatttggtcgtgtgttcttagtacttctcttgcagcttctggtgaagttatgacgactgagtttagacatccaaacttaagactcatgattggtccataaatttttgcgaggtcagcgaatgagctgtgcgggtttttaccgacttggtgaatgtttccgataatcggtaatcgtggaggtccaggaggcagcgtggcggctcggccagaactccgtcgggatcttgcggttgtcgagatgaggaaacatgatgagataaagcaaaagaggagaaacagagcttgccctgagatgatgtccatctgtgtttgctcaaatgactaagcaaaatcatctaaacatatcttcttctttttttgtcatctgaaatatatcataacatagatttccatatatgttgttgataaaaaagaattgtgtatcaaaactttcgcttacatagcaatcgtaagttttccaaattttatcaaaaagaattgtgttaaacagtaacaaaagtcaaagatccggttttctgttaaacagtcgctatgctgagtgagatgagccaaacgattaagaaatggaaacaatttgagtttgtgttttgaaggtgtaaacatttgcaactctcatttgttgtatacactaaacaattattttaagtgcgtatatatatataattgtatccaatgaacatatataaataagtaaatgataatttcttcgttatttccttagtcaattaaatgacaagatttaggagaaacatcaagtaaatgataatgaggcggaaacctatatgagtaaatgataaaattaacatttcattattccattgatgatctgcatcggtttgcagaaacttcttcgtttccttcctagcctaaaccgaggaccgaagctaggcatcaatatggatacttttgacttcttcaagctctagccacctcaagagagagaaacaaacaaactctagaaccgaaaacagatagtttttggtaataaacaaagctttggagattatttctctgtttatttttaattataaaaccacgactaattaatattggcgcgtttcttgacgggtacggcatgtaacgggttggtcttatgcaaagttagaccaaaggtctcgtccatgtccaaatcctccgaaaggacacccttcggaagcttccagtcaaaggaataaagaagagaagcaagcataagagacactgttttcatagccaaaggcattcccgggcaaattctacgtccggctccgaatggtgtaagctcataatctctacctctcacgtccatatctttccccaaaaacctctctggctcaaactgggacggattatcccacacgctcgggtctcgtcctatggcccagacgttcactagaacctgagtatctttaagcaccatgaaaccaagaatctccgcatcggattcggcttttcgcgggataagaagcggaacaggcgtatgtaaccggaaagtttccttcacgactgcttgtaaatacggcagtttggagatatctgactcttcaacgataccgttttgacctatcacacaatcgatctcggcctgagctttcgccatcgttttagggtttttaagtaactctgtcattgcccactccagggtactagagcttgtatccgtgcctgctgtaaacatatcctgacacatataaatcacatgtcagtgagcagctcgacatttcggttccgtatataaatattcatgcgatttcaactcataacattcgagtacaacatgatcctgttgtataaaaatgatgtgatattaaagttttaaaaatgtctttctatgatcgaaacatgttttcactcatctaacatttgttggaatactaataaatttaaagattttcatccacaaaattgattattccattatcttataaatcatgattatctgcagtaaggtcagacttaccaagagaaggtgttcaatatcgctaatggagagttctgattcatctcctttgtaatcgagaaggttgtcaacgaaatcgttttttgaaacatctttagggttattctgcgatgatttttccgcaatcttagcatcaatgaacccacggaaaacccttaccagcctctccgtgcaaaccttaaaagtcttcacattaccttgcagatcaagaaacctcagaaatggaaagtaattagcagcgtctggagtcccggcagcatccataacactaatcaccgtgtcttgaaccccattaatagaagctttcgcgttgtagctaccgagatcgacggaaaacagaatgttcgatatgatattaagagttgtgatgaaggctacacgagaaatatcaacagattcttccctatcgctgctttcacttatgaagctcacaagttccttcaccttgttcatcctcaaggctttcgtggcttcgatacgctgtggtgacaagagctgagtcaccgacagccttctcaacagcctaaaacagagcataacaacgatccatcaagaacattactgttttagggtctttattgccttttaacaaaaagaaaaacgctcttgtagcaaatctcgtaagaaacaaaatcctaggaaaatagaaagtcgatattgaagttatacctccaacgagcggacgacgaaggaagccagacaagggaagcgtcttggtgattgatggaccgtaccgcgttagtgggactacgggcagacaaaatctggtcatgtgttcgtaaaacctctctcgcagcttctggtgaagctataaccactgtatttaaacttccaagcttaagactcatgactggtccataagtttttgagagctcggcgaatgagcgatgtggatgttttccgacgaggtgaatatttccgatgatcggtaaccgtggaggtcctggaggcagcgcggtggccccgcgggagattcgtccagatcttgtggtggtgaagataagaaaacatgataagataaagcaaaagaggagtaacagagcttgccctgagattatgtccatctgtgcttcttaagcggtagaaaattatccaaagaaattacatatatataatatttgtagaagacaaacaaaatatcttcctggttcagggaagatatataaatatttcatttttataattgaggagagtagtagccacaaatttggtccatttactttgtttgtcgactcccccggcatatacaataaataatgtcagtgatcggttccgaaattcctaccagtggcgctactttagttttggcagaagaaatcaaacaaatatgaagatatttttttatatacaacaaaatagcaaaatctaaccaactaattattttatactatttggtttggactcttttctaattaacaaaaccacattactgttcatctgttaaacctcacattaatttcattaattatactattaggcagcttaaccatgtgtataggtgtacgttactctctttatttactgtttagctgtatttgttctgatgttaggttaagttgctcgacctggtttgctcctttcatgtgcatctcttgatatttgtactttaaaaaaaaaaaacttatattaaatggcttttatatttggtttggactcttttctaattaacaaaaccaaaatttctcaaaacccagcgtagcaaataatttgattttttaaaataataaaatgaattttatttagtaaatgccatggaaatatcaaaattaaaaaacctattttaaaattttgaattaaaaacttgaatactaaaatctacataacgatataaaaacaaattgaatatttgaaatttctaacgactaatgcagatacaaaatccggttaatttcatatcatattgcaaaaatcaagtttcttaaaatccgtaatattaaaaaaaaaaaaaacttcaaaacccaaatttgattttaagtataatatttgaaaatctgctaaaattttttgaatgaaaataaaataaaatgggataggattaacagttcgtatgggctgaaaattctgttccttttgttgggctttgttgtgcaaaagggctttgatgatgtcatcaatccaacgccgccaggcgccacctctctgtaaatgcaaaagccacactcttcaccggaaacgcaaaagccacctcctcaatctctctctctctctctctctatcgccaattgattgctggtccttatcggagagaagctccaacatcatgactccgaggcctgaaattccggcaacatgtagttcgtctctaacctaatcgatattttttattctgtcactctctctctctctagccatctccgtcgtcgttctcaggatacatcttggtcgaagaagagtcaacattaacttccatcgctcaatttgtcgaagagcaacgacaaagcaacaaatcaaaacgtcgaacaatttggagccaaagatggatcaacaactcatgaaattcgaagatgaaatcgaagagagaatataggtaaacgaactatagaatctgaagaatagaatcgtaaaatcagagcatgaaattgcatcttatgtcaaccgataagaaaagcatatttgtactttaaagaaaacttatactaaatggctaattacggccacgtttcttgacgggtacggcatgtaacgggttggtcttgtgcaatgtgagaccgaaagtctcgtccatgtccaaatcctctgaaccgacaccgtttggaagcttccagtcaaatgaataaagaagagaagcaagcataagaggcactgttttcacagccaaaggcaatcccgggcatattctacgtccggctccgaatggtgtaagctcataatctctacctctcaggtcgatatctttccctaaaaacctctctggcttaaaccgggacgaattctcccacacgttcgggtctcttcctatggcccacacgttcacaaatacctgagtgtctttaggcaccatgaacccaagaacctccacatctgattcagcttttcgggggactagtagcggagcagccggatgtaaccggaaagtttccttcaccactgcttgtagatagggaagtgccgagatatcagactcttcaacaacacctttctgaccaatcacacagtcgatctcagcctgagctttcaccattgtttcagggtttcgaagtaactctgccattgcccattccacggtactagagtttgtgtctgtgcccgctccaaacaggtcctgatatatatatacgtatcttttaaagtcttgatgatatttgatttattttaaaagttaattcataagattctaatatcctacaaaatatatagtaagtagacttaccaagagaaggtgtacaatatcgttagtgttgagctctgcttcatctccttcggtaagatcgagaagcacatccacaaaatctctctcccggacatctttagagttagtatcccgcaatgatttttccgctaatttagcatcaatgaacccacggaaaaccttaaacaatctctcggaacaagccttcagagtctttctattaccttgcagatcaaggaaccccagaaatggaaagaagttagcagcgtctggattcccgacagcttccatgacaccaatcaccgtgtcttgaaacacaccggatttattcgagtcgtagttaccgagatcgacagaaaacagaatgtttgatatgatattaagagcagtgatgaaggtagcacgagatatatcaacagcttcttctctctcgctgctttcactcatgaagctcacgagttccttcaccttgttctccctcaacgttttcgtggcttcgatacgctgaggcgagaagagctgagtcgccgacagttttctcaaaagtctaaataaaacaaaacacaaaccattactcaacaagcctaattaatatgaacaaactaacatgtcgaatattggaatcacgggatttaatttgactaagaaccaacatgttcaaccaagaaaaagcggaataatatttaatttttcttattttggtcatgaaatttactaaatcgcaagatcctacacatacttatagaaattcctcagaattattaggcttaaatcaccgaatcatgttgacaccgtttccttaatatataaaataatccttcggattaccaatcagaacacttaagaaaactgaaaccatataaaactaaaaaccgatattaattatacctccaacgagacgacgatggtggaagccagacaacggaaaccttgtcgtgattaatggaccgtatcgagttagtgggggtacggctagagaggatttggtcgtatgttcttagaacctctcttgcagcctcaggtgaagttacgaccactgtgtttaaacttccaaatttaaggctcatgattggtccatatgtttttgagaggtcagcgaatgaatggtgtgggtttctaccgacaaggtgaatgtttccgatgatgggcagtcgcggaggtcccggcggagatggaacgaccttgcgagagctccggggtcttgttgtagtgaagaagattatgaaaaatgataagacaaagcaaaatagagggaacaaagcttgttcaaagatgatatccataattttttctcaagtgatattttctttcaaatgagtgaattatcaaagcttcaaaagccaacttaaatacgtaaagatattcgtgtagtaaatatttcacaaatatttcttacttatggtccaaattacatcctaccggtagggtctgaatgaaaccaggaggcgccacttgtcagttaaagccgagcagtaaagttgtaattgaccgacgaccattcacaagagatacgtatccgtgaatgagtgattatatgtcgatatcaaatggcaaatgtctttttttgacctacgcaattcaatcccggagacgataaaacaccttatcaaattgcattgtgtttcctctttcttgactttctaatattaacatttttacttgaaacataaaaagcagtatcttttataatttcattctcttcaattattaatattgatccgtacacgaactttatattgatacgattattaataagaagacgatattgtaggtttcttgacgggtacggcacaaagagatttggccttgtgtaaggtaagaccgaaagtctcgctcatgtcaatgtttccggggacgacaccgttttgaagcttccagtcaaaggaatagagaagagaggcaagcaccatatgcattgtcttaagagccatcgagattcccggacacatccttcttcctgatccaaacggtatcaactcgaaatctctgccttttacatcggtttctcgtaacaagaacctctctggctcgaacttcattggattttcccacacgctcgcgtctcgtcctatcgcccatacgttcacaacaacctaatctcgagaaacagaggtggaagattttaaccaaaccaaacttttttattggtgtaatatctcaagtaatgaatgttggtgtaataaagataagtatgagaaaaacctgggtgtttttaggaacaaggaaacccataatctgaacatcggattctgattttctagggatcaaaggagctgcaggatgcaaacgaagagtctctttcacaattgcttgtaagtaaggcagactcgggatatcagattcttgaacgaaaccgttttgaccaatcacttgccgtatctcactctgtgctttgaccatcttctccgtgctacggaataactccgtcattgcccattccattgtactagagtttgtgtctgtgcccgcaacaaacacatcctgtcacaaaataggtaaactgatgatatttgcatccaaacaatatcttaatcttaccattggtgtgtgtgaaagacttacgagaagcaagtgtttgagatcattcattgttaattctgcttcgttttgctgtgtgagatccagaagggagtctagcatatcgatgcttgaagcctctttaggctctttctctgtccgagaaaatcttttggctaatcgagcatcaatgaattcttgaaaaaccctaaacaatttctctatgcagagcaccgcttttttccgggtaccttgcaaatcaagaaacctcatatactggaaatagtctcctacgttgggtataccggcgatatccgtcaggtgaaccactgtgttgtgaaattcgtaagacgaggagttagagtcatacgtcgctaaatctactgaaaacagagcatttgagatgatattgaaagatgtgacgaaggaagcacgagccaggtcaatagcttctcctctctcgcgaaattcatttactaaactcactagttcctccacctttctcattcttaaagattgaatagcatctaagttttgcggtgataacaaatattttgttattgttttcttcagaaacctgacaatgcatacatacagaactttaatggagttgtacgtagctaatcacttcacgtgtgtatagatttaaagttttaaattgaagtttagtacacggatgatatcaacacaaagagagttaaaaagaaatgaaatgttgatcttagatagagttagtacctccaacgagcagaggggggaatccagacaatagaatgtttatggtgatcaaaggctcgaagagcgtcgttaaaggttcgagcggacatgacatggtcgtgtgttctaagtgcctctttagctgcttctggtgaagatataaccactgcggttaaccttccaagcttcaaactcattataggtccgtacgttttcgaaaaggcagcaagtgaacggtgaggattgaatccgagttggaatatgtttccgaccaatggcagtatcggaggacccggtggaagcgtgccggtgctagagcttctccgcgtttttgcggtagcaaagaagaaaaagaataatgttaagagaaaatagagaggcagagacatgccttgaattagtgagaggtccattggacgaccacttttttctttaggttctactctccttgtttaatgaaattggagagtgcctagaaaatataactcaatcatgcattttatatccatgaatttaagttttttttctaatgaatttattcacaagtttaaagatattatctaaaatggagaaacaagttctcaaaaactgtcaatcggttgcataatgtatatgtttattgctgcttataacacctacaaactatctgagtttctaaaaatttgtttttgtcatgcccacttatggaaagtttgaaccttacatacttgcctaaatttcttacaaacatgggatttctttttggtacagactaattatataaacaatgagaacataatatgtaaaatagtgagttgtattagtgtcattaattggattcaaaacatgcaagaaaaaatatatgattctaaaactataatgacacatgggagatcaagacaaccgcctgccaaacttgtatgtagccattactgttcatctgttaaacctcacattaatttcattaattatactattaggcagcttaaccatgtgtttaggtgtacgttactctctttatctactgttagctgtatttgttctgatgttaggttaagttgctcgacctggtttgctcctttaatgtgcatctcttgatatttgctaattaacgagtgacaacactcaaattttatcttcttactatcaactgttactacatcttggatggtcatggaacactaataaaatctcctaggtataaaaactatgaaacataaagaacttttattcatgtaacggtagtggaaagttagggaccacggtcacgggtcccgacaagtgttggctataacgttccggctagcaaacagtattatttaatgataactattttttgtagttttctaaaggaggttaagtagtggaagtcacatgagcaatttgagtagtagtcgtcgcttcttcttcttcttcttcttctccaatctccattttatttttggaaaaaatacattaaaagtacatctgaatctgctttaaacctgcaaaaggctttgtgtttgacgctttacttctttgtttatatatttttccatagattcccttatcaagattccaacgatgttaccaaagtcaaacccctaagtgcaactaaccacttctttattagccaaaaataaaaagtaaacaaaccttgttgttctattaaaactaacaaatcacccactaacatcaagtggattcacgaatgtttctcacttggatagttctctaatgataatgataacattaggtcattagctttgaaccattttttttctccctcgaataaattaaaataaataagagatggtgccagcgagtgaaatgattttgaacgttagtgacgtgatctcactcttttgttttgcaagtatacgttactcgtgcgtctaaaaattgggtaaaagtaaaaccaaaacaaaccaaacaaaaaccacaataagagtcagaccaaagcgattaagggcaaaattgaaaaggtcaaaatcccatcacccgaaaaagcgacctgaaaaatgcctccttttcgctgacgttactaacacgtttgattattacaacaaaaacaaatctttttgtgtttaacacaaacattgtattttacaaattatacatatgattttacaaaaatagctgtacgctttttgcttctttttaagaagctaaaaaatgattaagtttgatattaaaattgtgcgcctaactaaattatcaaccatcttaaacgatataattagaacctagacaatcaatacaccattttactaattactactaatgttataacaagattgaacatctaatataacattgccgaccagttatgcacatggctagtcgatcgaacaaatccaaattaatcagacgactaattgctgtttaaccgatggtctagccaagaaattggttaagctcgaaccacacatgcatccacgcgcttcttaaaaggcgagtgaggttgacttcaccatcacttccccagttaaatttcgtaggtcccaccgtggacctcttcagaaggagaagaaggtttcaaaacaaaaccctcgtgaatctcacctcaacgcgccgcgtgcaaatcacgctccctcattaaaatctcacgactcggtgactcaaatctatccctcaccggtcttccgctaaacgacgtgagcaataatatccgctcacatgactgtcacaaatcacagtcaccatcccccatttattctccgacacgtcaccattaccattatcgctcgcctgtcacacaagtatatctctttatttttactacgcgagtgttccaagtagctgaagaaaatcttttaacatctcaccatcttcttcttcaatggaaactccggattaaatgacacttctgtaacttcctatatttactaaaatgccatctcgcctctctccgccagatattccgccgctgcaaccgacgcctacggttagtgacggccatcatcgtttccagactcttccacttatcatagccggttctctgactttaaccggagttttactcatcctcgtcactttacttatttaccgaagactctaccgaaaccgtacggctccttcagatcttatctccaactccaagtctcctcaacactaccaatgtcgacgcttctcttactctcagctccgccgcgctacaaactctttctccgagtcgactcacctcggtcacggcggattcggctctgtttacaaagctgatttcccgagtggcggcgattcactcgccgtcaaagtcatggatacctccgctggttctttacaaggcgaacgtgagtttcacaacgagctttctctctcttctcacttaattggctctcctcatgtcgtctctctccttggattctcctccgatcgtcgtggtcggaagcttatcctcgtctacgaacttatggctaatcgtagtttacaagacgcgcttttggatcgcaaatgtgtggagcttatggattggaacaaaaggtttgagattgccacggatatagcaaaaggcatcgagtttcttcaccattgttgtgatccaattataatccatggagatattaaacctagtaacatccttctcgattctgatttcaaagccaaaatcggagatttcggtctcgcgagagtaaagtcggaggatttcgatactaggattctgattgaggaagaagataagagcaaggatgttgttgaagataatgggtcgattcttgaggagactgaaagcgtgattactgtgtttgaagaaggtaataatgttgtcaatctctcgccggagacttgtgggattagtgtcttgacagagacggtggcctctccgggtgaaaaatctggactttcgccagagaattgtgcagtgagcattttgacggtggaggtgggagcagcatctccggcgatggcatcgataccgtcaccggagacttgtgcgattagcgttttgacggatactggattgtcaccggaaagtagcaagcttaaagtgggatcgaagagagattggtggtggaaacaggacaacaatggtggaagcagaggagggattgaatcagggagtgtgaaggattacgtgatggaatggattgggagtgagattaagaaagagagacctagcaacaataaggaatggatcaacaatggtgatgggtcatcatcagtctctaagaagaagaagaaagagaagaagagaaagcctagagagtggtggaaggaagagttttgtgaagagctgactagaaagaagaggaaaaagaagaagaagaagaaaagagggttaagctcaatctcaagcattgactcttggtttcatagagacgatggtgcttcctctgttcatgaccacaatcttaatcctaccaagaggaagaagaggaatagtatagattggtgggtagatgggttaagtggggagctgaagtcagtcatgggtaaaaaaaacagtcaagattctggtttgtggtgtgatgtgaatgttcagaagagtggtggagtcagcagcacaccgagtatgagaggtacggtgtgttacattgcaccagaatgtggaggaggaggtgtgttgtctgagaaatgcgatgtttatagttttggggttctgcttttggttcttgtctcaggaagacggccattgcaggtgactgcttcgccgatgtcggagtttgagagggctaacttgatttcatgggctaagcaattagcttgcaatggtaaattgttggagttagttgataaatctatacactctttggagaaagagcaagcggttctttgtattactattgcattgctttgtctgcaaagatctccggttaagagaccaacgatgaaggagattgttgagatgctttcgggtgtgtctgagccaccgcatttgccgtttgagttctcaccctcgccgcctatgggttttccgtttaagtcaaggaagaaagcacggtgaaattcgggtttggttatgacttatgagctcagtcatcaagtgtaggatttttccggtccaaagctaaaccaattgcgagttgtaggaactatttgattccgtaagattagctttttgcaaatatttatgaatatttagttgcttaacaaattagtttagacaataaagaagttccaattgacatcaagaagatgatcatgattatagtttaattgcctttttcttttgctgaaatctatgcacaaggcacaaaactatatgggcccagatataaaaatgtttgccatcactcatcactgtctcctgctgtatgcaattatgggtatggggcaaatttacctttttcttgtattgtttctctttgtgctcttaaccaaattggtatttcacatctaaaggttatcactttaggagacagaatatgcttgtgcaaatgttcccatggtttcgataaaacatcaaaatgcactcgtcttgaaagcgattacagttttaaccaaacaatcaaacctttgatatgtcaaaacggtcaactgcctatgatgggccggccggatgagttaactgcttgtaatgggccgacctaatgagttagcttaggttcactagtaacaaaactctaaaccgatcttttagcccgaacaaaaacactggataagtgaagatgaaaagaagaaaaacggtgtcgttactttgtcaatgcacattaacttcttggtcgatttttatggtacaattttgttagccgttatattaggttctcttattcaattgacgtcaatatagtcgatagtacgttactgaattgtataaactctaatctaaaccactattaatggagacaaatttgctaatgtcagacgattctttaggcaaatccaactgcaactttgaatgaaaagtcccaaactttaatgagacgttgatcttttcaacctctaaaatccttattttcccaattcttcttcataatcacacattttcacctcagaaacatatctagctaattctctgaagcatccatggaagctcctccaccttcaagcgatccatacaagttcctcaacattacacttaactcagatggatctctcaccagacaccgtgatttccccaaactgcccccaacagagcaatccaaagacataccattaaaccaaaccaacaataccttcatccgaatcttcaagccacggaatattccgccggaatccaaacttccgatcctcgtttactttcacggcggtggatttatcctctacagcgccgcttcagctcctttccatgaatcttgcaccaaaatggctgatcgtcttcaaactataatcctctccgtcgaataccgtctagctcccgaacaccgtctcccggcggcgtacgaagacgccgtcgaagctatcttatggctccgtgatcaagctcgtgggccaatcaacggtggtgattgcgacacgtggttaaaagacggtgtcgatttctcgaaatgctacgtcatgggttcaagctctggaggaaatattgtctacaacgtggcgttgcgtgtagttgacacagatctttctcctgttaagatccaagggctgataatgaaccaagctttcttcggtggcgttgagccgtcggattctgagtcacggcttaaagacgataagatctgtccgttaccagctactcacttgttgtggtcactttgtttaccggacggtgtagatcgtgaccacgtgtacagtaatccaattaagagcagtgggcctcaggaaaaagataagatgggacgttttccgtcgactcttatcaacggttacggtggggatcctttagtggatcgtcagagacacgtggcggagatgttaaagggacgtggagttcacgtggagacgaggtttgataaagatgggtttcatgcttgtgagttgtttgatgggaacaaagctaaggccctgtacgaaaccgttgaggcctttatgaagagttgttcatcaactggcccatcgtccaactccaacatgtagtagtctgatctaatcatgttttacgaactatatatatatctagctaataattaaattcctacaactattacgcaatttttgttgttttaagtcacatatgatatgtgtggtgcaatggaaaaatgtataccctttcaataaatatagtggatgcaatttaatctatttactaatactaattttaacgatgtccaaagagaattggatgttctgtgagctacgttttattaacattttaaattatgaattccaccaacaaaaaaagatagattttaataggtgaacatactatcattatcatattatgattagctatttacagaattgttttgaataattcattaagaacattgttagattctttttgtatatatacaacaataaaatgctaataattccatctagtttagtttgtagaacatgattcctcatttagacaaaatataaaaacatttcttaatttggtcaataatcaatatagctaaactgcgtaaaatcatgaccacaaataatccgtatattcatcctaatcacaacttaagctccattaaacgtaaaacagttacacacaacaacaacaacaaaaaagtaagaaaagaaacgaaaaaaatcctaaacatttcttcttaggtcaaagttaacttcctcttaatcacgcaattaatcataaaaccatgtcacgtgactctcctcccgcatttgatccatacaaacacctcaacataacaatcaaccccaacggctcttgcacgcgccatttcgtttggccgagggttgaacccgacccggatccatgccccggcaagctcgccgcttccaaagacgtaaccattaaccacgaaaccggcgtgtccgtacgtattttccgaccaactaatctaccatccaatgataacgccgtggctcgtctcccaatcatcatccatctccacggctccggttggatcctttacccggccaattctgccgcaaatgaccgttgttgctctcaaatggccagtgagttaacagtgattgttgtctccgtacactatcgtttgcctccggagcatagactcccagctcaatacgacgacgcattagatgctctgctttgggtcaaacaacaagtcgttgactcaaccaacggcgagccgtggcttaaggactacgccgatttctcacggtgttacatatgcggttcgagtaacggcgctaacatcgctttccaattggcactgagatcgttagaccacgatttaacgccgttacaaatcgacggttgcgtgttttaccaaccgctttttggcggtaaaacgaggacaaaatcggagcttaagaatttcgccgacccggtaatgccggttcctgcggttgacgccatgtgggaactatctttgccggtaggtgttgatcgggatcataggtactgtaatccattgggttacttgccgcaaaaggagaaagttggacggcttggacggtgtttggtgatcggttacggcggagacacgtcgttggatcgacaacaagatttcgtgaatttgttggttgcagctggagttagggttgaagcaaggtttgacgacgccggtttccatagcatcgagctggtcgatccacgacgagccgtcgctcttcttaatatgattagagattttataagttgattattcttttcaagttttcatctaagcattctataaccgttaattttctcattttctattttgtatacatatgacattttacattgaacgttgttacatagcacaaatgttacttcttttgtgttttttgataaaatgttaacattgttacttcttattgtattcatttttacaattccacaattccgtaatttcacaaatttactaattgaaatccatttcattctcaatcatacttaagtaacctactgtagttgaattttaagtccaacttgtgatcagctttaaaaacaaaagtcataacatcggacggtcaggatatcatgtgtgaggctgtatcctttaaataataaaatagaggacacacacgagatccgttaaaggttaaaccttgaagaaagaaagatctctcggtggtggtcattcaacattgtaagatcttcgacttggcaaaattgtttcactttcgctctaaaaacttcatcttcactttctctcctcctccatggcggacggtggggctgaacctccagctccaccatcatcgataaacgccggtgaatttctcttgtctattttgcacggaagtccttcgccgtcgtcacaaggtcctcagcatcatcagtcattcgctctcgatccagccatcgcagccattggtcctaccgtcaataatccttttcctccgtcgaattggcaatctaacggtcatcgacccagtaatcataaccctccttcttggccactcgccttttcacctcctcataatctttcccccaatttcttagggtttcctcaatttccgcctagccctttcacgacgaaccaattcgacggtaatcaaagagtatctccagaagatgcttatagattagggtttcctggaactacaaatcctgctattcagtccatggtacagcaacagcagcagcagcagctaccgccgccgcaatcagagactcggaagcttgtttttggttctttctcgggagatgctactcaaagccttaatgggttacataacgggaacttgaagtatgattctaatcaacacgaacagctcatgaggcatccccaatctactctctcgaattctaacatggatccaaacttgtctcatcatcggaatcatgatctccatgaacagaggggaggtcacagcggaagaggaaactggggtcatattgggaataacggcaggggtttaaagtctactcctcctcctcctcctcctggattttcgagtaaccaaagaggatgggatatgagtttaggaagtaaggatgacgatagagggatgggtaggaatcatgatcaagcaatgggcgagcattctaaagtttggaatcaaagtgttgatttttctgctgaggctaatagattaaggggattgtctatccagaacgagagcaagttcaatcttagtcaacaaatagatcatcctggaccacctaagggtgcaagtctacattctgtatcagcagctgatgctgcggattccttttcgatgttgaacaaggaagctcgtcgtggaggtgaacgtagagaggaattggggcagctcagtaaggcaaagagggaaggcaatgcaaactctgacgagattgaggattttggagaagatattgttaagtctttattgcttgaagatgaaactggtgagaaggatgccaatgatgggaagaaggatagcaagacttctcgcgagaaggtacgtttcagtttttgtgtaagcttgtgatataggatatacctaatgacttgttgggaacattcagtgatggtgtttagctcgtgtaatcaattcttgaactagaaaggatgtttttttagattggaaagattgtttaaatcagggttttgttatcaggagtcgagagtggacaatcggggtcaacggctgcttggccaaaaggcaagaatggttaaaatgtatatggcatgtcgaaatgacatccacaggtatgatgctacattcattgcaatctacaagtccctgattcccgcagaagaggagctggagaagcagagacaactaatggcacatctagagaatctagttgccaaagaatggcctcatgcaaagttgtatctttacgggtcctgtgctaactcttttggtttcccgaagagcgacatcgacgtttgccttgcaatcgaaggtgatgatatcaacaaatctgagatgttgttaaagctggcagagatcttggaatcagataatctccaaaatgttcaggtaaagtaaatgagtttacttatagaaacacattgctttggtacttgatacgcttttcttgctttgaatctggtgcctatattttctgaaacattgttttttgtgtaggctctaacacgagctagggttccaattgtaaaacttatggatccggttactgggatatcttgtgatatctgcatcaacaatgtattggctgttgtgaacacaaagctcttgcgagattatgctcagatagatgttcgtttaaggcagttggctttcattgtgaaacattgggcaaagtcaagaagggttaatgaaacttatcaaggaacactttccagctacgcgtaagttctcctccacactttgaaatgaagttactttggattgcaaattacaatcattacttatatttgatacttttgcaggtacgttctgatgtgtatccatttcttgcagcagcgtaggccgccaattcttccttgcttacaggtgtgtataatcatatcctcctaaaatagtgtactgattactgaatgctcttcatttattgaagttattacttgatgcaggaaatggagccgacttactcagttcgggtagataatatccggtgcacatactttgataatgttgatagactccgtaacttcggatcaaacaacagggagaccatagctgagctggtctggggattcttcaactactgggcttacgctcatgactatgcgtataatgttgtatccgtccgcaccggttccatacttgggtaaactagaaactcaattatacttactgcaacatctgtgaagcaacaatctcagagatgaaacatgaatatgtgtgtgttgcaggaagcgagagaaggactggacgagaagggtggggaacgataggcacttgatatgcatagaggatccgtttgagacgagccatgatctgggtagggtggtcgacaagtttagtatcagagtgttgagggaggagttcgaaagagctgcaaggattatgcatcaagatcctaacccatgtgccaagcttttggaaccatatattcctgaagataataatggacaaggccacaactgaacttttaaaacatttgaatggcggattcgtgtggcttgtatatatttatgggtagaagattcatgctctgttctttttgcttttttggttgtgatttgaaatcttgcttgtgacccaacaaaaagaaaggtcttagttttgaagatttttgtatgatggtgatgtgggtggatttcttaaacgtgtcgtgttatttgcgtgacttgaaaaaagaagtgagataattttgaaaacaattttttaataataatgcaaaacagatcaatctcgcaagtcgcaacgatggcgacgagctcttccaccgagaaactgccacgtgtcctcatcgtcaaacgtcccgacgccatggctgtgttaggcgacggattcgtcgcctccaccaagttcgagatcctcaaagccttcgagtctccgcttcctcttcctgaattcttggcctatcactctgactccatctccgccattatagcccctgtagctgctccggtcacagccgatctgattcgcatcctccctaatcttcgcttggttgttactaccagcgccggcgttgaccatgttgacttagttgagtgtcgtcgtcgaggcatctccgtcgccaacgctggctcaagcttctcggaagatgtcgcagatactgccgtcggtttactcatcgacgtcttccgccgcatctccgccgccaatcggttcgttaagcaacggttttggccactcaaaggcgattatcctctcggttccaaggtttgcaacataacttgtgaaaaaatcaaattagcaacaaaaatgattgttaatggttccctctaatttgcagttggggagaaagcgaatcggaatcgtgggactaggaagcattggctcgaaagtagcgacaaggctcgacgcctttggttgccaaatttcatatagctcaagaaacagaaaaccatatgatgttccatatcactattacatggatatagaggagatggcagctaatagtgatgcactcataatctgttgtgaattgaatgagaagacattgcgtttgattaataaagatgttctttctgctctgggaaagcgaggagtgatcgttaacgtggctcgtggggctataatcgatgaggaagaaatggtgagatgtttgagagaaggtgagattggtggtgctggtttggatgtttttgaagatgagcctaatgttccgaaggagctttttgaattggataatgttgttttctctccacatagtgcttttatgacattggaaggtcttgaagaacttgggaaagttgtagtagggaatattgaagctttcttctccaataaacctcttttaactcctgttctttgatgggtctcatcgccaaggttaagctgggaaagtttgagtcctacatttgggttgtttttttcgctctttcatggcagttgtatgattgatttacatagtttcagtgtttcgaacgattgcttttcttatgtgcataggcaaattttaacgtgttattttgataggtgacattctgacattctatttttcacctttggttttattttttcttcaatgttattatgacgtaagcaagttgtattttgacgttcagttttgggcgtttcaactagcgaacgttggaattgtgtttttggctatcgatcgttaggagtatgggaaaaatgtcacatttaaatctaaatcatcagtcagtttactactttttgttggatctggtttaaatttttgcatgaactctggatcatgtttaaattttcgaattcccattgacacttccaattcccaattctcattgacacatcgtaaatcctaaacatttttcaacatgactcgaaagttattcgatttttgataatgtagccgaagtctgcatgaaagtaattcaattgcacattctgacttatagccgtaacctaatagatttcgaaagttggtgtttttaaaggatattaatgttattttagtgttattttgaagtcgctttaataactttttcagttgttttttatttttaaagtgtttttgataatttcgacttattaattttctctttcgattattttagtgttattttgaagtcgctttaataactttttcagttgttttttatttttaaagtgtttttgataatttcgacttagattaattttgtctttcgacacggattaatcttgtctttgttagagtttcaactatgctttatttgtttttgccatttgttacatgtttcgactatgtcgctttgactttgcgatttggcgtctgttttttttttgtgttttgttaagcttcgcgttttttctttggctacggcccgcgttgcgcatttttgtccctcgtttgtctaatgttctacgctcacacactctactaatacgcccatctacacctacatattcatctacgcctatacatacatctatgcctatacattcatctatgcgcacaccttacacatcactaaacattcatctacgcctatacatgcatctatacattcatctacgcctatacattcatctatacgcaccttacacatcactatacgcccatttatacacatccatgtatcttatcaggaaagaaaaaagatacaaaatcactagattgccacatgcacaatctagtaaaattcaacaaaggctagcaaagcttgattgcaacacgctggatagagtcccaaaggctttgttttcccttcttcatcaacccttgcaaaattaattaacgaaaatcaatattccattacaatcgtttttttttcgtttatcatttttggtatatgcatatattatttacaaaaaaatcaaaagcattttataggcaacctattctatctttgttttttcataaaataaaaacctttttctatgttttcatttagacagaaccgatacataactaaaaatgttttatgatagaagcaaatatggctaaaaatattttcctagtcgttgaagttaagccagcaatacatatacacaaaaaatggatttaaaacacagcaaatgaaattcattttagacagaacatatatatatctaactaaaatgctcagtttatgaaagaaacaaatatagctaaaaatcagtttattgtcctaatcattgaagttaagccagcaatacatatacatacacaatggatttacaacacagacattgaatttcatgttcaactccctaaaagatgactaaaagatgaagaacaggtgaacaaactactaagaaccatttaatgaaaaaaaaaaaaaccatttaacggtaaacactagaggatttagaccagagtattttaccttgtaaggatgatgctttatgtttgtttgaatgaggtcttgactcaagtggaagaaccagaattaagaaataaaaacagattgtttctcgacattttgtaaaatatgaaccaatgaagaggattccgatttctgacccaagatgggagtatttatagagagccatttatctgaatttttgtaataaaatattatcttctaacggtaataaaatgttaccgtttcaacgtttaaattttattatactttcaactttcaagtctaatcaaacttaacgttggaacaatatagggaatcgtaaacgcaacgttcatattttgctattaaacttttgtataattccataactatatctttatttttgagaatatttgaaatgcattgcccactcttctatgtttatcactatagttttgatgattaatgttgtctaaattcatcctcttctctcatttttttcacgatttctttttctcagctacttctccgacgttaagtgcgagtattaattctactaataaaagtaaattgggttgaaatcttaatttaatacatattcatgtgctatagtctatagatagtctaaatttatacctttttgtatataaaatggcttgagttcttccatcttttttttggttctttagaaaagaaaacacgttaaacaaaaaaagcaggataacatactaaaccattagacattagtacatagactagatccaaaaaatacaaacatgtctaaacgaagtttaagatgatacaaccatatgaatgtgtacttcttccattgtgcacgcacccaaatcccacttaacaagaaacagaaacctcctagtaaattgccacatccagataatctccaatctgcagatagattgatcaacttcagttatagctacttgggtaacagaatatgaaaaattaatgttatagactatataatcatcatacaagatgatcttctatgcatgtaaaaaacttacctcaaacggaagttcggaaagcgttttactgtcatctggttgttttcggtttggataagccatcgtctccccaacctttatcaattaacagaaacaacaccacaagatcagactcttctcatgggttcttgaatacatatgcaaacatcacaagagaacaagtaaagccataacgattgaatctgaaagcatccattcaatcaaattacttcattctgtagtaactagctatgattatgtggtctctctgaagtttcaaaaatcaataaccatgagaagatgagttgtcaataagcgaaagacatgtacaagagaaacattgttgacaaaactccgaatgatactggtagctacatgtgcgacaaagaggtgtggcaggggaaaacacagaaactctagaatgcatcaatgatcatgcgtggctacggtgacaacttatctgatcaagattgtgaagagaacgtaatcttacctctctcacattatagccacctttattgttaggataaacaaacgcaaaagacaatctagcattccttctcctagctgctacagaaacttctttaacctgcaatgaaaacgtgatttaacattgtgcttatgagagaagcatcacctttgtacgttacacaaaacccccaaaaatgtgaattttaatcagcactcctcagcagtaaaaacaaagtgagtcctttagctgaaaatccgtcatatttgtaaaaacaaaactacacaagaaaagttctcaaagcaagctgctttattgttgtctcaagcacccaatctaaatcttaatggtagaagacataccaaatctgttagctcgcgaagactggcatctttccaagtgtagatttgaacttcatcctttggttctttgcctctcacagcataatcttcactagtatgatgaccaccactctgcaatcaaacctacccaattaatcctaatttgcagactaattcagaaacaaacatagccagttctccagtgattaaacttgcattcagtaaaatcagtgaagaagagtaccttggtgaaaacacgaagaagaaggggacatgtctgcgattcgaaggttaaagataaagaaatcaataagtacagataaaaaccctaaaaggaaaccctaaaggatgatgattcaacgattcgcgaataatgaaatcgaacacaaaccttttcacgatcgacaggttcaggtttagggcgaggaggttgttggttaacgcctctcggaggtggcggtaatggtctcccaccaccttgtcttctcgctgcttcagccatctctctttttctctcgagagaaatcactacgacgaagaagaaggtaatggcacagagattgatcggaccgctttaggcccatacttatttaacctaatgggccttttgtacaacaatttgggcctaactcgtttatagattttgttgccaatggtccgtttaaaagatttgaaatatatatattttttttctactttttcttttcttggtttataacctttgaatatctatatttgaaacacacattgaagatcactaactcgaaattcaaaaataaaaagagagacaaatatagcaatccataatcaatgcatagagacttcaagtgacctactaggatcccactaaaaaataatatgctgttttttgcctattccttttgcatcattcttgttatagtaaaatggtaaaagaaattatggaaaataagaaaatggggtcattgaatgtcaagagggtaacattttcagacgataaggcgcaatgaccccacacctcacatgaagctgcagtgccatttccaaaagagtgtgtggatatgaatttgaacaaagaaacattggtgatgaaattaaaaaagaaaaggaaagattactacaaagtgaaaagtatgaaattatgaagactacccgatcttctttgcctccctttccgtatttggcatgcccctaaccactaccacaacctcttcccttcggaactttgtaaataaacattcactgtttttttttttgctttttaaatagctgttaattgtacaaattcatttacatggcttactgtttttcaaaaggagatactaaatagtatatagtactataattttgtccaccatgttctatgaaactcgtccaaacataaaaaggtttttatatcatcaaacgtacgactttcctttgttattttcttggattggacacaacgagattggtttggtcactgtccgatctagttattgatatatatatatatatatatatatatatatatatatatatatatttttttaatataatgtagatgtagcccactaacttttgataagctttcatttttctatactttcatttttctataatgtaaaaagatagatgaaaatgaaactactagattacaactttttaacaaaaaataaaaaactactagattacagctcttgattggttgataacttgatatcatatatcgtgtttgtagttgaagatgtaaagatttatcatcttgtatttgaattttgcacaatatataatgtgatgattctatgtttgtttgtaaacttatgtgcaaatgggcgataactaaacgttcgtaaaatagttacatgtactaattaatcgaagcacataaatattatatatatatatatgtatatatatgaaacgattcattgattttaagtatttaatttattttttaagattttagttgtcttaacctcgtacgaagaagaaggatatatactatttaactcgtggagatgatgaggttcggatatttttccttaagaccacaagacactgacacgccgactgatcgataaaaaaagttaaggcctacaatacaaaagagtagcagattcccttacacgtgtttcatttatgatctgttaattaactccattgagcttcaatatctcattagccgaaaattaacttgacgttttccattgaactgtcgaaaaaatttgtagaaaaagtgaaatgtcccctatttaacttccaagtttaaaacctaaaattaattagttaccgttttgatgaataacgttgaaagaatcgtcaacatatcaaatgatgcagatacaacaagggacaaaaacatcaaaaaattgattaaaaataatcattcagatattagcaattaaactgtaagtaaatgattgcatatatatatatgaatgaatacatatatatgtatcaaactgtaagtaaataatacatacatatatatatatatatataggaaaatatctcatttttcaatcattttcagaggtaaacatttttaaagacaattttacctaacccaacatcttactatatttaaccagctctgcgagagcttcaaaacaatgatgaattttctgccccttttcattgaccaaataaaagttcacaaatttgtaaaaccaatcagcattaatttcgcacgtagtttacttcgtccgattttagatcaagtagacattttaaccaaacatattgaatcacggttcaatcaagatacatggttgcgagtataatatatcaatccttcaccgcattagaaaaccaaattttctatttaatttagcgtgttcttttaatgaacgcagcgtcagcgacaacaaagaagaaaaacagatctgcggcgagaaaaaatacattgattagagaagaactgccgcaaaagatgtacgatgatgaagattgacgtgacgctgcttaatttcagcgattcatttgatgcaattgcaattcatcggctatcatcggcgactcatccgaaattgttattttcaagctttaatgtcgttttacttacctactacttctcatgacacgtcgtttcagtccgctattgccgctggcgcagcatcaaataaaagaacacgctaggatagcttgaaaagggtacaataactagttatagaagaacatgagccataacatttggaaacaaaatgagttagtttgaatttgaaacatcgcgctctatgtaaaaaaagcaaaaaagaaaagaaaagagtcctaataattaaaaagagaaaataaaaggaattttcaatggtccgactgttacaagtagatttccatttttaggaatctagctataacgatgaagacagagttatcattttgttccatcaaatatatgacgatatttatatttaatttcttcaacaacaaatatctcatttgttggtgccactttcacatacttaggacgactaataattaattaaaaaggatttatgtaataacgcaccatattaacctgtaacaagaagaattgaaagtaatacaagtttatatatatagcaacacatttatcgtgtacgatactttattccttttatctattcttgaaaaaaagttaccaattcttgagaagaagaagaaatcagaatcaagagaaggagagagaaagatgggaagagggagagtggagatgaagaggatagagaacaagattaatagacaagtgaccttctcaaaaagaagaaacggtttgctgaagaaagcttatgagctttctgttctttgcgatgccgaagttgctctcatcatcttctcaagccgtggcaagctctacgagtttggtagtgttgggtatatatatctttgctcctttgaaccaacttttgtgctatatatattaagattcatccaataaagctatgttttttatatgaaaattgattaataaatgggttcatttgctacttgttacatcgtacgattcaagagtcggatcatgttttgatcttgtggttattcttaatggttgtatcgtttatcctgtggtaattagggttcatcgttatatcgtgtctccctcttggatcctttatcataagctaataggtccttccgtacgttataatttgttgatttcccattcatgaattcctttgattctttaatcttacagatgacaggtttcaaatgggtttaattctagctttaaaaaaaaaaaaaacaaacaaactagggttttcccttttagatcagtgtgtaagatatataacttgagttcttgtcgtaagaagaatctttatttgttgaatcgagctaatgatctcccatttttgttttaattgaatttgtagaattgaaagcacaatcgaacggtataatcgttgttacaactgctctctaagcaataataagcctgaagagactacacaggcaagtgtgtgtacgtactttgaatatatttacaattattgtttctgatgataatgattctagctaactctattttctcaaattctcatgttactatatatatgcatttcatataatctatatggtgcagagttggtgtcaggaggtgacaaagcttaaatccaaatacgaatctcttgttcgtactaacaggtctagtaattaagagttttctataaccccttgaaattaaatcgttattgtcatcttccattatatatgtatagttacaaatctattgttatgggtgttgataattgctaattataaaaggaatttgcttggagaagatcttggagaaatgggtgtgaaggaactgcaagcgctcgagaggcagctcgaagccgctcttaccgcgactcgacagcgcaaggtcacatgatctagactggtcttgtttcattaaaaatatattcataactaaaacattcaactaaaatatgcagacacaagttatgatggaagaaatggaagaccttaggaaaaaggcaagttatataaaaatgtttcataccaaactgcaaaacatatatgcatatcaatcaatctatgtttgaaatggcaggagaggcaactaggagacataaacaaacaactcaagattaaggtttttatttctagacatcgcaaaattatattataacttctcatataattaattatgacatttggatcttaactaaacataaattttcaatagtttgaaacggaaggccatgctttcaaaacctttcaagacttatgggcaaactcggcggcatcggtggccggggatccaaacaattctgaatttccggtagagccttctcatcctaatgtattggattgcaacaccgaaccctttttacaaatagggtaagaatataccatttttcccggcccttacaaataaatggatagaaataagatatgattataagacttgtttggtatttggattaggtttcaacaacattactacgtgcaaggtgaagggtcttcggtatcaaagagtaacgtggcaggtgagactaatttcgtccaaggttgggttctttgactctctgttgattagaccacgatgccacggtcaggccaatttcagctctctacagttgttcttttttcaaattagatttctgggtttttttttcctataagaaaaacttttgcactagatgtttgtcatttaatttccagctcgtgtgaatctatattcgcatgtatgtgctttgaagaatttctcctcttactcctacttgatctaaaacattatttttgttttggttttaccaacattttccaaatgaaataaactttaataattgttctaaaatcaattaaatgaatagatttatttggcatgaatactattaaatctcagacatatatttatgaatgctgaattgtgaatagtaggaacaaataataaatcgtgcgacgtcgaatcaattgggtgacgaataatcaaaggaggattcagctcaactacgcaagtaggagtaatgaacttccgaaacaattgggtgagtaaatgaaatcaacctgtaactaaaaaaatgaacgaataataaaatgccacgtagttgaccttggaaaaagcgcaatgatatgaagccaggtaggacccacattgctgtttcttgatttgacttttggaagagaagagctcctctttctttagcaaactttactgttgttgatatatgtcttttccataaagtcttcatatttattgaggttttttttttttttttacatactagaatttaagtttttaatactctcttatatttatgggctgttatcgcaaagtaggcccttttataagtgggccattacaaaataaattcatgggcccatataaatgttaacggcacatgtcatatcacaatcatgtatctctattatctaaagattctaaacgatttgaaatattggattatgcgtataatgttttttttttctttgatgggctaaaagcctctacaacatttggatttatgccctaaatctcctctcccggtgatcttttgaacttgcttgggggggacgcaacttcttccaagacagtcacacatgctactagaccgatctttgtattgtagagttgccaccgttgtcgtgtatcagctcttcatctgaaatgatgcagttattgatttttggccaatggataatgtttaatgtgctctcataattttctttatatttttttaccagtttgggaagttctagacctctagtctctcgacttgagaaaccagtaagttatatagtacagatattcctgattttatgattttgagggaagaaagctaaattgatacatgaaaacaaaacataatcaaaattacattctagagaggcaagtgtaagaacatagatacataacacaagcagttcagaatcattaaagaagtgactgagagagagagagtgagagagaaataagacaacaagagagaagcagctttagagttttgttacttgtccttatacactctcagtactgctaaacctgtttttacttagtttgtttttttgttttttttgttgagtggagatcactttcttgaagaacaaggtaacccaatgaacaattgcgtctctacttcagaacttgggctactctcttcatcacctcttccagtactttcttgattcttatttgaccaaacttcgctttcatgagatccccactgcattcaaatagaattattacacaaaattaatagatgcaaattagaagatatatagaacaatacataaattaaagaaggttgatgattgaagataaccaagaaaaactagtaaggactctcctaacctaataacccccaaaaagaaccccaactttcttatctttaccgaataaaaaaacgaatgtgcaaccctaacttgagacccataagaatatattataccttttcagagagcttctcgttttctgcagctagagctttctcctgcaaaagttttagattccaatttgtaaaaagcaagcacaagaggcttacttacttggaatattacacaatttgcatacatacttatatctgtttatatacactcataaaaactactttaccttttgcttgagctgctcaatttgttccttaaacacttgagtctaaaagagatgagaaattgagttataattatgagtggtttcagaagatgattcgaacaatacttataatgtggagatataacagataaatatatacacatacctttcttgctcgaatacatttgacacttttctcaagctgttgctcaatctgttgcagctcctcgattgagcatgttcctatgccttctcccaagagtttactgattacaaaaacaaaacactaattgatcaaactctcctatgcatcatgaaatagatatatacaagtgatgaataatgtgtttgtatatatgtatatatcacaaaccgtttagaagcttcgagttgttcaattttcttcatcatgtttgctgcttcatatttcaaatgctgttggttatatcacagaaatgttattgcatgtacatatatatcctaattataaatatgtgacttgatcctgtgaccttgagattatatacatattgtggttatattcattaccgctctttgatattatatagtaaaagtattaattagcaagaattgatatataggcaagaagatcataaagaataaacctgcatattttcttcagaaaccggtttggtgctgactcgatccttagtatgcctcagataacgatctatggtatcttgcatactgtcaaaaacatatataattggaacattaaagtaaatcatcagagatcaaatttagatcccaatggtgttctcaaaacatttcttattgaagatatcactagacttaatcaaggacatagcttgaaaagtcttgtactttttccccctattttagaaaatcaaaaacatgtgaggtcttatctttatatttagtaggttcgagagaaagaagtactttcccaaatggaccaaatgtctgaaacatctgatcaaaagctggcattttcatttacagaagtaatgattcatcaaaagtaagtttggtttccctactacctaacagtacaagataaaactcttttgattctcaaaaacaatcaacatttaggtttggctagctagctttgagtttctatgtcaaaatcaggaacaaatattcaaacaaattgaactaaattaggaatgagcatgaaatgaagcatgagggattaataaatcaggaatgatgaaacaacttcctaatcatcacttagaaattagaacaacatgttttgcttaaagcaataacaagacaaagattagttcaaaccaaaagaatactaattgaaagttgttttattaatactatgtgatcatgatctctaagaagatcaaatatataacaagtgtaaattggctacgaaagagcacattttatttatatcataacttgagaaactaattgagaaagagagagacagatgattaaacaagatgatatactagcggaaataaaaaaacaataaataagagggtatatgtacttgatactactttaataatagccctaattttgcagaaaccaagaaactcatttaaacacacctctcaaagcaaacgtcaaagagatgtgattccacaaaaggccaatcaaatccatatataaaccaaaaaaaattaagatacaaatagagaggttaatgagatctctctctctctctctttctatggatgatttgtaagaaagacaaaaagaacgtacttggagctggcgaattcataaagtttgcctttaggagagaagatgataagagaaacttcagcatcacaaagcactgagagctcaaaggctttcttcaacaaaccattccttcttttggagaaagtcacttgtctgcttgttgcattctctattctcttcatctgagttttgcccctcaccatatcttcttctttagttaatttcccttgcacacagaaaaaaaataaaattattttttcaaaaattgaagaaaacggtagatcaatggtgcaaccacctcaataacaagattagtcacacacataaaacaacccatttcatatatgaatcaaagagagtaggttaaaaaaatgaagatatgatcgaaatatgacttttttgtttgggtgggagaagactgatgaagtcaacgaaagattaagtacccaaaaagcaaaacaatctaaagtatctgatctataagtctgtaatggaaacttttgttatcggtttaattgaaggatgcaacctcctttcatgagatttaggacaaagaaaccaaacacatcaaatcgaaccaaatgaaaccaaacccatataagtttatagatccatcagagtacaaagcaaaagaaaaaagaaaagatcatgacgaagagatcttaccgattggctaaaagggtttgataaaaacctaaccaggaggaagctttcgaggataaagggtttgtgtatgtataggtagagatataggaggagactatataagcattactggagggagaagaagaaagaaagagaaggaagaagatgatcaaagttgattctctgcgaaaggaagaacctttttatggaagtagcaaaagaagtagctttcctcgtttcatctatttgtgtgtaataaaagaaacaaaagacaaaaaaacttcacacactcgtctcttctctctctgcttttctccttaaaaaagatcctcttctcgttgtagttatggtaatggtgtttgtgaaaccatatatattttcttttctattttatttcttggagaaagataataaaataagagaaagaaagagggaggagctaaatagtcagtcatatgtgtcgcaaatatgatggacgcttgaaacctcatcctttacttattttggaaaaaagccttaagaaagaccaaaaatagcatattttgatacatatggacatttttacatacacatctttttccctcccataaatatctagttggatggaaatgcctgtcaaattatttttattaaatttcttctaacaaaaatctttttttgtttttaatgtggacacaaacactctctcgtacctatatgcccccacttgtaattgatatgaaaaataagaatatcgttttttcttacctgtgagtaatacaactatattggttttaatcaatttttataatatctttccatcccaacagataaaattcatttgatttgtatattttctatgcttgtttgtccattgtttcttattgttgttcttaaattgtgtttttagttatatgacataatcttacatctccatgtgaataattaattacttgcaattgtaagtttttataagttggacaaaaccacattacaaaatactacaatttcctcattacctaagtgaccattaatccaaatatttggaggctagtacagagacaatggggcaatggcgttaagtagcgacgtgtctaaagaggcatttgctatttttggtccctcggattactaaagaaaacgtaacttagaaatccaataataattcagcttatcgaacgtcttgtctagctagtggcaccaaaaaaatatccttttttggagataaaattgttaatcgatatctaatgatcttttatctatatcgggaggaggaccacacaaactaattatttcgaaaaatacacatcttctctggtgaaatatgttaacgtatttatatatattaaatatcaaacagataggtccgaaaatctgtatggataatttttatataaatacacatcttctctggtgaattgtctctatctttatattttcgtgtttgtataaagtataaacccggtttgaagtttagttatgtattttgtagacccaattcagatttaaagaaacatcatcgtataccactagtaaatacgatcacttcttaactggttgagacaaatccaaaacaaaaagtatctaacgtaactgaaccaactatacattacttaaaggattcgtcctatagattaaaacaatcgtgttagtaatgtgtcacatcgaaagtaagatagaaccaggctatgcttcaggtttttgttcactgcgattaattttagatatgattgaccactacaattatttttaagtggtagtaatatccgattttttttgtacataatcatataaactaatctaattttcgcttcgagatcccaaagtataatttttttaaaaatatgactatatgagagatacgtagagttctagtctacactatatgagagatacgtatgcgtttagtcacaagtttctttgttgccattagattagaaaaaccttgtataagtaagtacatgtctgtctagcagtctaggaatgatgtgaatttgcatttaaaagatgtatggttagtaacttccaacatggtgatatggaaatctcatgagtttaccagtcataagctcatgcaaaatcataacatataaagtgtattttagataaatcaaaatttcacaatgattaaacaccaatgtgtttgtaaaattagtttggggttaatgtacaagaattagagaaataagggtgggaaaaaagagtacaatattagaaatacatcaacgtcgtccgtacagtcacgtacaaacgttagccaatgataattcgaaaacgcacctcttactttttctcatcaatcgaaaaatcccgagacaataataatatatttattattttattaattacaaagataaatcgtgctccacactttagtcttcatgggaccctcacaaaaattgccatatctccaaataataaaattctacaatatagctattatatggtcctacttttcttacctcttataacctctttacttcctcttttaggttaaatctatttttcgctccttttgttttcattttcctcatatgtatatgcctattatattcacttctttaggtgttttttttttcttcttttaattcatatctttgtatcattatcttatcaccatctacttaatgctagcgtatataatcactaattcactatattttgaatctacatgctaattgatatctacttgtttgttactgatttttaaaaaatatataaaacatgtttgtaatttgtgaatgcacctaaagaaacttagaaaaggacagattcctttgttatccagaaacctactccttttgttttctactgtttctaccaattttgtgatgttggtttggctttcttaggtttggtgggagtttgaagcttctggcattttagtctgtgaaagatgatgcccgtgactgccatgcaaatttttgtttatgcactttcatgcatcagtaattatgtttggtctattcccatttatattctccgattaccaataaatccagtactgtatcccaaaagcgtttttctcgcttgaataattgtgtttctatgtgggtaaggtcataaggtagctgaaaaggatcacttagacaatctagccactaaagcaatttatgtgtgaattactaagttatactattaattacaaataaatgtgtaaaagataggaaaaaaaaccccgtatagtccattttttaaccatagagagtactaatggacgatacatttatttctgaactagattgttgaaaagggtgaatttaatgtaaaattctttaaaataattccgactgatgtttgagaatcttaggcatgatagttaataatgattttttagttataacaaaatcatatagtactaaaattcatcgagtaactatagatgaagctcttcatccaccataaatcattattagttggttaactttctgtagacgcgtgatttgggggagttataaatcaatagcccctcaataacatttgcgcattcattggaatccacttatatgaatctctctaaataacaaatatacaaagtacaaatcaacgactaagaaaaaccatataatatttggttagccaataagtagaatataacctttgtttaatggagtactacatttgtgtaagtatgattaaggaattgtgattaaaaaataaaatgtcggataaagaggattaggaaaatgaagttaattggagactgtgaaggagatattagaattggccattggggagagagttggcacttcccagttgaggtaccgacacatgtcgggcacatgggtcctgttgtaataaggaggattaggagattcacttcctctgttaaggggaccacagagcgtgctgtgcaccgccctatgctctttcatccaacggtctttatttcatcttctgattctcgtggttccctttttttttgttttaatttgttttttaatccattaattaattttatctataaactatgcttgcgtcagcttttccccacctgggctttttttattcttgcactacgcaaatagtataataatttaattggatttcagatgtcaaaaaaagttaactatatggttttattatacgagtttgggtaaaataattttaaaataaaatttccactgaatacaatcgagatttggaataatacatatgtaatgtaaccccaaaaatgacaaaaaaacaaatacagcaaagtttgctcagaactagaggagcaaacaccatagcgttttttggggtggaaaacgacaagcagttatagtccaacactcaaaaggatggatccatgttggaggagggtatatatataggctaaaaacatagcagtcccttctttttactagctgaaatcaaatatgaagacaaaacaaaaggtataataatataccacaaagacaagtttacaatcatcgcaccacaaatcttagccagccattttgtctctctgtgttatgttggggccaagtcaggtgcaaagatggctatgagaagagggtttcttcttaagcaggacaacaagtcattttggctgattctttgatcttggtcgtcgtctagcaaatggtacattcctcgaatctgaaacatgaggttaaccaaatcattaggctatacatcttttcagagatttggaaattttgattctgctcaaattttacatttacctcgtccttgttcaagtttgggattgtgtttttgagagcttctccgagctgagccaaaaatatataagaaaaactcataagaacacaaaaacaaatatggaaaagaggtgtgaagaattaaagagcactgaatctacttcttgaattgtaatatagccatctccatctgcatcgcaatgggaaaaggctagctcgcatgtttgcttaaaaagcggctgtgtcaacacgtggcccgaggcaaacaagaactgcaggccaatcagcagcagaagaagcaagatgtatcagatattatatactaagattttctacgaaggtttattatatctttggaaagatactgattcatataaaaatcctcaaattacctgtttgaaagtgattgatccgaccttctccacatcgatgaactcaaatatctacagcagtatgcttgtataagtaactttctcaaggcataaatcatcatacggatgataagagcacaaccatagcgacccataaagaagaaacttttactattatcttaactaacccttttagaaagagggcaaggtttcagtttaagaccccgaagaaagtcatgtagcctaacacgtccactgcaaaatggataaaattcttgaggtcgtagggaaacctgatattttatgcactggaaagccgaaagagatagtaatatcacttttgtggttacttagaggagaaaagtcattacctcgagtccggaatcatggaaacaaatgtatccaaaaatcgcgttgcctctaagctgcttacatggaatagctggaaggaacaaacacagagcaacataatcactagggagacgaaaatagggacattgaatgaacatatataccggacaccatcaaaatagtgaggttcaacatatttatctacagtttcatgaaccctacgaaaaccataatgaaagatatggttctcctcaatgtaaacgagaagcaacaaatttttgtggtgtttagatgataaacttaccgactcaactcttgccatttcaaccatgtaatttgaggggttctcctgcaacagaacatttaagatgaaataaatgatcagccagaagaactgattcctgacatggaagttattttcaagcttccatggacaagaatacatgatttgtggctcagtgtaattgtgaagaaactatgagacatagatcagagagaaaatgaaaagatatccaagagagcaaaaccactcatgagctgcacataccagctttaactcagttgctttgttgagtagcatcaagtccgcaaaagaatgggatgtttggacgacattcaaagatgttgcaattgcatgactagtctgtattcataagtacaccatgaggactacttttcaccacaaaataagcaaaaattgtagaaaagtaatctccatatatagttatatccaccaacacacaccttctgtgagagacgcacagcattctgcttttgcttttcactgggatagattacaggaagatattcaacctgtttgatttcgaaaaaaagtttatccaaatgagtgaaagtctaaaaccagacaatcaatcaactaagcttacgcgatatgcacattgcctacctccatgaaattgtgaaactgagtgaacattctaaacatgagcgtcaacaaagagatatttcccctgaacgtgtcaccaaaatcatgaaactgtaaggaggcagtctattttacggagaagtgtaaagtgcggaaaaaacaaactagtctcaccaggattgatcaaaatgtacatggggataccggactactacaggttgaatagggtaaccagggatgaaagcaccgagttggaaggaaataagaactttcccattagtcgtggttccttcggggaataacagcagacgaggaaatctatcgcaggaagcttttctctgtatttacatccctgaaagcacattccgtatcaaatacaaaaaaccatttgaatccttttcaaccaaaaatagttcacaattcatgaaaatggtgtatacaccaatctcttctttgatataacacagtattaaaaatacgacagacattaaaataaaaatgtcacagaaactctatacctttatttcatgcacagcattcttccttgatgtctgtgagaatctattcacatatatcacctacagagttcaaaaacaaaacttgaaaaaactttgaatctaataactacacaacagcatcttaaaccaatatgtgcaagctgacctgcattgccctgataatagttccaacaaatggaagtgaatcatgtgactccgatgcaacaatggtcggtgataattcatagaagtagaagattggttcaatataagaaacatgatttgatacaacaatcggagcaatctctctccgagcaggtttccctttccttcttatccactgatagctacagaaccaatgaagatatactaacattagagaaactagcaaacatcatgaaacaaactatctaaacacctttgaaaccaaattaaccattcctcaactccatttctctatgactcaatcaatactcagcaaaacagtaactttaaaatctaagacttaaaaaagacacaaactttgaatgcaatcacaaagtaatcgactgacccaaaagagaagaggatacatctggtacagatccgagtaatccacatgattctgcatctccaaagaggcatagggttctctttatctttccagccagcaagtgccaattttgtagccaagtaaccaacagctaagctagcagcaaagagaacaagtctaatcagagcaatcggaagacaaatcacgagcttaatcgcttcgtacaatccgctaactccaggtgtattgttccggaatggatccaccgtcgtcggaccgagaaccggaggctctgactcgctgagaaagccataaggattaagatggtcaaactcaaaacctcgtgaaacacgagggtcaacaacggctggaagaagattgagtcctgactcgtcgtcgtcgtcgtcggcgatagagataacaacttcaggttgatcggaggattgatggtggatcaaaggagaagacagatcaggatccgccattctcggtgtctgtaagaagaacacagagagatggaggaaagagagagagagagacagagcgggagagattggtacacgcttgtggtggaatgttatttgtttctttccaatctcctttctttttctttcttactgttaaaaaataaaataaaatagtattagtatttattattcattacatgttggagttttgtttattctgttagaatatgaaacattatagaagttaattaacataacgagaacaactgtttactagagtatacaaatgacaagagggcacgataaaggtttcgtcaacgcggacaggtaatttgtataaggattatgattgcacatggattcggcatggccttgtcataacatactttaaaaaaacttaactatgtaaagttattaatttactaaaaacagaaattatatgattccattttttagttcggaacatggatgttgttcttgtggaggtatccagattttctaaaatatagataacatccagaggttaataatccagatatttgaaaacagtaaatcgttgtccaccccttcattgacatcttggtcgacataccaatagaataaagcagatgtcgaaatcgttgacttgaaacgtgtgtcaaaagataatacgccaagtcttttgcgttatttcattgtaaataggatacaattatcggcaagtaaaaaaaggagaagaattatatatatttagtagaattttattagtgacataatagataacgatttggtttcttgagcctttaacaacttactttgaaatcattgacaaatattacttcacataacttgaaaaaagaacgaacaagaaagaaaagaataagtacataagaacccaagaacataagagaggatttcgacaaggacgaagcaaaattctaaatgataaaaacaattgaatacaaacaattaaattaaggctaagaaacaaaaacaaaaacggtgttcttctgcaacatgaatcgtagcaattgttatgtaagcaattttgtgttgttcgcaaaataatgggccttagtcctaaatgttatgtaagcccatacaactttttcccttttttgggcttaatcaagaaattaaaaaagcattgggctggtttcccgctgtttgatttaaaacctttttgttttttaagaaaaataaaggaacatttataaatttataggccaactatatataaaaattaatgaggtccactgaaataaaagaagagaacgacaagtcatttctctaagtccacgaggaatcctatagccaacacttctggaccttttttccccatccacggccaccaagttggtttaggcctccaataatacattttaccttgtgtttaaccttttaaagttttacttcctacatatcttaaaaaaatatataatcaacggtgtgaaacggagaaccatggtttaactttaaccaaccacacttgaattataaatcaaacataaacaaagttatcttatagtaaatcctgtctggcgttgagaccgtagacaagaagaaaatatctactactactagtactaattaaacaacgaacgaaatagaatcaacggttaggacaagacgatggaattgaacggtaaagattagatagacacaagtatgacccacgccaggctgttcctttatttccttagcgttaaactggtggtgctgacccaactaggcgtcccttgagtgggaagctttcaggccccacgaaacaacgccgtattagtggtacaatcaagcttactaggccccgccaataacacggacgagacttttttcgcaaaaagcttttgtaacacttgtaagaaaatggaatcatttgaaaagtaatgctacaacaattttaggaaaacaacattagtattttcattttagatagaaatatttattttgttacagattttaataaaatcaaaacatcaatatcacaattgttgttgagtggaccatgacttagagagggcttcaataaatcttattttgtaaaattacaaagaccaaaaaagtcaagacaaagtggtgagcccccaccaaaaaaacgaaacgtttcgaattatgcttaagcttaagctggtcctactcatacggaccacgtagctctaaccatttggggaccacacccaacctggctgcctcggaagctatgcgtaaggtgggagccgtgtggcccctctcctcctccctccactctctttttggtgcgtgttgacccacttctgcctaaaatcgaggcccacttcttaacacgtgcacttcttcatgtgcacacgtgctttttttccgatcactaatacgccgccgtttcctttcttttcttcagtggttcgatgaccgtgctgttgtggtgctcatgaactggtgaagctcttgtttctcgtatatctctagggagaagtctctcagcgtgtgcgtcgttgttgttgcaattgacgatgaactaccggttgttacgcctgagcttgagctcggagccataaccgacgtcgctcttgataaattcgaaccgctaacgtctgaaacggatacaaagccgctgcttggaacaacttgtaaaggaggtggtctagccatcgtggaagcctgttgaacagcggcgacgtaagacgacggcgaagcagcggcggcgggaaaagctaataactgaggctgattcgacggaccagcgatttgtggaatcaagaagaaagctccgaccgtcggaatcattgcgtttgatggaatagcccacatcggatacattccttgcggcagaagttgctgagccacagtggatgatgccagagcttgcggaggttggatcgttgtcgtcgtggcaattggagctaaaccggaggaagctgaaacggcgtcgcttatgtctatatactcactgttagaaggtcgtttacgtttcttcttcatcagattttcacccatatcagaatcagcgttcgtcgtcgtcgggatttttaaggttccgttaaccgacatggcgatggcgggaaccgttcccgtacccgtggcggctataatcgccggctcagcgttctccaacaaccaccgaatcgtttcgccgtcggatttgtgacctaactctcgagttaattgaaaaatcctagccgcacacgtggcaggcatccgtatccttctccctcttccttcaaccttcgtgtgacggtctttagtcgaagctctcttcaatggtggtcctgtcgaagacggtggagctaaagacattgaaaacgacggcatcaccggctccgccttgggctcgagactcactgtgggatttacttggaaaggtcttgaagtttcgacgtttctgacgccgttgatgatggttagatcaacggctcttagagtttgatctttgcctgcaacttcttcaagcttctgaattgtcgccattaaaatatagctgagagaaaacggacggtggagatgacgacgagagttgttaaaagcggatacaatgggaaagaatcgttttaacggcgttacacgtccaaggagattactaaatgtgactcgtcaggatatatatataggagcaggaaaacaagtgagaatagtattcaacgctttttgatgcgggaaaaatcaacggtcctgatgtgttcgatgagctttaaagaaccattccgattgtaccacgtgaacaaatcactttccattgctctatcttctatcagtattattatgggaccatctgtacaatggggtccagtaaactttatttctcttttcacaaaatgtttttcttttattgtttagtaatatacttgttttttaacctaagaaaagcttcaaaatccaaaatcagaaactcattctggttagtacttactagttactagtacactcccaaatgaaatacctagctttgtacaaaaatttccatcgctgatcaaatttaacttttctatggttggaaagattttcaataatttttattggttaggcaaaaaaagatttactttaattttatggaaaaagctgtaagcccatacttggggttggaccccattaatgtaggtcacaaggctgcgccaccaaaaagctaattagtgtctatggaataatcctctttccaggattccaaaatcctcctatcgtccgtcctttgattaaaccggtcacatacatatacgcatacttatgtacttgtgtacttgtacaatccggatattaaacatacaaaccgaactagaaatcagatcaaagtaatcgaaatgattgtaagttcgacggtaactagatgtaaccgattcaaacttattttgattcgttggtacttgtttcgggtttgaaccactagctatgctacttgtacatacgaccgaccagaaagagggaccgtaagcaccagaaaagaaaggctacaaaacgaaaatgtgaatgtgggcctgagctggaccctactctcttcagttccacacattgttgagggctaggcccaactattcgaccccaccattccctacccactcaaaaatcaaaatattggcgataacgtggccttgagattaacaaacaaacggatccgggattagaattaaacaccaaattataaaccggtcaaaccggtagtaaccttttaggcttaaaagttaaaccaagtgggttccaccttttccgattacagattcgggtccaccacagagggataatgttgtaattttcgcagccaccaacttttgcctaccatcagcataccattcattacgccagcatcaataatttgggctgattggtaaatttgaggttttggattccgatgtttttacttttcactaaccacacaatttcacataaataagtgtagtatttcttacaaaccatttaatctttaatgatgcttgttttattcgtatcggtccatttctttagacatagagaagcttatctcttcagatacatctgtctatggttatgttctctacctgttgcaataaacacaatttctaacaaaagcctgaaaccattccctaagaaatctgtaggagcctttgatgatctgaaaaagcattccaacaatggcaatattcttccgttgcatataaaccataagtaaaacgcttaacctcacgatcccgatatgtaagtgtaccgtgactgagctccctccaaaagctccacaattttctctgcaatttccatgagagaaccaaaataaggtcagtagatggcaagtagacaagacaatcagtgatctcgtgaatgaaatgaaagctttaaaaagtaaacctgtgaggaatccgatcaatggaattagttccagcttcttttgagagctttccagcttctgcctgcaattgcaagacaagcatatttgatttattagtaacccgcgatagcttaagctttaagcctaaaacccagggataccaaatctaatattaacataagagccaagaggaaatgaaccacttcggtttcaatttttcccatttcagaaaatgccataattgaaaccataagaacactcaccttgtgtacttggtgaagaatggatctctcatgaggtacaatgcccatatcagttttcgtctcctcagctgaagaagtaacaagaatatgagttaaatcggttcaacattactgttgtattgaggtccaagagatttctaacctcatccttttcaggtcctgagaaatggacttgcttgctcttctctccccaccacttcgaatttgcaagaagacccatccccagtgtgtccacagaaagcgatatagcccaaggaatccaagatcggactccatattttctgatgaaaagaacgtaaatgagcggtctcgttatgtaaagaacctcaccaatcgcaaacaacgctccattaacacccttctcagtaagtagctcggacatcgttcttcgcctctccttgatcattggaggctctataactgcttgctgatgttgaattcttcgagaccaaccgggggtagaagatgttgttgttcttgcattctgaccaaatgaacttaaagcagacatcgcccgtccttccaagttccatggattatgatgattttggtttccaagaccatgaggcccgagatttctacccgaattaccagctctattttgcgactcggattggttagaatctttctcctcattaggtgtttcccctccttgaagaagcatcttatacccactattccggaacaaggctaacctaatgacagccctgaaaattcaaagttttcaagatatcaaaatgccaactaagtaggttgtgtagatccaagtgatcagaagaaagcaagcttacttcatagcttcagtgagaataatgtagttccattttttgtctccatagaagtgttcagctgccacttccacaacagtttccaaatccttgaggatggcgatgagtagtggataagaaagggatggatcattcccggaagatccaacatggccacgaggtgttggagcattttcaattatgtgttcatttatcgttgagaatatgcccaaaaaagccgttactacaaagaagattaccaaaaaacttcaatcacacttccatgaacacaaaactgacaaaagaagaaagaaagaaacattctttggaacttgaaggttctaatgttaaagacttaggacacgaaacatgtgaggaggtacaagtgaagtatgtaatttgagaagaaccgataaaactgagtataggacagtgttcattattcagacaagagactttaggagctaacagggataaaggaaacagttattctaagattgaaagcagtaaaatgttaccaaagtatcacaaaacctgcttctggtccaatctctgaagcagaaaacttctcaggaagcagccatgtcaatccctgcaacaaaacaaacatatttgacgaactatcagctgatgaattccacaactacgaattaaaagatcgaactgattcaactcttaaattttttcaaagggttttcattcttaaacccaataaataaaagcttcgattttaaaacacaacccttcaagcaaaaaatattcaaacaagcagacgatgaaaaacttagaaattgacactaacgacgagacgaaaacaaacccaaatcgacagagaatcagaacataatcaaactggaaaataaattaaggagaagagtaataaaaatgaatcttacgttggcaaaggatccaaaggattgtacatactctctatttctccaaacccattgcttataagcttccattgagcttcagatagagagaaacaaaactgaactttgctatttctcagaagaaattgggaaacaacaaaattccattcacgttaaatcaatctctgattttctttctcttcctggttgcaattttgccggtcgctggaaaaatatcaggcaccatctattttctattttcagtgacaaactaggaatcaatatcgtccgttgatacgttacagttcctgtaatcaacggttacgatgcgataagtaattttttaacataagatgatgattcatcgggaaaagtaataggccttatcttgtagtatatttttaggcccaattaaatagcccaacatgtcttcaacctgaacgatgtcgttttacagtgaacaacaacaccacacgaacgaaccctagaagagctgggttttgaatttggttcctcctgcaaacatcaacgacgatgcaattaactcttgaattcgggtacgattatcacttaatcttttcgtaatcggagttttgttattcgtagcgtttttagtttttacctcactaaagttctgattttgacttggtgtcttttgagattattttcctgattgattgtatgtaatactgaaatttaagaacttgaaccatgtgtgtgttttagttgttgttcaatgattgagaagagtgaaacttgacatgtgatgtgtaggggtgggttagagctgctctgtgattctgaaaagattcataaagtaaacgttgatttgcccaatggagctgactctgatgatgtaagcttgagttcttatgtttttggatcataaagctcgcaatttttctctcactcattccacttttctgattcctggattagtttaccatgaagcatttgctttcatgggttcgtacaaatctgatcaaagagagacctgagatgttcatgaaaggagatactgtgtaagactatttttcttctttatcagctcattgtaggttaagatttcattaagacttctttattaagctcaatgaaggttaataactgttgtgcaggagacctggggttcttgtgctggtgaatgactgtgattgggagctaagtggtcagctcgatacagtaatcgaagataaagatgttgtagttttcatttccactttgcatggtggataaaaagatctgattgtctaggattttgtaacaaattttgatacttgttgtttgtaatctctacgactacccaaactttatgtatttgtttactggaagattgatattagagtatttatcaattttaagtgtcctttctaacagatactttatgcgaatctgcatatctgttttctatattcctcattgaattgcagcaaactcaacaattccatgagcttggtctcttattacggatttagtctgcaacttgcatttcttcagtggaaataagtaaagaccaaagtagttgatataacaaatgcattcggagtttgtgatgaaaaacactacataatcatgtggttacataactacaattagatagaacataacatatccattttcgttgtagatctttgacgtctctgctcaattggtagtcaaggaggctgcctttttgttgcaaagcttatcgcagatgtaaacacagttctacgtaaccaacaaagacaccattgcagctgcagagtcaggtccatcattgtttacactcggtatgatgacttcaggtgacactttttgcacaaactcttttagctccgtgaagctgctatgctcactgtaaggaacctcgtacctgaaatatatataaagattctccgcctcatgattttgagcccaatgccacaggacatgaagataggcaaaaagtttaccttattattgtaccctgttgcaaccttcttcctggggacttctttttagtcttaccagatgtccaaccagtaggagaaaatgcaacgataaggctgtaacggttctgcaggacagaaaacagtattagaactcaacctctaacgaaatcagccaataagattatcacttcttttgtttttctttgacagtcaaaccgaatggatgtgtttcttactgtgtatcggttagctacatgcttcagccgtttgaaactggcaagcgtccacaaaggcacaacgtgaatgtggctttcctcttccttcactgtaaaccactgtatatcatcctttgagaatcccaaacactcgaggagttttagtttcgcaggattgatgtatatcttttcccgtagcacacgtgcaacttccaagaacagcctctcctttcctttcaaaagagaagagatggaagaatttagatctcaacatgatatatcgaaacggaaaaagaagagtgaacatattaccgatggtgtagcttccaattaagaaaagggtcttgggattaaatgcttctgcttgaatagcctcaacaacaaactgtattaccgcctcttgctttggaaagtcatactgcaaacaaatgatgcatttgtatcaaaccactcttgctttgaaaagaaaacgtaaactctaaagttctcttcttcgttcaacttaaatgtaagatgaagaaatcgcaaaagagtggaaatcatgcaggaaaacttgtggcaaaaatggatttcaaatacgaattaaaaccgaatagagttattaactgaaaaacttgagctttctttatgctacaaagtattgatggatgacgaacctgggggttacagtatgtagtatcaagaataagagagctgatatgcgatccaatcaaccaatttgacatctcttcactatagcggaaatcccccgtatgtagaacagcctatacaaatcaacagagtccatggacaattcctttgtgaatggaaagttaaacataggcttacgactacacactgaaagtttctaatttaagaacgcaccttaccgttggctggttcaaagagtatcatgatggatcccggacagtggtttgcatcaaagcatgtcacatcaatgcctgaaatattaaccttctggccaaggtccaggacttgcagtctctcccaaggtatcccaatcttcatatttaccaactttgcggtaactaaggaacagtatatcttcccatgactaaatgactttgtcaaaccttgataatctgtgaatgagaatacagagactttaagcattgattccacgatatgcaggcttcttctgtgtagtaatttataattagacatacagctgactacttacgatcgagatgaaagtgtgtaagaaaccagtggcaacaatcgcgtgtgaggtacttgaatgcgtcctgcatacatatattaaaccagaaaagtcaccaaacataaagattacttaaaagataaatattcagcatcagcatgacgttttaaatctaatttcatgagcatatttgacttgaatgagaaggatgcatatgtaataaggttgttgcattcatgcggagaagttaaaccatgacctagcttgttatgtaacattaccactcgaaaaggtgtccccggaatgcaattccaatgtggaataactttagattttccgttgttgccatttcttctcacagcacgtctagagctagaatctgatggactcttttctgcgacaggtttaggggctgtccggatcttagtgccctcggtagcctgaccagggaaaaactctgtaatcaacttgtttgcagttggttttttgggctcacttgccttacgagtggttgacttatctctctgtctctctgtaacatggccacttgtacaatgagactgtgcctgcacttcagcagaagatgcaaagggatctctaactccgctaagtgcattcacaatcttctttctgggaccaagtgacgtgatacctatgcttagaagatcctgtggaagtataaccttgtcaatactcaattctgtttctctgtgtaaataaataaataagtaaactttagttccattacctcctcagtgagtgactgaagggtatcccagtcgatctcttcacgaataaaaacatcttcatatttagctaaacctagactcctaagccatttcagcactggagacaagtcggtaactagctgaggaagctgaactggatcatcaatcgattcttttataagagaagacaaattttcgcatttcctcaaggagtcctacaataatcatatttacaaatcagcagtcaatcaatggcgtaacgatgtaacaattgaacacagtatacttcattgtattaacctaaattgaaggttgatatcaattccagttatgagataacaaagaagcttacttgctcagaaggctgattatatgacttatcaagacaagtattgctatgaacttgcctctgctcttcactcaaagatgaaatatccatggaacacaatgggcattgaattgaatcatccttgcctaaactaaactctccactcctaccctcagactcagagcaaaggtttatcaacacatcaagctcagagttagactcaacaaaaccttcatcatcctcatggattccactatcaaacccgagacaaattctcgatttcaataacctagcctccatcgaattacacaaataaccttcacgattcacctttatacagtcgtccttatcctctttatcttcttcaccaagagaagaaattggaccattgaaatctcctagagagcaatcaacactagatgggatacaatctaagatacagtgaggagtagaagaggagcagaagagatccggatccggagaaggaggcggagtcacattttctttacccgggtaacggcagagtctgggctttttgttaggagggcggtgagagatgttgttagcgttggttgggtgaagaggttttcgaatcgaaagctgtgaggaaggagggatctggaagtcgtcgtcgtcatcttcgacggtgttcgacatttagataccggcgaggcaaaagtgatagaagctccgtgttcgtttgagtgttaagtgttaaaacgacgaaagcgaaagaaagaaacgacgacgtttcggtttcaaaagtaggataagtcgcatttttatcatttgttttaaatggagcaaaattaatttttaaaaaaattgcggcaaaaacttgtgaccattttaataaacaagagggaaaaggaaaataaattgtgaagaggataagagcaaaaatggtcacaagttttacaatatttttttaaaatttcttactattaatatactagttttttcatcaccaatactcgaagtcagaccattaattatttttcgaaaaaaaaatcattatttattgtacattttttatgtgttgatttttttcctttagttttaatttcttgctttaaattagacaaaggtttttcaaaattaataatgtgggattgtgaaatactaaaattttaggtgggagaagaaaattggtccattatttagcccaatagagtaaatctatgatggaccggatctaatatttttttcagcccaaaacgttaatgttgacaaagttgaaaagaagaaatattgacagtgggctttcggaccagaacctataagtcggcattgttgtgcgaattagggttttacatctcccaagatcatttgtcggttgattccatacgatctccaagtcttgtcgttgcagaatctctaagaagctaacgaaaatggtcagtactcatttctcaatctttaatctcgtttcgattctcttgtttagaacattagagactgccttaatttcttttccatcgtcgaatctgatagtttatgtggcgaaaaacaaagaacatatcaaattaggtttcaagctttgtcttttcttagggcaatcattaggttttaagagttttgaattaggatttcttgatttgattccttcaccacaagtccacaagtgagataattgactgattctggtaaaaaaatctgtgtaaatttcaggtccttcaaaacgatattgatctgcttaaccctcctgctgagctcgagaagaggaagcacaagctcaagcgtcttgttcaatcacccaattcgtttttcatggtaagaactattctttgttaattccttcatttcttgaaagttcaaaccttttagctgcctattcactttgaatcttcttgtcaattagatttggtttctgattacatcttttgtatgttatgtggttgatgtaggatgtcaagtgtcaaggctgctttaacatgtaagctttttttttaaagtctgaatctgtaaatgtttttggttataaatctatatgaaataactaagaaatgatgggtttggatttggtgcagtacgactgtgttcagccactctcagaccgttgtgatgtgtggaaactgccagactttgctctgcacacccacaggagggaaggcaaagctcactgaaggatgctctttcaggaaaaagtgagactgaagaagaagatatgactccattccattcactcacccacaaattttcttttcgtttattatgaatttttgttgatatttgagctagtagtaacccttctttgtcgattatcctttgttttaatcagcgaagctcgttcctcttttatgaatggttatgtattttcttgaatattcatgacaatccatagacgatcttcggagtttccactcgcagtagtgaaaaaccatcaaaagtcaaatccaaaagtttcgatgatttcataaccgcgcgttcatagtcaatgcatataaaatcctaaataacaacaaaagaaaaccaaagaagagatctctagctccaacaatgtacacagcagaattttttatgtgaaacccgagcttccacgatgacgacgaatatcaagaagaagcggaaactctaacagaaagcaccaagacatcataatctctctgagatgtgtagaagccgaagcagaagcaaacctgatggatcaaaccccgagattctagatcttccaattagtaggattcgtgcaaattttgcgattccagaatttcaatttcggatcgagaactgtcttccagagagacgaaaacaaacaaggataagggtattggcgtagaataggaagttctcgttttatattgggcttcaaatttaggcccatcattacaacatgacaaatagtcaaatacgttgcgttttgatccattgatattttgggtccaattaaaagtttgatgaaactaacaaaatttatctatgaacaggaggaggaaaacaatagtcatttacttatcatttgatctaaataattgtgaaatgtgaaaatcatagtgaaactgggttttgggagtactggatggatttatctgaaggataaatgtaggtgctaattatttcatcgtgttaatattaccttaaaacgattatgaaaattggaggatgattagctcaataaacccttacattaatgatctaaatgataaaattaattaatcacaaaagccgacaagtgcgtgccgtttcgtgcacgttaagaaggcccacaaagcctcacgcgcctcggtcccctcgacactttctcccctttatggccctcaaaagccgatgatgcttgaaccaatggcatttccgttaattcaacgaacacgtaaggtcaattttatcgattggcacacgtgacgctcccgagacgactaggctcatacgtccacgtcagctaatcaccgagccatttcaaattccaatcgtataccaaccgttcgaatgttcgatggaactagagccgttcgatcggaggaattcgaaaattctcgcgatacgataaaaatcgtgcgttacggctctgtcggaacaaatctaaagctgactaaacgactctgacacagctaacttctctttgtgaaagagagtgtcttctgcttttgttttttgattcaatttcgaaattcaaagttctgcaactaattctttagagggattctatcgtccagacagcgaacccagaagctgaagcatagatctttgtttccaggtaattattaaatcgtttaatgtgacagagctctgggtttcaattgtttcttcatgttctcttttgaatctcttgcatgttacacaagctctaaggaaaaaggttttttttaaaagcattttttgttccttttcttatagtaaagacaagttgtggatttgtcaccaaacttgtgtgtagtgtgttttagtggagtttggttcgaactcttatgaagtttttatgcatacgatttgttgaaaaagactcacatcttctctttaaaacaaagtctctcttctctctttattgcttttcctcttaaaccagcttaatcttcaatctttgtggtttttgatctgtgtttgaattgaagctcttgttcctcagaagggtattcttgtcttttgactttcgtttcccaggagccttctcattaaaataaattaatacacaatcatgtaatagaagatgctgattgtgaagattcttgtatttgtttattatcatatcattagctattttgtagcatttattgttcacaccgacgaattaaaggaagttggaaaatgacttgtaaaacttttgtctggtagggttttgttctccagcaaacaaatatcgataagcttttctgtgatgattttcaagattctcgaaactcttttgatggcttcttcctttttgttttaaaatccgtgtccttatttataacaaatctaccaacttgttcatcactcattcaactactcccttcattacttttttctattacagaactaaagtatcaattatttgccagtgtgtctcatcattcatcaaggcatatttgatcctttttggctttggttttttgtttctacaaatcgctaaagtttttgtttttgttttcttcttttgtgcaattcagtgctacggagtgcaaggattgtatttgtgtgtgatcatggtggaggagaaaacgggaaacgtgactctacttgatcaaacagttgaagatttgttattacaggcacaagagcttgtaccgatcgctttgtccaaagcaagaacagtgaaaggtttctcaagcagatggagagtgatcatttcaagattagagaagataccgacatgtttatcggatttgtctagccatccttgcttctctaagcacactctatgcaaagagcaacttcaagcagtcttagaaactttgaaagaaaccatcgagctcgcgaatgtttgcgtaagtgagaagcaagaggggaaattgaagatgcagagtgatctagattctctatctgcgaagattgatcttagcttgaaagattgtggattgctaatgaaaacaggtgttcttggagaagttacgaaacctttatcttcttcgactcaagacttggaaacgttcagcgttagagaattgcttgctcggcttcagataggtcacttggagtctaaacgcaaagcgcttgagcagctcgtcgaggtaatgaaagaagacgaaaaggcggttataaccgctctaggccgtaccaacgtcgcgtctttggtgcagcttttgacggctacctcgcctagcgtaagggaaaacgcggtgactgtgatctgctctctagcggaatcaggcggatgcgaaaactggcttatctctgagaacgcattgccttcattgataaggctactagaatcaggaagtattgttgctaaggagaaagcggttatttcgttgcagagaatgtctatttcatcagagacatcgcgttcaattgttggtcacggcggggttggtccgttgatcgagatttgcaaaacaggggactctgtttctcaatccgcttctgcttgtactttgaagaacatttccgctgtgcctgaagtaagacagaatctagcggaagaaggaatcgtgaaagtgatgattaacatacttaactgcggaatcctattgggatctaaagaatacgcagcggaatgtcttcagaatctcacttcaagcaacgaaactcttcgaagatcggttatatcagagaacggaatacaaactctgctcgcttacttagacggtcctcttcctcaagaatcaggagttgcagcaattaggaatcttgttggctctgtttctgtagagacttacttcaagataatcccaagtttagtccatgttcttaaatcaggttcaatcggagctcagcaagcggctgcgtcaactatttgcaggattgctacctcaaatgagacaaagagaatgatcggtgaatcaggttgtatcccgttgttgataagaatgttggaggcgaaagcgagtggagctagagaggttgctgctcaagctatagcgagtctggttacggttccaaggaattgcagagaagtgaagagagatgagaaaagtgtgacgagtcttgtgatgttgcttgagccgagtccgggtaactcggcaaagaagtatgcggtttcgggtttggcggctttgtgttcgagcaggaagtgtaagaagctgatggtctcacatggagctgttggttatttgaagaagttgtcggagttggaggttcctggttcgaagaagcttcttgaaaggattgagaaagggaaattaaaaagtttctttagtaggaagtagaagaaaatgaagcaacgtggtatatatataatgtacttgatatgtttcataatctgtatgaaacttagccaatgatatcttgtttggtgaccgtatccgtatgtataataatgtattttgtaatgctttcaaatgatcggatgcactaatcatccaaaaatagttcaagcgtatcagactatcagtcttcaggtgtggtcatacaaaaccatcaagaaaattagaaggtaaatgctagtattaacttcaaatatccgtcaaaattttcaattattttcagtgttctcataatctaagcccttaatgttacaacaacaaaacaaccagaaagacgttgtgaaagaaaagaccaaacatcaaaccacagtttctggttatgaaaacaacagtcaagtggtagagattctgatgccactcagaacatagcctccaaaagaactcatctgcatgtgagggtgagatcttgaaggaagcacctgcattttaaatatacatatatcattcaacacacttcttgatgatctagtgagattattataacacacacacaaaataaaaaaattgagaatattatcagacctgatattcgcgtagccatggttctgttatttgcagattgatcgccattttaccctgttgaagcttgtgcatacatgtcgccagcggctgtaataattattatgagagtttgtttattactaccaaatataatgaaaagctttgaacaagttcacttagctataggtctactgtatctagcctaaagaccaaatgaagcagattagagctattctaacttggttagagagcagttagtaatagttttcttctaacgacatacctgtaaatactgatgatatattgcaaaaggagcagagtaggacagtagtggcaatacatccttagctacgatccatgggtcttggtcttgcgcagccatgattagactgcaaatcagacaattatatttaagtgatgagccaaaccattttcattcacaggaacacttatattacttacttacctcgaaaaaccgttttcttgccacatctctattgtttcttttgaagctttggctccagcttttgcggctttgataattttgctctctggtacaacaatatctactactccagcctcagttgtcacagatatttcttcaaccataacatcagatgtagctgtttcctgcatttttcagttaaaaccttctgttacaatcacaatatatttctcaaataaagactcaagtgaaacagtataggttggcaacttgcattaatattgttctcagctttgcaaactccttcttgttgattgtttccttcagtagacgcagttttggctgacgagagctcgtttatcgatgactgcacgatcctacacataagaaaaggaacacataaatgtcaattacagttacatcatatagaacggctacaattagagaggctagagagaaaagaaaaaaagactagggagaccaatcgaacatacctctttaaaaccttgtcactaaagttgaacatccttaccatctccacaggataaggagaacttcccttatatgtattgcaaacataaccagtgcctgttaaaaggaatatatacatataagacacacagataaatatgcagtggtcttattaatgtgatgtaggattgcaaaaagctatatacctcctaatctttcagccactgcaccagtgacaaggccaccaaccatatccaccacaagcacatccgagtatgcagtgacattagccatcgttaacagaagagataacgcatctactcgtaagaatctacaacacacaaaaaaaaaagatatacagaaccatcaatacataattcaatctcaacagagaaaaaaggattcaggatcttcagaatacacaagtaaagaaaacaaacaaagtgtacttacccaattctggctgggtatttcttgaaataagcttcacatatactgttaaacataaagagatccatccataagagaaacggaagaagtcagaaaaaaaaaagacagaaaaaaaccgaacaaataaataccttcgagcaaaaggccgtcgaagaagcagctttggtgcatatttcttctgctttttaagcttatatttttcctacaaagaggtaacaagaaaaatcaactatatgtctcccaaactttcaaaagtagaagcagagagattcattaacaatataaatacattacctgagacaactgaaacttcttatcaaaagttttgctgtttgcaattagagcttcaataatttcatccccttttgcaccctctctactcataaaagagaaaaacgttaccaaatcttccaatgtacgcattcaatataataaacacagacgatataaagaattc

SEQ ID NO: 380 - DNA, 101647 bp, Arabidopsis thaliana
gaattctctcacatatggatgtgcaggattatcagcattttacagataagcacatactttttaagtattcagctgcattggtaattatgagttacaactagtactttgctaattccctattttaatcattttttgtgtgactaatgcccttacttgttgacagatgaattttcttttggcgcattcatttccgtaaatctatttctgatcacaacttcttctcgagcacaagtagctgctgccctgacctcttcttctgacaacccctgcgtcaaaaacggaaacaggtaaggtactatatatccactatacctttgaaaagaaaaagttctattttctgaaacacgcaaaagtcaacatttaagttaaagtttgaagaattatctacagagtgtaatggatattcgctgtggagtagagaaagcagtatgtatacctgcaatctcgctgctactgctgcagcatttgctgcctcctccacttcctgttgattttttgtggcagtaatcttacctccaagtttatgaagataatcttcggtttgggtcaaaaatgaagagagaacagcatatctttcagcagcatcaccaggcatattagtttgctgttccagcaacatctccctgtatctttctacatcattattcttcaaggcctccatccttttgttgcggccatcatcttttctctttgaaaactctctcaacatcttttcatggtatttggccactcccctgttacgagcagtgcgtgcatcacgtatagcccaatgagcctcaaggagtttcttacgccactgaaaaatggttttcagctgcttctctctgacagctttctgattggccagtacttgtctattcatttctaggcgttgccgttcgcataacctcacaaatttgcggtacggcctatccggcatggacattatctcctgttgttgtcgatctacttcctctctaacacgagactgaagatcagatagcctaagctttttctcttcaatttgaagccgtaaaacaagatcaggcctaatccttttcctttctaaattttttgctagcagaccatttatcttcttcaaactgtctgttcttttcttactaaggaactctgcaccttcttcacaaatcagatctttaatatcatatgctaatgtgagattgttattggcattggctgttgcagacccataagagtcaagttttcgagtgaaaaagggaaaatcaaacaacggtccataatatttcctggcagaggctgtatccttgggcggctggggagagtttgcttgtggaggaaccttagattggcttccatcagatgcaacagcctttcccttatcagctgtagaatcacttctaggattcttttgagtactagaatctgctccttggtctgacttaacagggaatacatcagtctgttgctcctctttcgtagccacgtcagtagaagtagcttcttttcccaggttttgaaataattggctgtggcctgtcgtcaaagctacttctgtatctccaacattatcttcctctttagaaaaaattggtccatttgaagaagcagcagcctgagactccttgccacactctagcgaccttgcttggtcttctccagttttgtctgaagatctatcctgaactttccctatggcaggagatatttgcctctgcgtctgtagttcaagcggtggtggagaaatagcttgaagaagctccggaggcaaagaaccttcccctttctgtcaaaaaaaagcaattaaaaacattcaacctggcttgcagacacgttatttataggcatacatctccagcaaaacatacaataaaaatgaagacataaggaaaaagtcagagctgaaaaccttcaaacgcctaaatgccagtatctgggctttgagaacatggagttgctgtttggtaaatcctgatcgctgctgtgcttgttgggtcccctgtccactctgaagggacgagttactgagtggaccagtatcagatggcgctactaaatttggagtcggtgtattcagttgcctaggctgctgcatttgcaaatgttcagcaggacctaaacttttttttgtagatgcattctgatccaaaacaggagtctcatttgcagaagtctgcaggggatttcctgagggcatcccatttgtaggctgaactaaatgtcgaggatacattggattctctctcccttggccggagaagggattcatagcaggattgaccattctgggactggaagtcgaggcaaatgagccagtagataatgcatgtctggccttcgctgatcctgactgcccagagatatcactagcagagttggcatgtggtgaattctcacctggaacaaccgaagatgaagccggctggctagagattggaatagatggtgactgtgaggccacattgccttcaccagctttctgttgagcagccattcttgcctgaaggatgtgtgccatttggctggcgttggcaggatgtgagagatcgatattacgctcacgcgcccatgcctgcattgcctgccactgttgtgcaaatgcgagttggttgtttcccatgttattgacaagctgctgagcctgtggtgcttgcattggccttatcatatttccaggcattagttgtccggtacccacctgctgctgaggatgagattttgtttcgttcctttgctgagaacttgattcagtctgcctttcaccgcgagcaaactgatcgcccgatggcttcgatgatgaggcctggggctgactagacggattcaagtcttgcatattcaacattcccattcgtgcatcttgatcctttcccacacttgatgaacccaccattcccatcctagcttgctgctgtgctttttgatgctgagcctgcatagcaaactgaatatacgcttgctgcattggattaaaattttgctggccctcttgggtagaagaaccctgttgttgttgttgttgttgttgctgaggagactcaaaaaaatttctagactgctgaggcatttgcatagagcccggagacgaagcaaagttgccaccgcccatcattccctgaaccccaccaggttgatatgcaaacatattttcgtttgtatctgagtttctgtgctgctgctgctgctgccatatcagaagcacgataataattagtaacaatcaaatgaacaataatccacaattcagagcaactatatatatatgtggaaatgaacaaaacatgttctccaagtggctaccattacacaacttcaatttaaagatattggttactttccttttacacagaattgataaacagtcaagtcccactaaaattgaatagccgcaagtttaacagacaaacattagccactacaaacaagcattttatccctcctaagtcataacgaaccaaacagagacttgagaatcctttacctgcctagacgccagctgctgttgctgttgctgctgttgctgttgctgttgctgctgctgcacagatgaagaggaagaagaaggagaagcagcggatgacgtggaagcagtccgaccagccggacccatggccggattccgagcgggccctccgccactgcctccagattgcatgcaattggtcgaagaatctgacagtcactacactggaaacaattaaacccaatgcacaacgaagctagtagaagaagacaaaaaaaaagtggaaaaaccctacccaataaatccctacaaaagaattcggacagcgagagcccccgaggcaaaggaaaaaacctcaaatagcaacagagagagagagagagagagagagagagagacactgagtcggttgaagcgcacacacctttctatttctctctcttcttagatttgcatcgaatttgggggaaatcggaaaacgaaagtcgcgggggatgcaacggtataaactcagatcctttgagatggcttctcgaaaaataaaaataaaaagggagggaaacgaaatccacggaatcgatgatcgattcctctctttgagaaattcacgcagatcagaaatttctcgcagtcaaaccctagctggcttcttacttccctttttcttttttttctctttctttttttttttggaaggggcattaattttattttatttttgattgtaggtcccacgcctcgatacagttggaacacggaaaatgcgtttcacgaggccacccctcggttttcgcttttattaccacaagtacccttccttatacaagtcagttgcacaaatgacgatgagacacgtgtgaatttaccaaacgttccttttgttaaccaaatggaatgacttttaatttttccatgtttatttcaaatatttgtttccgtattgggtaataagaatactaaaatgatactactataaacaaatttggaaatcaaaaaaagaaaaaaaaaaacaaatttggaaatcaaattagacttatgtttgttttacttgattaattaatttgaatttaaaattagacaaattttgacttttagttttaccttctgtagtgcagtagtagattagagagaatcatacaattacccttgttttatttacggtgcaacctcgtgtcgttttcatctttcagccttgatatgcttgccatctttacgtcaatagttggcacgcagttctattttaagatagaaaaacggcgaacagttttgaaccagcaggttcagtttatgtcgttaatagttttttttcccgaaacaagtaaaaagtcacattattatggttttgtgacttgtgtgcgagtttgtagaagctttactgatatagaaatgccgttgccgatgcagtctctcttcctctgtttctgattcctgaataaatttgttaaacgatggagaagatcgttcgttcttcttcgctgattctacttgttggcctccttctttttatgaattttcacggatttgtccggatcgccgaagcaacgaagcgacggatcgagatctccgatgacctagacgacgttgaagacaatgaagaagacgagtcatggaaagagtgggggaagaaagcaacgaccccggaatttgatccgcctccggatttcaccaatatgggattcgatcagatccaagaggaaatggctaaacggacttttggaaccgtcgtcggtttcgtcaagctccggttaggcgtcccccgtaccaaggtaaactaaaatccaaatcgaatcgtgaatttggggtccttaagttatagtttcagttactgttcaaaattctctgaattcgatatgggtccagttgcttcaggggattgaatagtgatctgtttatatgtttcaatcaggatgtggtgattgatattgctatgaaatggacaaaagttttaagaacaggagggataggagtaagattcatggctgtagatcgaagcacagtgatgttcaatatgcaaaatgggaagcttgtgactgaggtaaaagccacagaaaacacacaatgctgaaaactttgtttagtggattagtcaaaatctaacatcacaatcatatctttcaattagctaagggaattcgtgctgagccaagaagaagcttacgaggtcaagatagggaagcaagagtttagaagacctggagatcctccatttgaagatgtctttgacaaatttcaagctgagcaaaggaaagatcacgaagatggtgatggtaacaagaatgatcttactaaggatgaattataggtcacagaaaagcttctataatgggtagtactgaaagttcaactcttttactgaatcttacctaaacatgtttggtttttagtttccgttgaatgccgtagaatacaataaagaggaaagctttgtttcttttccaatgagtatatgcactcatttaagcttattgctaaacgtggagagctcaataacctgaatcctgggaatgcctgctgcttcagctctctctttctcagtgttgtatccccaggttcctgttttgagataagtttttgtcagaataaccaataaggggaaccagaagtgatgatatgggagagggaagagaccacctaggtataaactccatttgtctaattcaggctcttttatgacatttttcagcgttgcgagtctgtcttccacgaaactggccaaattaaaaatgcatagggattgtaaactaatggtgaccattaccaagtcatgcagatagaagaattattgatagatatatagaacgtgagttactgcagcgtcaagccctgatgttctggtttatcttgaagtagctttagaacttccacctttggcctgatgggatatcacacagaaaataaaactagattaagggtagaatctggatgagaaacaaaatcattggtggacctcataatgatactgaccctgaacccaaaccataaatcctttctgatggtatgattacacctgctatttcacgcagtaacgcttctgcaaagcggccctgcaatttaacccacccatactaacaaagtttagctcattatagtgacagacagtatgtgtatccaggacagttttgaatagaattggaatcattactgcacctgtttcgtggtaacgatataaatctttgagctggcaaatttcagtgcatctgaaactcctgggtagaatctgcaaatatagtagaagactatatcaatccttattttttgtataagatgggtctctgaaacttagagttggttagtaagatttgatgttgaaggcatacctattggcaccaatccaagttgtcaagtccttgttaatccaatcatctctaacttttccaaacaaatctaccaaagcatctctatcttcatcccaagcttccatgatcacgggcttaaactttgcccagctctccagtatcccatcaaccgtcaacccctctgcaaccttaacaaacaaagtgcaattcatcatctacaatacaaaaaaggatcacttaaccagaactaagtatagtgaagaagattctgatgagcattcacactcactgaagattttcgaatagacggtatcttggtctccaataacagccgcacaagtagaagattttcatagccagtttcaaccacaggtctcacctacaaacaccagctcttgaatcttcaaattcttcaaattcagagctagaaataatctcaatctaagctatttcagtaaccaacaatactttctaagctgagaaaaaacagtaatatacaatatgcatttgatcgacgatccattcctctaaagcggaatcaactccttcgaacaaatcaggccatctcactttggctgcctataaatacagaacaatcaaaagatgttcaagcaaaactgggcaagaaatatcacaaaactccaaaatttcaaaatcagaatcagagaaacacagaagtatctcaaatgcgaaaggtaaagttaaaagagtgaaattgaccttaacagcagatagagagctttctccacaactatcacagagaactccatcgaagtccaaagcgtagagatctcccattctccttctccttcaccactactagtttcaatcagctgccacacatttgttagagacgaaggttttgttttttactcttactcttcgagagccaatgttaacaagccacgtgtttgtgacgtttttgtaaaaacaaaatcgcatatatttttccgcgttacgttgcgtttgcgttagtccacacgcatatatatgtaaaaaacctgttattatcggtggcgtacccaatcaattaccgactgcagccggtcgcagcgtctattcagccgacctaagaaccggtatcgccggtatcaataattgctgatcttttccttctcttcttccccagattctcaagtctctctaacttggagaggagatagaagacatctcatcatcaatctccggatccaatccaattctgcatcgactcttcagaggtatttccgatgaaccattattttccccttgtagaaattattctcctttctcaattgatgattgtccacatagctagattttgtgtaaagagatattttgtattatagattgcatctactgctattgtttcccgattgattgaagcaagtagacaagaaaaggattcggttttgtctggttctgaaatttccattggttccaaattgtcatccttgatgaagaagatactttgctatctattagaaaccagaatggctcgtgtattgcctgattctttgtttaccttttgttgattagagtgattttgcaattggagatgttagatgttctctgtttgttttgtggctactaacccaagaaggtttcttttcagttttattgggtcattggagatttttttcggttgaggatggctaacaatgaggagcatcctcctcgagggaatgaatgggaagtcgtctcgctcacttcatcagcttatgctgctgctcctggtccgtataacgttgaatcaagagatgtgcgcaagtatgatgcttactatggagcggaaacttcacgtgatctgtacatgtctgaacactttgtattcccacctagtgagcatgagaatttacccattgatgaatctttattcgtggcggagcaaagaaaggatggccgagacttgatgctggaaggtcagggattgtctgatcagtttcattatgaagctggaaacaaccaacagagtatctatggtgaatctgcgcttggttcttctagacacatggaatcattcggaagcgaatcagccgtgtatgaacacggattagttgatgcagagggaaacttagatctccattctgatggtgagggtgaaaaggatgtaaaaaaatcaacacacaaccttccttgtgaagcttggtggaaaaggagagctatttctatgtattcacgcacaagagaagcaaatgcgatatggtccttattctttgcagctgcggtcacaggactcgtagttcttggtcaacgctggcaacaagagaggtggcaggttttgcaactcaagtggcaatcaagcatcagtagcgaggtaataatctataaaatcacggaaaaaacttcaattaagaatcgttatgttttttacaaatggtaaccacctaacctaagccattcattgacgactcttgaatgtttttttccacacagaaactgggcagagtacttgaacctctctcgcgcttgaaagacgtgattgtgagaagtaacccacaagcttctctcgtaaggagtggctcctccagtgaggtctagagacgaactatgatgtttgttgattcgacaatctcacacaagcataggtaagtacaaacttggtcttgagttacatgtgtgcgtgattgtctaaagctatttactttcttgggagcctatgttgcttcattatcttgtactattagaatggagatccagttgccttcttacaaagcaatctctttaggtgtcaaaagcgcttgtactagtgtggaaactggaaaatatacacatacacttttttttctttctaatttggtaattatctatttctattcactttttttttcattcactttcattgtatgcttactataagaggccaaatatataacacatacgttctgatttgcagtagaaatgacagaatcgtacaacagtattaaatgttgaaatggatttgtagaattatgatttatgacacacaacttatttaagtgaaagtttacgaaatgacaaattttacttatgttactaaaataacgacaatacggcttactagtataaaatagaaatttccatttcacaaagatggtaaaaaccgtaaaatgctgatgaaatcgcaaaatcattttttttactaccaaagagaaccattgttacaccgatacaagctttagctttagcatgtgtcgcagtagtcgagacaaaatataaatccgtcgttctttagtttcggtggtaaacgagagaataaatgactaatgatatagataattaagtaaacatgtgattatgcgtattgaattattagcctctagagtggttgagtgttgtctgaattactattaattaccatgtgaataagcgacgtggtaactaactatcataatgattcattcattattttagctacttttcaatatgattttttttatatctccttttgattctatatatggtggtcttaaatgccaaatgagacaagtaacaagtaaagtgaccaaaacaatttcacttaaatgaccagttttacgtgggacaacccacggaatctaaagatttctatgttgtttattacttaacgtgataggttaagtttgtttgttaagtcgtaagaatcgtaaccatggactcattaccattaatgtgccaaattccgaatagattttgtagtcatataaagtcattgcgtttattcaataaacaagtcatagctatcgagaattccttcattttattttatttttttggtaaatagtgcatgggatggatatacttgatgcacctaatctaactattttattgtctattatttatgtaacttcccgtacgtaactgtcaatttcaagtataaatattaattaatttgtaaagatattattatttaaaatgatctacaaagtgtattgtatatgtttttattttgccgttgatgggaaggtaacctaattagataactttatattctctatcgatttgtgtcctttgtcttaagttttaacctaatattgcatatttaaccacataaatacactaacatgtgtaaacattcacattctgcaaggatttttttgtttttaaaagaacttgaaacaaaataaaagaaaaggatcaactgaaaaccaactgtcaatcaagttcatttaaaactcaccttgtttcatacagctgtaatgaaaaataatagtaatggatttcgaagtattttaaagttccaaccgggtattctgcaatgcttggtttgaaatttgaaaaagttgactatggttggtcaatgcattcatgctttgatgacaaaaatcaaaattatatatataaaaaatagttttcttccttcacaattatccactatagggtttatatatactatatactctttaattaattctccgatagttgttccttttgaaaagggttgaattttctgatagtttcgttaacttaatcgtttttcttctatgcattaatttttcgaaaattgaactccaatgcagtacatgactacatcgtattttaatattttcccacagcttctaataatattacaacggggggtttaaattcaaaatttaaaagattttaatcgtcgacatgtgaaaatgtagtattaggagtgtgtttatatatcccatgtacacatcacgagttctcgtatgagtatgtgttggttcttacattaatcaatttatcacgatcacgcattaagaaggcgacacattattatattgtagacattgaatacttgtaacgtcctttttaaaaatatattgacaaatatgtcaccaaacccaaaagcaacctacatatgttgtgtagttgagcaaaactatcattggtgagtttgttcacctataccctaacaatctcaaatctaaaaccctaattactcatccctatactctattgtatcacaaaaataggattctataattttatacacgcacatatactttgtcaaagcgtatcataaaaaaatgaaataaaaatcaacgaaataacgtgatatggctagtaatatagtacgtagtcttacgacaatagtttaacttatacgtgaaaaagtgggataacatgagttttcatatttttgtcatcaaatgatatgaaatagaataaccgaacatagatcattttttcactaattgagaagaagagaattagagactatcgactcgtacgagtggtgaaacccctgtcattttgccgttatacaatctactgaccatgtccatgactaataatacatctatcaacaaccatcatgtcccttgaaccgacaccgaattacaaaaccctaacttaatatcttcaaaacatgcaattaatagacacgagaataagataaaatgaggaggcaacatcccatgcttactttgtgacttcttttacacgattttctaatacattttaaaaatactacttgacatctctccatttttggggggttttgaattaaattgtatatataaatggttcatgcttggacattgaaaacctgtgggtcatttagtcatagatctctctctatcttccttcctcctcctcttactaggctcctcaactaaacgtcttcaatgctctctctctctctctctccattcttttacgacctcatagacttgaaaatttaccattctatttttcaaaacctttatattgatgagattaatatataaagtctccaaccacctagctaccagcctagagcaggaacattaatggtggtgcacaccatctcatgcttcacataccctaaagttcttcactccaagtttatgaggagatctagagagataatcatatagagaaagagagatctccagagaaaatccattgaagggaaaaaaacagtctgtctttcataattgctctttctataaatcttctctcttgtgttcttacctttcttctaaaaccattctctctctctttaacacttcatcactctttacggaaaatttcttattttcaccacctgagccatctctattttcgtcaaaacttctcaacttttgtgccaaaacgtcatttcttctgagggaataaacacaaaagaacaattttcccggaaaatcatggagatttccactgctctaatgattctttcggccatcacggcgtatttcttatggctcacattcatatctcgttgtcttaaaggtccacgtgtttggcccatattgggtagtctccctggtcttatagagaactgcgagcgaatgcacgactggatctccgacaacctccgtgcttgctccggtacgtatcagacatgcatctgcgccattccgtttctagctaagaaacaaggtctcgtcactgtcacttgcgatccaagaaacctcgagcatattctcaagaatcgttttgataattaccctaaaggtccaacgtggcaagccgttttccatgatcttctcggccaaggtatctttaactccgacggtgacacgtggctttttcagcgtaagaccgccgccttggagtttaccacaaggacactccgtcaagccatggctcgttgggttaatagagcgatcaaacttaggtttctgcctattcttgaaaatgctcggctcggctctgagccgattgatcttcaagatttgcttcttcggcttacatttgataatatctgcggcttaactttcgggaaagacccgcggacttgtgcaccgggtctaccggtgaacacattcgcggtggctttcgatcgagccacggaggcttcgctacaaaggtttatattgccggagatattatggaagttcaagagatggctccgactcggcttagaagtcagcttaacaagaagcttggtccaggtagataattatttgtctgagattattacgacacgtaaggaagaaatgatgactcagcataataatgggaaacaccacgacgatctcttatcgcggttcatcaagaagaaggagtcttactccgacgagaccctccagcgcgtggcgctcaacttcatcctagctggacgtgacacgtcatcagtcgcgctgagctggttcttctggttgattacgcagcatccggccatagaggataaaatcctccgtgagatctgtaccgttctggttgagacacgtggcgatgatgtggcgttatggacggacgagccgctttcgtgcgaagagcttgatcgattggtttttctcaaggcagcgttatcggagactttgaggctttatccttcggtgccggaggattcaaaacgcgccgtgaaagacgatgtgttaccggacgggacatttgtgccggcgggatcttcgattacttattcgatttactctgcggggaggatgaaatcgacttggggagaggattgtttggaattcaaaccagagagatggatttcgcaatcggacggtgggagattcatcaatcatgatccgtttaaattcgttgcgttcaatgctggccctaggatctgtctgggtaaggatctggcgtatctacaaatgaaatcaattgcatcggcggttttgctccgccaccggttgacggtggtgacggggcataaggtggaacagaagatgtcgttaactttattcatgaagtacggtcttttagttaacgtccacgaacgggatttaacggcaatcgcggcggatctacgagagtgtaaatctaacgtcgtcaatgacggggttggtaacggcgtttcaagttaggtagggtaggtgaatcaatcgcatctatcatttactgtctattagagagtggcactcgccttttgggcgcgtgttaaatacgccgttctttggccaactcagcaaggcacgcccagttgtcgtcggttggttggctgcataattcaatagaggtaattttgcaaagtgcgtttgttctgttcctttttttttactcatatgccttggtaattcagacagtaaaatttgatttcattattttgtaagcatctctcaatttgatttaataaatcttattctaaaggtttcattctaagcttaaagaatgtcacattgtttggaaatctgttcgcgatggccacattttatttgtatcattgtatgataatccttagaataatcgaatagctctatgtttaacaattgtttcttacaaatcattttccaggttttgaaattgccatttaatcttacccgttgtcaattcctagttttatttataggagtcgttttcttgaatttgagccaattttgtcagataacatttggcatgaatgattcacttgtaatggcactattcttttgtagcagattataacataaatgcattaaatatgtctggtccactttgattcaagataagttgcctgcttgagataaacccagaatgggccaattatagaaatcctctgataaaatggagaagaaagataacagatgtttctggggcatgtctttgttttacataagtctccattaggcaaagaagaggacaacagatacacacgttacacacaggtagtagattcacaaaagaaagcaaactaagaacaaaagccagattttaaatagaactcaatcagctttagcttctggacttgaatgggatggctctgatgactataacgtggtagagagcagcaagtgcagcaccaatgaatggtccaacccaaaagacccactgagagaagaagatacagctagattagttatccgataattgaaaccttactctgaattgtaaatttggtgagaagtgaaacactcacgtggtcatcccaagcgttgtccttgttgaagatgattgcagctccaagacttcttgctgggttgattccagttccagtaatggggatggttgctaagtgaaccaagaacacagcgaatccgatagggagcggtgctagaatctgtcaaaatttcaaaaccaattaagcattttgatccgatgttacaaaaaccaaaatccatcctttattgataaacttacaggaacatgagagtcacgagcgtttctcttggcatcagtggcagagaagacggtgtaaacaaggacaaaggttccaataatctcagctccaagaccacttcctttggtgtagccatgagctatggtgttggctccacctcccaaagcctggtattgctttggctggaaccccttgaccacaccagctccacagatagctcctaagcactgcatcactatgtagtacacagctcgtgtgagcgaaagcttcctagctaagaacaaaccgaacgtaaccgctgggttgatgtgtccacctgaaaggtcataacatacacaaacacagattaaaacatctgcaaatcaaatgattccaagcagaacaaagctggaactaacatcaaagtcccccatttactgagtttgtaaaccctaatttgttcctgattgaatcctaaacatgctaagatttgaattacgctacctagctaacacaggatctatattcgaaatcgttagatcggagaaaccagtgaacttaccggagataccagcggtgcagtagacgagagcgaagatcataccaccgaaagcccaagcgataccttggattccgacggaagcacacatgttcggtgacctcttcacacccataacagtcaaaacagtgatgtacaggaacaaaaacgtagctataaactcagcaatcccagctctccagaaggaccatgaagctagctcgccgggctcgaacaacggcgcaggtggtggctctttgtagtccttgtcactctgagccgaagttccgatcggttgcctctccggaaacttgttagctccgactctaacatcttcttctttaccttccatctctctctctctttctctctagagctttctaggtttttctgtgagtgggttatgtgttgcagagaagcagagagagtggtggctttttatagtgaccgaaactcaaggttggaagatgatggaaacaaaattaaaacataaacaagatgatagttaattagttaacttaattgcatgatagtataattaacgttatcatctttgctgctgctgaatactgataatgcttgttattgattaatgataattaaagtatgtggacagagtttcaaatcccgctttgcaactattttctttactctaatcaaatgtcgttattgtaccctaataaaataaataaaattgtggacattttttaacgtttaaatgtagattatgacaggtaagaaaatacagaaaatcatattaaaaaagcagttgaatatgtggtcgagatgaaccgccggttaagttggaccgctgtcaggataagcacatggactcaccgcacctaaaagacatagggacacctcatttaacaaattatctacaacattttcttacttaaatactttataacattgctaattttagttatgagtgataattttacatgctccattcccaacaattactttattttatagcattgctttcttacttttaattctccaacaattttagttattattagtgtcgagtgagacgaataaaaaaactaatgactttatatccttttattaatcaaaaaagaaatgagattcttctttgtgttctgttctttttgttatcatcttcactatttttatccatgacaatatttttttattatgaaatcatctatagatcaatcaagcatgacagccgaattttgtttgtctataatgcaactttaatgtaccaactacaccaagtattgatcaataaattgcctatatgcaaaatcaaacgccatgtaccatccacatgcatattcatttgcatatatataccaagtagtttcaccatgaatgtgtaaaataaatgcatgatgaatagtgggttttaatgaggttaaagaagaagattggatagtgtaatattcggcagcaatccactatttgccaaaaaggaaagacaacgtttaagccaaaagaaagaaaaaaaggactaaacaattatggttgcttcgttgctttgttgtctttttgggtgtaacactatgtcctacccacgtgctgttttcttctagtcccattaccaaatttcgttatgttctatcgcttgccttcttttattaccgtccaagctctcatatggaccaaatttgatctgaccatgcaccaaatttccctggtaaattccctctttaaacggtgtatagtgcagaagttatgttatcgcctttcccgtgtcccaaaccatgtacatgctccataatgaagttaaactcacatccataatgaaattatttattgaacggcctatatttattttggtatgagtttgatcttgattagtaaattctgtcgatattagaatagtcttttatattttgcaatttttttggccattcacacaattctgaaaagttcatttacaattcaataccattttgtcatgtattcacaaaaaaaaaagggaataaaataaacctatgttacaattccattcaacctatgtatctaatttcaactactggtgttccattatagtactatcaatcaaaatcaggattgctacttttccaaatccttttagtatttcttggttttttaagcaatggcttttagctttttgtgaagggaaaaaaagggggaggttgtaatatatttggactttggtatgagaataaaatattccacgattccaagccgtccaatccatggataagaggacacgtggcataaacttacgtatacaaaaaccgaccaagccacccaaacacttgtcaccttcagccaaatagtaaaatcatttttagttttatttttcatgagtgcaataattgcatgcccactcccaatattcccgttgcgttacagtccccacttccacctctcttggattatttaattttgaaacattttgttctcttttttctttttttgacaaaagagttctgaacaattcacaagtacaataccatcaatactagtatgaatcaatagtttttaaagttttgaaataacatcatggataaaaagattagacaccaaattttggatatatcaattaaaatttacatttcaaaacaaaatttgccaagacaaattgctcctcaaagttcctacaaatttaaattcaaatgtattcaacaaaagttttggaaaatcaaattccttagaaatttcaaatgaggaagattcgagcctttttaaaaaaacagttgggccatttatcacctatataaaagcccatacttattattgggccaacaatttttaatctacaagcgcctcggctttttaacaaattctccaagcatcgccaactcgaaccactctcgctactagagcccaccgactcgagcctagtttccttttttacctaacgatgccgttatggttgataccaccactagccattagccaacatgatcatgacacctggacatgatcggtcctctcattttcttgtttttcctcctcctcatttgatttttatttttatttttaataaaattaattcctaaatttagtccgctttctctcacttatccgctcggccgcttccacatcgcttggccgcagccgccgccgtccgccgtcgctatccaccaccagattttaaatccccgccggaagttcaccttcaatacccaatatctgttataaggtacaacgcgccaattcgcataatagactctccttggttcaaaagagcttctcggtggttacgtgtatgtatctcaatgtgtttgcttttgcttgtttgatatattgtgttttggacaattcgaatatctgtattatctccaaacgtatacggctgtttctgcttttttttttttttttttttgctgcttcattggatcagttttaagatacctcttttgttttgcgtttccattttattctatgttaaatgctcaaaatttgtcataaagagagaagctttttagtatttctttgaattgagagtgtatattgcttaatgcttattggtttctttaagacacggttcttcattacatgttaagattcagggttggctttctgagcgttcattatcttttgttaagtggttagtctccgttttatagatctctcttcttttttccagtttggtggatgaagttgctggatattgcttgagatcgtcatctgacctcaaaactcatagtcctgagtactttgctacttggcgtatttattttatctggttggccatttttgtcctgaaaagcttcaggatttaaggaaaacagagactttgtatagtagggtttgtcctacttattggagctgatggtgtaataatacatataatagcagaagactgcgtcatcaaatctattatcaatgtcagaaggtgatttggccgtcatgaaaccagaggtaaaatttcatccctgtccttttgctagactatcttagttagctacttcacctctaatggaaaaggaccaataaattcatatgccttaactagtaacgtttaagggttgaatttagtttttgaaaaaatgagttcattttatccaaaatcaccttttgattgatgattctttacaatttagtgtttgactcatgattaactttattctcatcttcgcaattcacgtgagctagttattaatttttctactgatgtatgattttatatgaaagactaaatttctctcgcggtgtcatggatatagaccatgaagtcctacatctggcttcaaactgctgatggttcaatccagcaagtggaacaagaggttgcaatgttctgtcccatgatttgtcaagaggtaatacagaagggtgttggatcctctaaaaatcatgcaatatcgcttccacaacgagttaatccagctatgttcagcttgattcttgattactgcagatttcatcaactgccaggacgttcaaataaggtttgtttgaattagaagtaaatattttcatttccataccccgtctggcctctttcattacatctattttccactctgtaggaacgaaaaacttatgatgaaagattcatccgaatggacacaaagaggctctgtgagttgacctctgccgctgacagtttgcagctgaaacctttggttgatcttactagtcgcgcacttgcaagaatcattgaaggaaaaaaccctgaggagatacgagaaatatttcatttgcctgatgaccttactgaggtatgcgctattaaatattgagatgtgtcttctccatctgcttcgtttcttgactgctctttgattgtttatctaggaggagaaattagagcctctgaagaactcaatggatgatccacggattcgactactgaatagattatatgcaaagaaaagaaaggaactgaaagaaagagagagattgaaggtctgtttagcagtttctattttacttgtttagatattgtaatttgtagctttataaatgaaatctgagggtaactcggtctgtaagattgaactgtttcatgagcttatgaagttggggttttccatgtgttagaatgttgaggttgaagaacacgtggacgaacgttctgtggatgacctgttatcatttattaacggcagaggtactttcctttgaccttactctggttttctacattcacgatatcctttcatttgttctgtttcttctttggctgctttgagttatctccatttaacactgtagtactgtaccaccacattatagttcatctttggaatctttttgtgttgattcagtgatgtatatttttggtgattgactatattttcctcttgcccaatgcctgagataaaaatactcatcgtctagtgcaactatctgtttggctatacatctgccatttaaaaattgttttcatgaataaatcataatctatctttgattgagatatttggtgtgtgaatttatgtttgtgttgcatcttagttttctcctttctctattctacttccttttgaaggcctctttggaagtaaggaaaattctgtttcacagatcacaaggctgtaaagatgtcaaagggaaaaaagaagaaaaagaaaaagaaggatcagaagattgtttcttcaaataacattcatgacaaggttcagactagtttctctgtgtttgttttctggtcggtatttaccaagtcaatgaatgtgttttttgtgcttaggaatcacatgatctccgttccaaacaacaatgtgttgaagagattgggtccagcatgagagaggtacccaacttacttagtgcagaagatgacatttctacgccaaatgccgggtctgaagatgaagatatagacgatgaaatcgatccagccatgagggaactgcttgataggtaagacccttgttaaaatcaaaaccaggatattcttataacgaatgtttacacatcattctccaagtcttgaataaagatgctccttcgaaatcttgtagctgagaaatgaaatagacttgttctcatgagtggtgaattaatgacagagaggttgaagattttgctcaaagactgaactccaattgggttcggtcgctaggaaaagaaagaaggcctgtacacttctccataaatggcaacgggactacaagacggcatacaggtatggtatctatttggcggccatgtatgtttactcttttttagccatactctagatgactatgtgatggggcttgtggtttgaatttgaaggtcaatctccatgacacgattgaagctgataatggaacagttttggttaagtatgtgagcaaatagaaagaaaagagaatggttcaccagtcagtcaccaccggcgtttgatgcgtgtcctcacgtaacagttttgattttgattgttttactctctagtggtccatctttttctttgtaaacccacgttctacgttagttattttttttgttccaatttgtgtttaggttccattgttttagcatttagaaattaatcatatacacacactctgatatcaccaccattgcgagtgtaataaatggttttaagttccttgatcaagatcaattgcttgtttgggagcagagtagcaagatgataatgcaaattgcgatttatagctaaaaggaaaagagaaaaataagcataatgaagcttttgaaaacgaatgacctaacaactagagaggaaatggaggaatccagtgaggaagccaattaggaagaacgtaaccttggccattaggtaaatcagagaaagctgaaaaagacttgggattgaaggaacgtggggttctagtggcgatatcgtaaacgccatagccttcaccataacggtcacctatgaaatagatggaattagggtttaggccagggaatgaactggccttgacacaaaaaggctcgttattgccgaggaatatgcagagatcaccaatgtcttgtgtgtaacacatgttcatatcctcctcctctctaaacaccatgaacagctttgtgccgccaaaactgaattctaccgaccgatgcgcaaggctttgaacagacctgccaagggtttgaacagacctgccaagcacaaggaaaaaaggaagaaaatgttcttataatgatgacatgaaacgacaaaagcaaacaaattactagaagaagctcctaccatttgactaggaaacgttgtcctgagggagactccacaagatgttgtgttctgtaacaagatctcaaaagctgcaactcggaaagtgaaaactgaggaaggttgtgaaagcgtaagtcatggtactgagagtcggtggatattataccatcccaagaccacaagtggtggcctccagaacttggcatgtagaaccgttgatctctcttggaatacatcaagttggcttgttcaaaataatcgaacagttcagtagacgaaaagcggtggttccccttacgatgttgaccgggcctgtatatactcacccgacgtcccgtgaacttgacagccataacgaagtcttcttcttcaggagaagaggacattgccacgccactaaccaattcattttgacaagagtgttcataactccgtggaggcagagggatcatcttggggtttgatttggagctggagggattgcagtagtcgctaattagtatggaattaggggagccaagaaaaactccccaaccatgggaacttcccaccagcctcgacttaaccaactctttgggaagtggcttatcatggacggtgaaatactcttccttggccgggtcaaacatgcggagctctgtcattgcaccggcctgtggggcttcatcagaataggtgacataatacatcaagtaagggttggtggtggtggaggaggaggagaacatacgaagggtactgtggcggcatctctggggaagagtaagaagtagacacataagaaggagaaaaacgagagaaacgtggaaaaaataaagagaaagagacatctctctagtaataattgagaaccctacttctcctttttcttgtggcaagcactttggtcttaattagatcttgactaactcgaaaaccctttagagaagaaacacacagagcaaccaagcgaagctattagctatgtcatctctgcttctccgcctctcttccaagacctctctccgcaaactttctctggtaattaattaaatctatcctctctctagttctttttgtataacctctttcgtttttctccttcttatgtgtctacttcttactcttccccagagatgccgccacagtacccttcgtatgttctcctcctcctccaccaccaccaacccttacttgatgtttagtctgatacattatggaagttgtttggatgatattgatgtaacaagcactatacactattttgacccggtcaaggaagatgaaattattgtcagagacaaggcctttcccatggagttgcgtaatacgagtctggttggaatgtcccacggatggggagttttcaatgtggagacaggtgatggtagacataaagccgtttatgttagcgactactgcaatccttgtggctccaaatcaaatcccaaaatcattcctttgcatcccatgtatcccatgggtaaacctaatattactcaattacgcctcatcactaacgctgcaatgacttgttcaccagatcaaagtaaagattttgtagtggctgccaattgtttaggacttgagatccatttctttaggccttgtggcaaaactgacaactactcgggtttaggctttaaaaccgaatcccacttttttgatcagtcaaaggttatgtattcaaagagagataaaaagttctacactcctagtgttggaggccatttgttgggtttctgggattcttgcttcgaggatttgagttgcggttttgcaaccttcctgaggtgacacagtccgagtgggagctcttggactcatgttccccgccgactgtacacctcgttgagtctccctcaggacagcgtttcctagtcaagtggtacgctcagaactacaaaccgggcgagaggatgacattcttgtgtcgtggaacaaagcatttcatggtctttagagaggaggaagatatgaacatgtgttacactgaggacattggagatctctgcatattcctcggcagaagtgagcccttctgtgtcaaggcaagctcattccctggcttaaaccctaactccatctattttgcaggcgatggctttggtgtttacgatatcgccactagaaaaccacgttcctttcgtcccaagtctccctcagccttctccacaacaccactcttcccttactggatccctccaatgcctctctagttactatgcaaacttcattagttattctcttcttgtattttagttggtggatccaatatagaatccagtttcttgtttcactttgtgttatgtaaactcgaaagaaactaatgaagacatgttcacaagccacacactgacacaagatgagaaaagaagaagttcacaagcagttacgtctcacacactgaagataaagtcaattaacaaatgggatttagtatcttttcatattttatttcgttaattggctgttttcaacgtaatacatatggtcagattgtattactaagaaaataaatagaaaatggagagaaaaatgaagaaaaggtttttcattacatgggtttaatataaagtacaagtagacgtgttcgttgaagcaaatgcttaagaatatatatttagtgtgattttatttctgttcactttctaaaagaggatgaagcgtgaagccattcctggattgcagatcgaagagcaagatttggaactaactttgtatgatgaagcttcgtgtttgtcattggggaagtctcatgtcctccctgaagccatgtacttatggcttctgcttcatatgtaaatccatctgctgctagttgtggatccttcatcacttcctgaaacattgaaaacaaaggttttaatttgtgaactgattcgatacaatcttctgtttctctccatattgacttttttatttaccagtgaaatgggacagatgaagtactgaggagcttcacggtgctcatcagatcgagagacctcttttcttagctcctctacttctataattgctatgtcgcgtcctttaatcaataaatctcgttcttccttggcttttctcaacactttcgttgccaagttatacttgtcttgcagcttttgtaccaacatataagactcggttattcggttctcagatatatacctcatcttttcgagtttttctctcactttcttcagctccatctctgtttctttcctttgtttcaactcctccaaataggcactttcccattctttaccctacatttggtcagaaaacttcgttatcatcaggaaaaaaggacaacattcccaatgggcaatggcaatagcttatgtgagattccaagaagatgttacccttttgattgcttcatttttctcttttacaacttcttgatgcttgaaagcctccaagcttgcttcttttttcgatttctcagcttcaaagacagctaactgatacacatttccatttcctctagatatcgtgaattggcgcgaaggtataacagatcctcgtgaacggactgaatcttgaccagaacttgtagatgcatactctagagaggtgttgcccatgatagattccctgcattataccatcaccagatatattagagcttgtgacatgtgattgttctcacaatctcagttcctgttaaaactcacaagagtgtgacaaaacacaaatatcattttaaaaaaaacttctgaagtagtatttacagttgtacagagattacagggactaggggtagaccttttatataccaggtatcctttgcaagtaaaccatatacaacaagtagcaggcgcttcttgacgaatgtaaatggctttcgtggacaacagatctgccatcctcctacaaattaagattaatgatgagtccatcggtgaaataacaagaactatgagaagatgaaaatccaaaactatttagttatgccggtgtgctttgtacattgaatagcgtgtgtctgacgcagctcccatgacgagcttcttgacattgcgctctgagatcaattggatgatccctttctctaccgactccattttaatgtgtatcatctcagcacagacctagaatatcacaatcggctctctttatctcttgtatcatcaaatcacttattcgcaatagaagtaacaaaaacatacctgcatttgcctgcatttttgtaggtatttgtccaggatcttttgtgtcttttccttttcttttctgtagagtggctggtgaacgtggacgatacagaactccttgcctccagtgttctgtatcgcccaaacaagagtggacttgttccccaagtcactccccactgcaacatatatcttctcatccatcagcagctgctgcgaacctgatttgcccatcatctctctctatctccatcttgcttggcctggattttagcgtttaaggctgcatcgaagcctcatgaagccaacacttttcccctttgcttggatcgaagctcctatctccaacacactccatatgagaacactcaaaacatacctctaattcactcaagagaataaacaagaacaaacttaaaatttgcaatacgagaaaagagatgacttatctaacagagggagcaatcaacaagcaagaacattttcttatgttataacatgcacacgaagtcaaccacggtaccaatgacgaaacctagccttaacgcagaagctgaatcatgtattaaaataatgaaggctttttgactttcaacaagccaaaccaggaatcaaaagcgacagtatctgtgtatgaagagaaatgtcgacatattgacacaaatacacgaatttcacaagacttttgagaaaatcctgaagaatactctcagcattttccaggttggtgtctttaaaggctgcgttaggttggcttacctcagtgcaatcctgaatttttatacagttatgccactagccgccaaaacgacctgaccccactgctaattaagtaagattaatcacaagaattttaagagttcattaaaaatcactataggcaatccaaggtaacttcttccaggtggaaaacaagtcttacacgatagtcttgactaaaaatgtaagactcatcctaattttagctaagcaaaggcatcatcagtgagatcatgtccaataattagaggctaatctttgttcttaagagagccgaacataatggaagaacaaaatagtggcagttcttctcacacaaaccgaataagcatataactttttttttcatacagaacatatatatatatatatatatatatatatatatatacatatccacatacaaatctcaccagcttcttcttttcatatatgactgatatggaggacttacactatgcttgaaaaagtaaacaaatatgctgctatccatgattagatcgtatgtatatgtataaggaagactgaaaacactaatcttactcacttactctgttgcctcccgcagaaaaggcaaaaacgttttttcataagagaacagggattgagggtttgaaggattttattttcacaaatgatgttgaagccactcttgaatcgcagaacgaagagcatggttagctattaggctggtgtgagaaagcttgacattggtcattggtgaagtatcatgctcactgtccagccacgctcttatagcctctgcttcgtatgtgaaaccgtctgcagccacgtgtggatcctgcatgacttcctgaaatatttgaaaacaaagcagaggaagaacgggttgagtaccattagactgcaacataacggtttgagacctcagataagcaaattttaatgactttgtgatcgaagtcttctcagattgataataatactggaaatccatactcaaatatacagattagttacctggaaaatggggcaaatgaagtatggaggggctatccggtgctcgttacggccaagatggaaagatgaagatcctccactagaagccctcataggttcaagtaccctccacacttcagttccaagatctggacgattctcgctgacagtctcgcagcatctcaatgctaagcgagcaagctgctcagcctgaacaaagggccagtcccctgctaaagggtccaagaggtcgttcaatgttccattatcgagggcatatttcacttcatttgatatccgtaaggcaggtctcccggtcaacaagcgcaataagataatcccaaacgagtaaacatctgacttaggagttagctctccactactggaagcttctggatccaaataggcaactgtgcctgtaacgtcagttctcacacttttgcttccgttaggatgaagtagtgagcaggtcccaaagtcacttaacttgctaacgagattggaatcgagtaggatatttgccggcttcaaatcaccatgtactaagctatgagctttattagaatgaagaaagacaagtgctgcacatatctcagtggcaatgcgcacacgattttgccacgacaagggtggagagttgtctttgcaagtaagcctgtcttcaaggcttccacccggaagatactcatagacaagactccacccctctggacatgctccaattagcgtaatgatatttggatgcctcattttacttaggacatcaacctgcaatgccgcaagaataagtcaaagctcctccacagcgaacactataaaatcaaaactacagtagaactgtgtttcaaagtcccctttttcgtagaggcagcagtttgtgcacaataaaccagtaaacaatgatgatgaaactaaacaagaaatttcactaataatatgtcaagaaaatacctcctgttgatattctacagggccttgcgaactgttaggattcaacatttttatagccacctgagtatgacgcagtaaaccaacgtagatgcttccatatccaccttccccaatcttcagggtcgaatcaaagtgattagttgcttcctcaatctcggagaatgagaaatccgtgaagtactgaggcaactgtagggttgaggtttctgcgtgactccttaactcctcagcttctctgagtgctctgtcacgttctgtctgcaactcctctcgttcatccctcaacttttgcaacaacttcacagctatatcaagcttctggtttagcttttccattgtaccatcagattttgctatctggctctcaagcatcgctttctgagccattgcactttgaagttcttccatgatcacctcttgctcgttttttattgttataaatctctctttctctttcgctactgctatctccgtatctttccttcgcttcaattcctcagaataggcactttctgattgtttagcctataataattacctataatatcagtatactataatattttagctgttattggtgtaactagaagcaccactattaagcctagggatctctccaagtgatacactagcggttccagtatagtatatatctccagctagaacatctagcaatcatttccaaaaaagttttaacagtgccaactaaattatttttgtaaggaaactcacccttctgattgcatcaagtgcgtttttttcggctttctgacgcctaagagtctctgcaaaagcttcttgttttgaactgtgagcctctgacgtggcttttcggattttaacgttaaaagaatcatccaccccatcctgcaatgatggacaaatttcctggacagctgagatacaatgttatatgaaaatcaaaatgcattgcttttccattaggaacaacatggcataccggaaaactggagggagatgaatggccagaactcataactgttgcacttcccgttacttcactgccatcagattctctctcctcctcatcagtatttaaagacccatccgacaccctcccgctttgttcagttgagcttccattgcttactaattgttgaactgaatcggtgctctgtactcgagatatatgctgatgttcagactccggtgtagagaaagtttgaagtagatcacttgcacttatggaaggacgcggagatgcatattctgattcagtgtcgtccatagtagcttccctgcaatgatagtacaatatttattactaataagcagccacagatgcgtcattttcaatgccaatgcagatctcgggaagcttaaagactactagagtaataattatgcatggctgattcgtacaagtcattttgaaatccaaggattcggttgtgatgagaagaagaattggccaaaccttgtatgtatcaagtatcctttgcaagtaaaccatatttgacaaagagtaggtgcttctcggcgtacgaagatggctttcctggacttcagatccgtcattctcctgaaagccaaagtattgatagaggaagcaaaacataaggatattgaagagtaagaagcacacagatctacaggagttgattcagtatgaataagtagagatcccaaaaaatgcttagtgactcgccataagcataccttgaatagtgtctatctgctgctgctcccatgacaagtttcctgattcccagctccgagatgagctgcacaattccattctcgatggattccatttcaataaacatcttttctgccctgacctacaatcataaatacactatctatcataaggacactataatcgtagtgctagccaatgaagtaaaacaagttccctattaagggcataacatcaacactaaagaaaaggaaaatagatggaggcatacccctctctgctggcatatacgaaggtagtcgtctaggatcatatgtactttctccctttccttttccctgaaaaccctgacttcttcctccttcacagcaccaactggaaatttggcgcccactaggatgaatcaatgtgaaaaaacaagatcagtgaccacaaacaagactaagtggaaaaaaagcacagagacaaggtgtaagggaacatactaagtgggatcatttgggagggctgatgaacatgaataaggcaaatcttcttgcctccagtgttttgcaaagcccaaatgagtgtagatttgctcttggccacgtgtttatccactgcaacgaagatcttctcgtcaatcagccgcgagacaggttcgtccataatcccgctcctactagaccttgatcctgggctaccaattccgtgaaatctcatggatccagctctttcacccattgctggaattggactcaccaaagccattgctccaatatcaaatccgacaaaccagatcgtttgatatctaaaaccacaaaacaacgaaacaaattaagaatattcaccaagatcactccggaacacgaatcaataagcagtgatttaaaatagcagtttcacaatccaaaagggaaagtttctaaccagagtgaaatttttgactagagagcaaacagacacactcgaatcgtattgaaaccctagagtctacggataaggaagaagaagaagaggaagaaagagtttgattatcaaatttcgaaacgtattgaccaaataaaaggactcttggtcagaccaaccaaaactcacggcaagaagaaactgatattttgtcggaaaatttcacgagaagagggaaagacaattaaaattgagatttgtgtgcaaaatttattcgattttactttaacataccaaaacgaagcttcttggggatttgtgtgctttgctgctaaaaaatctgacgtggtcgagaacatgaaagaagaggtttatttatctgctgtggacacacacacagtagtacttatctatggggtggtccaccttaaccgattaatgacacgtgtacctgattatgagaagcacggatgagatttggtacaccaactcgcagtctttcttaattctctatttctgccgacgtgttcaccttttttgttcccgccggtgaaaacttatttccattccaatcagtagaataaatgacttttttttataacataatctatttgcatttgatcagatatgcatgcaatctatttttcagaagaccccaaaagagttagtatcatgcaagatatcaatattcttcatgttacacatatatgttaattttaaggtgctagtcaatttttaattaagtgtgacataagatttatgaaaagttaagcgaaaagccattttctactcacgaatctaaaattctataaagtctgagacgaacaagtgcactatgctgctacacatagatgacaacgaatatgaaagtattaagtgcatcattatatgtctatcaaactaaacgcgtgagttataatgacgtgttttagaaagactggatgcatcaaacctaatagtattaggctaatacacatggattatgcaaaaaccagcagttgaatgactatgtctccatatattttgaggatctggtatcggattactactatatcactctaatgattgttaaaaaatggatcattgtacgttaatttgctaattttgttagttggttcaagaaatttgttattttttttttcctgaaaatagatgagaaaaagtcttctattaacatttagtgtagattataacatattttcaagttcattttctgataaattaaaaactagctagttgaattgttaatgtggcgtgtgtggttgtactatgttatataatgtaaattaataggcatattctccgaaatgcttattcccttgtcattttcatttgaattatatatatatatatatatatatgtttccggggtcgaaatagaattttatttgttattgaatattacgttaattttgtaattgacaggttttaaaaataaagaaaaagttgtctcaggatatgaagacaggctaagcacatccacaccagtttgttaactaaccaagttatatatataactgagtttaattatcatggaatatttcaacttaggatatacgatttggggatgtagcatctctttattcattcgtcaaaagcttcaccgtaaactgcaatttgaatttgtttgtgcacgtttccgttagagcaataacgttaattggatatgactagtcttcacgataaccgggataatgatgaacttataataaattaaaaataaaatatatcaaaaataaatacctccttaaatgggcaatatatgattcacgggccttaatggtatccatataagcctgcctggtttccgaatccaaagttttgcttttcaaaagtctgaatccaatagtctcaaatgttttaaggacgtacgtgtcaacattttcaaattgcaggctttgtagtacaccaaatatcactcatacgattacacacgcatttttggcttttagtttctttctttctactttaatgttttcttttaggagtatcaagtatgtgatgtgattttcttaattagtttacgctatcaccgtctttaatttccatgataattatatgttaccaaaacccttaactaaaatgattgtggtgattagacagagttgtaatatggcaaccgcagccatgcttattttataagattacactaaatttatatctcttttctgttaggtagaacataatgaaagaattctgtataacatacaaaaacaaaaactatatgatatttaaaagtcaaaaactaatcatgcatttaattacacatgacgttaccatatacttttgttagctttctaatcttttaaattccagtttaagtaatcacaagtcttagaattcggcgatggtcctcaggaacgaacaagaacaacgaaatattaattgcttgcatataaccctcgggtcggagtcggataaaacgaatatgatcgggttccgaatgctgaaagcgatgcacaaaaagcccatcaaatcttcacatgcaaattaggacaagatacgtagacaaaaaaggcagtgacctgtgatagaagaatcctaagaaactatatgcttcgtattctccactatgtcgtcgtttctcttgttgttatatgctgagtaaaaatacaagaaacgttgtcggtttcttaattttgtttttgatgaggtcgacattgcgaacatttgttaattgcttttgtcgtttatcttggtactactatataaaaaaaaaaaagagtagctgctttctaattaggggttgtctgtctatacagctacttaaaggtatcttaatctctttaagccgaatttttgaatactaatcttaattagaaatagaagtacagttaattaggaataaaatgatatagtaataaattaacattctaaagtgatgtatcttttcatttatttatttttgttataatgttagtatcttttcagtttattggactagatacaatcataaatggacatcatgactactaaattggtgcatgctacatgcataacgacgaaatataaaaccatttatctgcatatatcatgtgaagagattttttttatgtatatggatggatacacgttaggcctgagcacgaagcgaatatccggaaaatttgggatatttgttattcaattcgttttaatcgaatacttaattttattatttgctttgatccgaaaatttccgaatatccggaaatacaaatatccggatttttgtgtgatatttgccggatatccgctttgctttgctacatccaaatatttttttaaaaaaattatttaacatgatttcaaatttcttaccttatggcttacgagtgtgagattgagagcaactggaaattttttggttataaattctgtaaccaaattgagtgataaaaatagtgaaaggtcgaagaaaggaaacataaacgtcgctcttatatttgatggattggaaactaaaacgacaattttaggataaaatataaatatgaaacaattttatttttaaaaattccacttctctaataaaaacggtgtcacaaaaaaaaaacacagatccaaaggatacaaatacaagcccaaatcccaacatatacaaatccacaacctatattatgatatatatatatatatatatatatatatatatataattatactaaatcaacaatcacttttacaataaatgcaacattctcctcttgacacctgttttaagtcctaattttgacactttcagatttctaattaatttttactattcgaaagaaaaataattacaattaaaaaaaaaactccttgcaactgcttcacctcccttcacacccacgatctcaatatctttagtttgcttctcttcttcaacaatagaacatcaacatgatttcatacaaaaagcttccaaatcattttttctgattcctttttcctgcaacaatacaatactcttcgtgtctcaaagttcaaaaattggtggcctgagttttagttcttaagcgttgtactacattttcctatttgctttgctccaaaatcttacggatattcggatttttcgaattaaatcaaatcgaatagcgtgtcgaagcggattgaacgaatattttgcccaggcctaatacacgtatccaaattcgcaaatgttacacaatagctacgtgtggtccaaaaaaaggatcaacatcgttgttgtatattatgtgctgatcctacataaagagcaaatgtccaaatagtcataaatggaattcgccaattgtgaacaactctttggcaatattcttagttgttaacaaatgtttcatcaaccatatctaacacaaaactttaaaccggatgatacaaaatatatagttataatacagtgagagtagtaatgataaaaccattaaaaaccacatcaggatatgatctcgtcttttcttattctttttgggtatgactctatcatagttgatggaataacgaccaaaatcgttttacgattcataattacgtttttatatgaaaagaatccatttctaccaaaaattatattttaagtaatttgtttctcttacgaatcttgtttcatttatcacgaattcacgatcgtgctctcgacatttattacgaattgaagtatttattaaaccatagttattggaacttaacactgacaaaatataaataacggtgagtcagacccacattctttaataaaaaaataaaacaatcgacggtgagtaattgacgagtttgcccttcccgacacacttgtcgccgtacggtactcactcggacaacttggctccggaggaccattagattacctaccgactcctagacaattccccatatcattcacttattgcatagtagtataaaatacagtcacaaacatttatgtatgtgtatccatatttttggcaaaaagaaggcagttattatatcattatcattacacacaatttgtaattcagttaagcaattagtagtatgcttctatgatatttatctctttttttctatgtgggaattgaacaagacagaaaaaagctattggcttttttttatcgttttcttctattaatatatatgattatattatacgtaaatcatgaaaacttgatcggattttgtcgtttctaatgcaatttcttgtaatttgatgccaagtgtccatttctttaatcaagtactctgtttttctttatatctctgggtgtttttttaaaaaagagtatatttctggtgagaagtgggtctactaaatgacacattttgctaaacatctaccctcgtgcttcgagcttcttcacctctcgtgatttttctattatattaataagcgaagaatgccgcattttatgcgaaaatctggaaataaaaatacttttaaggttttcttttcttaacaatggaggctgaaacactgagtgtgtaaagtattatcagtactttctttttgcatctgcattttatcagtagattttcctgttcttgcaagcattggatcagattcttataaggtatatttatgcctttatctttttcttttccgtggggatcaacaatgcatgaatcatatatatagtaaacaacagtttgtgagtcagtcttcatattctttgtttgtaatcacagttttggtatctgtctttatactttactcttttgtagattttgctcaaaaggagttaacagagagagagaagaagaagaggagcattgaggattttaaatggagaaagagatttgtagaagacatctttcaagagaagggctaggatgtgtttgggtgtttatgagcatgtttgattttagacatggtggatctaaccagaagcttttgatggataagaaacgtcgaagcaagagaatcatcataggtttttgttcttctatcttttgagtcatggaaatgtgtctaaaacaaaaaagattctcactttgttggtttgatgaaacaatgcaggtaataatggagtgtttgagactaaggttgagaagcagcttacttgtgactgtgactgtgatgaggtctttgttaagtttttgttggattcaagaatcaaacttgctttttttgtgtaaaatgccaaaaactgatgtagattgttttgtgttgttgtctcaggagagtgaagctgaaatgcagagtgtcaagaaactcatagaagctgagattgatgagaagactacgcaaaagtgtgaggcgagaaaccgaaagaggagaagtaggacctgcagcaaaatcagtgaagatatcaatgttttgattgctggtgatgatgatgatgatcatgcagagaaatcagataatgagtgtccgatagtttctcataacgaagtggatatggtaaatgatgattccgaagagaagttcagcgagttgataaagcggttgatagctcaaaaggaaagcgaggtagagagctgcaagaagaacctggtggatgcatttcaggtcttggattctaaagaagaatcattgaatatcggtacaccaacttcgggagattctcagagaatcaaagagacacaaacaattgtaattttgaagcctgaaccaaataccttggatgttggatcatcgcctggaacaccttctacagacaacaaggccaaaaatgagaaattcagttctcgctttagtctcagtagaatcagaagaagactaaagtttgcggttggaaagaatccatgcaatgctcaacatgactctgatcctgatcctgatgcagatgcattgtcgtctagcatgagtcaaaactgttgtttgggagaagagatagagaccaatcccgggtcggatggagaaatcttgcctgacattgcttcaaaaggtgaggctaataaagaggatactttccatgaaagtgaaaaagattccaagaagagtatgtgtggcatatacattgctgccaagaaacacctgtctgaaatgcttgcagaaggagacatagatgctgacttaccggataaagaagtaccaagaatccttgggaagattcttgctctccctgagttcttcacaccagaaaacagtcctagagtgaccttggcacttgatcatcagataatcgaaaaaccaaatattcagcagtgcagttcaaaagattactactatgagccacttcgactggattcaaacaaccatgaagaaacagagtttatgccagttccggaaggtgattaattttcttcttttcgtttgatctgattctttctcagctttgtcaaaatgaaactaattgcttttgattttgtatgtcagacactaggatggaagaggaagagcagactgttatggattcgttgtctgaagcaattagctcttccattatccaacaagatgcatatattgatgaggatgagcacaaacaacttttggaaaaggtttgatgaatcctttcttttgttgatgatacatatttcttgaaggaaggctcatatttcctgctttatcatgttttcaggaagtactcaaagagggacaatcaccgtgttctccaccaaactcttcagtgagaatgtctgaatgccaagaaaacaccacagatgtattgggaaagtcaagtcctgtatctgtgcttgagcctttctttacagatgatgacactagtccaaacagctccaggttctcttcaggtgtgcctagaaagaatttgcaacaccatttcagcattctagtaaaacttttgttcaaatcttagtctctgaccttcttcattgcctcatatagccgaaatgcggatgcaaccactgtgcataagattcgacgaacctgattttccaggaccggagaaagacaatgatgtcaaaacaagaatggacgacaaggaactggcacttgaatacattcaagccgtggtgaaatcatcagagttgaactgggaagagcttttggcgagatctttttattcggagaagattcttgagcaggctctaatggatgacatagatttctgttcgacaaatctctgcagcgataagaaactcctttttgactgtatcaatgaagttcttatggagttttgtggacatggcccttggatttcattcgtcaaacctgcaatgcacttttttccagacatggaaaatgctgttgaagtggtacaagaagaagtttactggcatctcttacctttgccatctcctcacacactagaccagatagtgcggaaagacctggctaggactggaaactggatggatctccgctttgatattggttgcatcgtttctgaaacaggtgaaataatccttgatgaactactagaagagataatcagcaattgcagagacttggtccaacctgaaagaatcaacaagctggttccttaaatcccactgctccagatcactaccagaaagtaaacttttgttcgagaaagacactcatggtcatcaagaggctcctctgtttactctgtacaggttcacgtccacttcaatggacaagctctagttttcagtttttgtgcagatacacacaaccacagcttttaataccccaacgactgcaaaagaaactctttgtcttgtttctttcagtccttattatgttttcttttccatttggcttctgtaaagttttgagttctgttagttgtatgttgttgttatatgaggattaataaaacaaggcttgaacttaaacaagaagaccatctctattgcttcattgtgtttcagtcaagaaacaatccaagacaaaaaaaaattgacagattaagctctttggcaaattagggccactagtgatgattaaagaacatctgaaattaaagatcttctatcaactgtgtgtggttgaaattcttgttcaccctcatttggtattattggttcagaattccttttaaagattcagaaaatcataagaaaaaaacatacacatttgtttggtattctcattacatcccaaagaacttaatctgttctcaaaagaaaaaactcagtatgaaaaaccctaatcatctctgtttctcactgttctgtcgacgtaaagaacatcatcaatccacgacacaacattataagccaaaccttctaaaacccttgaatagctctccaataccgcctttcccacatcctaaccaaaaaaataaaacaacacacaagaatattcagcatataatttcgatattttccatcgatatcttaattaaaacaatatgcaaaatggctggggctactcactcggttaaactgaatcttgcagatgtcaagtgaggtctgagaaagttcagggtatctctgtttcagacagaagagtaagctcctggctcgagccgcaagtatgtggttcttgtcattgccacgatctgcatcgccactgatatctttcatcatgtcccatgaggacttagagtgagtcaatcctccagtcttacgcctccacgtaactagtgaagcctcaactttgtcggcgagctcaagcgcctcatgctcagatgtgatcttcaagatgtcgagaagctggtcgggataaaacttctcggctgtgcacagttgcttgtaaatcacgtctcctacacttgctttcccactctgtacataaaatcaaacaacaccgagttgatttcaaaactttcacattacatttatatggaagtcgcaagttatccttttatacctttggaagagtggtgaggtaagaatcaggaatatccatgtcattaagagtggaatcgttaatggccaatgctgctttatgtatctgactggcacaatcgcgtttgtgacgcaaatgctttcgttcttcttcagataaaccttcagcaggaacacatggcaccggaagccaccatttctcgtctttccgttgaaccaccactttcctaaacgttcctgaatctctaccaccaccacccgagttcatcgatgagcttcctctttcaacataccagaactcgttttccgtaaaactatccaatatttcctacaaaagtcaaacaagtcgtgttggaaatcttttgaatcttgattatctatcagtctaattcgagtcttatacttaccattagcatgttatcgagttttctcaaagcaggaagactcatgagaatatcagatcttagctttgtttctgttatctgaaattaaaacatcaacgcaccggttttttagcgttttaaattgtgtgtgtcaaaattaagatagtgttgaaatagtattttacctcaacgttagtaccaagagatcttggaataacttcgacaatgtaatcacaaatagacatgaaacaattcatctctcgtttccataagtctttcttctctgtactcaatggttgtaaccttaaactctgtccaaacacagtcgctgcaataacacaacaaacacacgctacactataaatactctgttttgaaaacagagcatatttgaaaagagaagaagaagacaaaccatagagattggttatggagtttgacacagtaacagcagtacaaactcctttcccacttcctgacatgtcttcaccaagcaacagcttcgcaaatctttccctcatcatctctagctctgcactagaaaccccgatttaacgaaatgacaaaagaagaaagttacaatcttaaacactttacctgcatcttctgcagaatcaatgtcgctgtcttcttcgtctccatctccgtggacgtcgttgacgacatcatcttttggttcctcggcgtcttcggagacatcttcttcatggccactcaagacaacagcgttagtgtttgacggccggttataaaagctctgaacgtcgaaccggtgagataatccggagatatctgagtatgttctccggtacggcgaagaaacagagctcgtcggagttccctcattttggtcggaattcgaagaactctccatcacgattgtgtataatgatcaatgtttttggtgagtttcaagttcttctctttcgttgttggctcctctggctctgatgaacgtgacaaagattaatacatggagtctcttcctcttcagcttgagttattatttaatgactaaaaattaagttatgattgtctccgacgaatgatggccgtccgatctgattgtgggggagagacgtgccttccacatttggctaatcaaatctcataatgaacgttagttgctatatatgcgttaggtgtataattaataagtaaaggttgtcccattcatttctaattaaattctaaatgacatttacaccatgttattgcaattttcagagagtaatgttactattggaattattattttcggttcacatgtttttagttacaaattattaatgtagacataacaattagaatcacatcgtataaatgtcatttactaatttttttttgtagacattaaatatttttagatcattttaataataataatctcaaatttgtaattgtcatcaaaattaaatcggatttacaacatcttttaatgacatttgagtttgttttgtaacgaatgtttttggtcaacttttagttgacattcaacgtaaaccctcgagacaaggaagaaggttcaagccaatgaagccatggtcaatgtctaagactttactttggttttaaaaccgggatgaagtccacgtctacaagagtaaaacggcacgcagtttgtgaacactgttttcaaacgaccataattagacatcacatcatgcgaactgtgtctggtcaggcaagtcacgtgactatctccctgccttgccttgtgcgccgcagagtgcatcgtaatctcgtgatggtggtggtggcacgtgcttcccttcacacgtttaatgagcccgtctctactcttcaattggtttacgcacacacgcatagttcgtgccaagccttagcttcacacactcctctttctctcagacacgctcgagcgctacacacgcgcgaaagctcgtcttccaattcacgctgcacgctccttcacgcgcttcctccatctcacggccagatccgcctcttttcacccgccggagatccaccgtcttcttctcctctctcttggtttcgctgacggcgacagagggggaaacctttgatcggaagctccatttatagggttttttagtattgctcgatgattcgcccagagggccgagaattctgaccaatttcgagaggaggcttgtgattgttgaaagaattgtgcttagtgtctcttactcacagaggtcaatgatatatggttaggtacttaatctcaattgtgcttgaaatagtctctgtttggtttcgttagtcacaaaagttttccattttaatgtctgcaaatatgtttgtagttgaaaatgctgtttatatgtttgatttttgtcttgtaggatctttgatgaagttaaactgagagcagcttatgcacattgagagattgaagattaatttcgttgatactaaaattatctccaattttctaactaactgtaagcaaggaaatatcatagaatatttggctgcattgtccagaaggattacacgtggagtgttaaaaccagagaagtaaagatggaacatttcatcataaagggcaataacgttcttaaactaacagaggtttgggtggttgggttataagagaagtaatggcgacggatatgcataaactgcttggaactagtgaagaggatgatgacgaagaaatggacatggatgtgaaggaagaagatgatggagaccgacgaaatagagacaaacacgcagcttcaggcagtagtagtaatgacgagtttatgtttcagcagtcaatgcaagatcaagtgggcactcctgggggaggaggaagtcgcagaagtagaccgcttgaagagaaggagcgaactaagttgagagagcgccatcgaagggctataactgcaaggatactaggcgggttacgaaggcatgggaattataacctgagagttagagctgatattaacgatgttatcgcggctttggcaagggaagctggatgggttgttcttcctgatggaactacttttccatccaaatctcaggtacttatataccctgtccctgtgttatgtcttttgttgtatgctgcaaaattcttctactcttagttgtcagaaatcattagcagtaaccttgatcctcggttggggaaaaactcctgacatatccattaccagtgaaagctaaatcatcttcttgatctgctcaaccttttaggggacaaagcctactggtggttcttctgcggttgcggcaggttcatcagcttctcacattgcatcacagcaaacctcacctcctgctcttagagtggtatcatctgggcttagaagcccagtggaactcagctcttgccgtatgaaaggtgttttcacacccgctccatcaccgtatgatatgctcccaatccaatctccagaactggttggcagtgtaaataaggctgaggggcttgttggttgttcagtcgatgttatcaactctaaacaagtaacgacactttactagtacatagaaaataaatcttgtaacagttcagtcctttgcatttacatagcttatttgaaattaatgaatttgatagtttcctcaacttgagaaaaacattttcaaaatctgaaaatctcataagaacctgtcagattttcactgcatggttgatttacgtgcatacacatatctgggttcaattgtgatgactctcttccacttttggtatttggtagattctcgagattcctccaaatctgacggagcaagatttctctggcactccttatgttccggtttatgtgatgttaccagtaagccactttaatcttagcatttaccaataatatcctgaaattcatccttactaactacatatcctgttctgtcaacagcttggggttatcaatatgaagtgtgaattggctgatcgagatggactgctaaagcacttacgaatattgaaatcaatccatgttgatggggttaaagtggattgttggtggggaatagttgagggtcattccccccaggagtataattggactggttacaggcagctttttcagatggtccgcgatcttaatcttaagatacaggtcagtcttttacctgcatgattggttaagatacagttttcttaatgaagttgcgttagaatgattgttctcaagcttcatatgtatctcactttctttctttcttgctaggttctaatgtcctttcatgaatgtggaggcaatgttggtgatgatgtttgcatcccacttcctcattgggtggcagaaataggacgaaccaatccggacatatatttcactgatagagagggaagacgaaacccagaatgcctttcttggggtattgacaaggaacgtattttaagaggcagaactgcacttgaggtatagatactgtgtccatgctgtgtcttttctttacacatgaatatttgcttcttgttatcacagatatttgaaataaccaactcatgaatcacttttttggtgaatttatttctaggtgtactttgattacatgagaagttttcggatagaacttgcagagtttctagaggatggtgtaatatctatggttgaaattggactaggcccctgtggagagttacggtacccttcttgtcccataaaacacgggtggcgatatccaggtgttggagagtttcaggtatatttcctttcaacaatctaaattcttgagatactcgagcttcaccagctaacttacctttttggcttccacatgatgaccattcctttgcaccggtacagtgttatgacaagtatctctcgaagagcctgagaaaggcagcagaatcaagggggcacctgttttgggctcgaggcccagataacaccggctcctacaattctcagccgcagggaaccggtttcttctgtgatggaggtgactacgatggcctctatggaagattctttctcaaatggtactcacaggttttgatagaccatgctgaccaaatcctctgtctcgctaaactagtcttcgacagtagctgcattgcagcaaaggtgattgatttagttttctaaggcatttgaaaccctgtaaattttagaccttttgtcataatttcatcacaattgacttaaacagctcccagacgtccactggtggtacagaacagcaagccatgccgctgagctaaccgctggattctacaacccgagcaaccgagatggttattctgcaattgcatctacacttaagaagcatggtgccactctgagttttgtatccggagaagtgcaagttctaaaccgtccagatgatttctcaggagcattaggagaacctgaggcagtagcttggcaggtaaagaatacacatcatatcagtttcttaagcctgtgcttatcagttatctccaaaacctcaatctaaacgtgatttttttgcaggtattaaacgctgcttgggacagcggtacaccggttgctcgagagaactcgcttgcttgccatgatagagttggttataacaaaatgttagaaagcgttaagtttcggaacgatccagatagaaaacatttgtcatcatttgcctatagtagactcgtcccagctctcatggaaggacataacattgtcgaatttgagcggtttgtcaagaagttgcatggtaattctatcggaatctttgttttctctgtttgaagaagtctctgaagtttctgatctttcttctttggtcgttacaggggaagctgtaatgaatcatcatcatcatcatcatcaacaggtttagagttttgttttgtccctggatctgctgaaattatttactgttaaatgttgttaattttagtagcttaccatcatttctgtaaattttgtcattaaaaaattaaggcaactactgtacaagcttacaaagaaaattcaaataatatgggctttattattattgggctaacatcaagaaaaagagatcagcaccgacatagctcacgaggcattcttcctaacgtagaaaaccaaaaggtcccacatcgacaagcataaatcagatgtttgtgtatatatgttttataaataatcagtaccaccaaccaatattcactcaaggattattgggccttttaattttgtttgcttttttcaacggtttttttcttttgtttcttcattttcctttaatttttgtttatagatattttttagttttttttcaaatactaggttaatttgacgttgtgaaatctaagcggatttaggatccggctaattaattgtggtcattagcgattccacaaatccaacatatttttcacatcttcatgtatatttagtatttattttttttattttattttcttaaacggttttcaaattcttttttttgtttaccttagtttttgttttgattattaattttattttaaagttttataaactaaactaatacgacgttttgaaagctaactggattttagatcccatcatttaaccataatcattagcgattccacaaatccaacatattttttgcatcttcatatatttttaacatttattttttatttttttattttaaaggttttcaactctctttttatatattattttttaaggttttataaaatactatactaaaaatacggtgaaacgttcatgattttgtattttggctttggctaaactgtcttgatttttgtttattagccatactaccaacttctacagttgagattaatttatcatcattactcaacgatggaagtaagcatcttaatatatatggtttgttggctattttggtttattctgtgtcagaaaattactgttgaatttttaataataagaacctcaaaaataaccaacgcacgtaaacgtcaccgccgtagaagcaaacactgcatatctacaatcacaagacacaaggaactaaggaagatacacttaatgaccaaaagtctattaatcatacattagaaaacctaagttagccatcacacagagtatattggcatccattacttcaagatttatgccaaccatttgatgagtgcttaatttcaaggatccttttctttgcgatgattcgattgcgtatgacctctttggattcaacagcttcatcactgttactaagcaccatagcacatagctcatctaaagctagcattgaaaatggctcctctataagaacacccacctgcagacatttcaagcaccaacttaaagagtgataatgaggcaagaaaaaaaaaatgtgactaatctatgaacgagaaaaagttaggtacttcttcaatgcagaagagagaggcagcactgatgaaagtagcagggactacattccagtggcaatcatcccagagaataacagggagtgttagatgccataagactaagaacctcgacgttagtcgtgtgtaggaaagtggaatcggaattcccattagttgttcacatacaccaattccttcctgtaattgcatcatctttgtttcctgtgaaggagaacactaaacattatagtgcatatccaaagtctatggaaagagaattacattcagaaatcacagtcaaatgaatgaagatgcttaaaagattcaagaaagataccaacatatctatctttgtactatccaaattcagcagctgaaggctctgagaaatgaattgaatgacacaacgtggacgatgcttggattgaagaatcaaagacagatcatctacttctatcacattcttgagatcactagcaatatctgaaccataaatcacatggcactgcacatgaatagaatcacaatcacgaaccttcctctacctaactcaacataagctaacttcacaaaacaaaccttaagcgccacagggaaagcaacaatgtaacgcaaaagcgcatctctgatgatcaattcatcaccggagccatgaacagaagaaataactagcctagctaaatcattggttccactaatgatcttaacccaagctttccttccttgttcaaaccttgaataagaagcctcagtgcgaaacactagaagcagagctaaagccggagccgtaagctgatacggtagaggagaagctcgaagtacagggaagaaatcaggcaaccagtccaaatccacggcggagttatagccggcgatcaggatcgcgacggtggtgaagaagaaaacaggcggaatcaaagacagtataacgcgtgaagatgggctcgaggatacgtgacggagatggcgaagagagcttctgtgtctgacccaattctcgtgagtgtagagagatcgtttctgctgcatccgtctctctttgataccgtcagaccagtttgggacagctttaagcagcgaaatgagcttctcggatagaggtgaatcgtcggatttggggccggaggagacgcaggaaggattgaatttgaaatgtagggatttgggagctctggcggagattccggagtataatcgtggtttgagaaaggataggttggtaaagttagaagaaaaagataggttcattgactgatacattttgggcgggaaaatcgaggtttagggttagggattttggtggagacgacgatgaagaagaagaagcagagacaacaataaagacacatgcaaaaattgcagagtgcataagtaaagagagacaagtgtgacttggagaaaggtagttggaacgaacagttgtgcgctcgacaacgtttcggtttctaagcttttatctgggcttaaatgggcttatactgaaacttctattctatcttctaaatgggcttatgtcttatctcagcccattaaagttccgtaccctttgaggtcagttgaaatttagggtttatagagaacgcctatctggttggagaggtgaaattggaacggaaaaaatgtcgaagaagaacaatttagccaagagaaagaagcagcacgagtacaatctccaaagtaggtttctttaaatctctttaaacgctttcaattcaatacgcatgtgtttctcaacaaaacttggaattttttcgatttgcagaagagaaagagttacaggacaagaagatcaagaagcttcatgccaacaagaataagatgaaagtaaggaccttttctgtctctcttatctcttaattctgatatttagttcatatacattggtgttcgttaagtagcaaaccgattctgttgcagagaatggtcttttctagctatatattactctagttggttaccaatggtgaaatgattgaattcgcttggattcaatttgatttcgatagtgttagtcagaagcttatgtggggtaaaaataataatattgaatcttcttagtagaacatctgacgaataagtttgagttttccaaatcatttaaatgaagtctagagtagtttatgatatctgtgagttggttgattttgttgtctaggttgatggaagtgggaagaagaagaaaggtggattttctgttggcaagaagaaattaaagacaaaactgactccaactgctaaagctaaagctgctcaggcaatggagctagacaattgacaaggaacttcgttttttttcacttgtatgtaaaattgttcttcattgatcttcgtctttactttggagaaatcatgttgaagctagcttcttcttataggttaaactcttatgtatcactctctcttttgaatgcaagattttgctatctaaccggatcgggatcattgtggaatgtagctattgatgaagtgaaatgtgtatggttcctaattgcttctaaagttcaaattcagcatagattctgatttctctgagaaaaagtcaacttttaggtaaacaaaacaaagacacaagtatgtttataattggcataagactttcatggtgcattagtcagacccaagatcttttctagtttattagtacattccagtattccactaaacatattttgaagaaaaaaactgtcttttagaaagtcaaattatgtttgtcataatcaaaagtcttatacaaacagtgtcacacattacatggtacatttaaagttgaatcctaataggaaaaaatctcaaaggctttgagaggttatatcatcccatcaatgggtccttgcgagatattttatagatttcttctgatcagcctctctctctcgtcaaaatagttctcaaagtggaagccagtgggcaagtctctgaccagacaggcccaaatcttttctcactctccggcgcgtggcctccactgtctctacagattcttccgtctcagatcaaattccgaagagatcaatcagtctatagaaacagtagagagactagtaagaagtagcatcagcttgaaaaggaggaatctgttcaccaagatttctggttgagaagaaagaagagtgacatgttggtgcacgcgcctgaataaagagtgtggccataagagtcatgtgccatacagatgcctagttgctatatagagctacagtcaaagtcagtttattcattaggattttgaatttccaaatacattttcagaaaaaaaagaattaaaagatcccattgttgttatcctcacagtaaatgcttttgcttgagagagagtctgttagaggttttttgtttgtttctgtttccttctgtcacccagaaaactaaaaagcaaacaaattcaagaagagagagagagagagatagcctcaaaaccaagtcctaaccattgttgatagaagagaaagcttttcttttcttgttgcttatggtgaaagaatgaaagagagagaggaggagaagtaagaagcagagaaagtgtttagagctttgcatgttcctttctctccaagtttatatcttcatcgtaaagtctctcaacctttgattctgttttttcctcttatccatttatcctctttctttttctctctctcctcataattctagccacaatctttttagggtttcacaagttcacttaaaaagttgaaaagagtctttcttcttcaactattgtaaatgcgaaatggatcgaagagatgcaatgggattatccgggtcaggttcttactatatccatagaggattatccgggtcgggtcctccaacgtttcatggatcaccacagcaacagcaaggtcttcgtcacttacctaatcaaaactctccattcgggtcaggctccactggtttcggatctccttctttacacggtgatccttctctggcaacagcagccggaggagccggagctcttcctcatcatatcggcgttaatatgattgctcctcctccacctcccagtgaaactccgatgaaacgaaagagaggacggcctagaaaatacggtcaagacggctctgtttctttggctctgtcgtcttcctctgtttcgaccattactcccaacaactctaacaaacgcggccgtggtcgacctccgggctccggcaagaaacagagaatggcttccgttggtaattaactatctatctctgaaacttgcaatcttgaaaaaagaaagctccattatatattgaatcaagaaccaggattattttatgttttctcaagtcaaaatatccaattgtttattcctaatgagtgggaacttaaaactttcctaaattggaactaattttgttgtctttctttgtattatgctctgcttaaactcttatgaattagactcgcatttattgattcaatgagcctgttttttttgttcttttgaaattgattaggtgaactgatgccttcatcttctggaatgagcttcacgccacatgttatcgcggtttcaataggagaagtaatgttgaatcactaactatttcagagctttcgtgaaatgttttttatttgctgattgctgaaaagctttgaaactttgcaacaggatattgcatcaaaggttatagctttctctcaacaaggtccgagagccatttgcgttttatctgcaagtggtgcagtctctactgcaacacttattcaaccatcagcatctcccggagccattaaatacgaggttcaattttgaaatttcttactatatagagaaacattggtgttttcactgtttttcttataacatatgtttttgtatatttccagggccggtttgaaatcctagcgttatcaacatcttatatagtggcaactgatggaagcttccgtaaccgaactggaaacttatcggtttcgcttgctagccccgatgggcgtgtgattggcggtgccattggtgggcctttaatagctgcaagtcctgttcaggtttggtttacacttttctcttgagctctcatatttcttgggattgaataaagattcttgggtctatcaggttattgtagggagctttatatgggcagctccaaagatcaagagcaagaaacgagaagaagaagcttctgaagttgttcaagaaactgatgatcaccacgttctggacaataataacaacacgatttcgcctgtccctcagcagcagccaaaccaaaacctgatttggtcaacaggttcaaggcaaatggatatgcgtcatgctcatgctgatattgatttaatgcgcggttgatgatagcgagaaagaactctgtgtatataaagcatggaatctaggaagaagaagaaggaatataagctaacctctgaacaaaagtatgtggaaatgttagggaaaaagattatgtggaaatgttagggaaaaagattaactctattagtgtacctctcatatctctaagcttgtttggttttactgtttctgtgactctgaagatttgcagagttcctttctttctctgttttagattgttcagtctttatgtaatttgcttgcaattctgattctacagcttagattcagtacattgtgtagaagtttacatgggaacctgaaaattgggcatttcatgggccttcatatgatccaatttattttcatcaaatttgtattagtacataattaattttgttttttataatagctcaatgtttaagaatcttcttctgttcctgccaatactcattagtccacttctcaacttctttctcaacactttctttcttctcaagaaactttttgagctcatcttcttcaaaaggtggaggcatctcacaagtagccttaacgctcggagacataaccaatgagtcatccatagattgtctcattcggcctccattgattggacaagccattgtctccggacacacttccttggctccttgaggcacttctacattcatcttcatcaacttcccatagctttgcagtagatgcaacatgtaatcatacacatacttcatctttagattctttcgcacatacccacttccatttctccctatagctctggcctataaaacatgagaagatcatagcaaaatgttgttgttacagtacttctcttgctagtttaagagatattattgaatcttttgttaccaaattgttctagaaatctaaacatcaaagaaaagatagagttgtaacaaaacaaaaaaaatattttgtttgaagtttctaaagacacaggagcggttatgttgttatatgatacctttttggtattgttgttgccccaatggacagcaaagacaatgtcactacatttttcttgaggtcttatgggccaataatgctccattggaactaagcttctagtgaagaagtcaaagtaaaatggcttcacaagaagagtcatgctgtcacaagctaatatatacttctcactcactgaccaagcccttccttctacataaatcttgtaccttcattatacaaaaataaaaataagcccttattactaatattaaaatttaattcatcaaataactcgagaacagcaaaaagattcatataaaacctgtgggtgcattgatcttctaggtttgatgtcctatacccaatcctgccctctctgctccaatcctacaattaacattgtcatcaactcatcaagttactagaatcttctagatcattatcataaaagagatcacggtaaagagatataaatataaagaaacctggcgatagagatgaaccatagggtcatgacaatgcatgaggtctcttctgaccatggcaactccaggattccccttccaatatgcgtaaggctctctctcttcccacttcaccttctttatcccttcacttatcaactccgactgtttattccactcctttatgttaatctccggcctaaccataattaggggtgtgagcacatagatattcgaaccaaacttttaaaatccaaacaagagttttctttataactgtataacggttttcgtatttttatacagattgatgggtttgtatgcaaccataaatcgattatagtaccagccccaaaagctccagtcagggaagacaatgtcgaaagcaccggaatgtccacaatagtggaagagtggaggaggtggccacgtcacattgactcctggtcttggcctatagtctcttctccagatttcaggtgagtcatggcacatgaagagaagctcaagatcagggacttgaccaggatacatccttagcagctgtactattccccatatagtgaaaacatctcttgtctgaaaagatttcttgtattgatgcacatacactcttcctccttttattatcagccggaagtgagctttatcacttgctctctctaacgtctctcgagtgattccagtctcacgccatgcttcaagatccttgtggatccacctgaagtagtctggacaagtctctggctcgtccttactaggttgtgatttctccgggttgcttgcaggacacgtctgggttgctatgttctggtctagtgagcattgcaatgtgaagttcagtggtgtagtgagtttttccttggggatagttgcgttggtgtttcttgtaaatattggtgtcactttgattctacctccaccgattaaaaactatgtaagaaagaacaatttttgagggaaacccatttgagttactaatagattgtaatgaataattatgtatagatatagatataccatgtccatccacctgagagaagctccaacgaggatgatgaagaagaagaagacaaagatgaagattgtggttgtgatccatggcttggttagtttagaacttaaactcgagattgagttattaggttgcctttgatcatcaaccacgtgagaactcatagatattatgtgtttaattcaacctaagacaaaaaaaaatgaacgagagagagagaaagataagaggatcacattagttttgtgacggtagaaggaaaagaggattacagatattgattcatttgtatctaagaattgtagtatgttggatgtgtagacccatgttttctgaggaaattttatgaagaaaatagataattaatggttgtttcttcagaaccgaagcaacccactttaataagttaaaactatatatggactctgcgaaattaattaccctgaaactaaccaatatttcttgttgccattatcctgtatgtttatagtgattacgtggcaaactccatttttctcaactttatattttttattatttaattctaccatcacatttatcaaacacatatttttcttattttcattctctttgaaccacttaccaaacacacatttttttctttctaatatctacagataccaaattttgatgttcttaatttaccttattattaccaaaatgaactatttcagttgcctatatattcaatgctatagattttttaatgcaagttaaattagaatataaatctttacattttatatgatttgaaaattaacaaggtctgatactataaaaacatcattatacttttagaacatactattttatttttgttcttataattttaatgaatttaattttaaaaaattccaacctaaataaatatcttagtaaagtttttaaaaaaaatagaactaaacttataacatttactaaaacattagaatatacaactcaattaacatactagtcggaaaaaagatcgctagtggagatagagacacatactagtcggaaaaaaaattactcgtttacttttcactaatttcaatatatgaatacaactcaatcatctaaacaaacacaagagcctttttggtcaaggcttcttgatattggctaaatcatgaaaatattgatcttcccaccactcaacttgacgagtcaaattagtttttctctcaagaatctcttttaaatcatgagggttaaaaggagaaggcatctcacaaggagactcttcactaggaaacataaccatagactcctccatgaaatctctccaccgtcccgtcgccgagcagcccataatatccggcgtaatctccgtggctccccacggaatctctggtttaaacttcaaaagttttgcatactcgttcatcaaatggaacatgtagtcatacacatattccattttcacttcctctctaataaacctactcccttcttctcctatcttactcgcctatataaaaaaaaaaaaccacactcaatgtgttaatttgttacaaaacaaaactttttgggtcttaatgtaaaaaaaaaaatacaaacctggtccaaatgagtattcccccaatgtacggcgaatttgagggaagtacacttagaggtgtctctgattggccagtaatgttgtaatggcatcattcctcgtacgtaaaaatcatagaacataggtctcacgtacaatgtcattgaatcacatgccattatatatttctcactcactgaccatgcccatccttctatataaatcttgtacctattccatcattatcacacatttaaaatcgaatctttgcaaatatttcctaagtacaaaaagtgtggcttaagttaaacctgtgggtgcattggttctctaggttagagttcttgaatccttctcttgactctctatcccaatccttcacaataataaacatttttgatcatttagattatttaaaaattgcaatatataaaaattatacatattttgagaaatcctaacctgaatgtagagacgtgtgttccaatcttcttgagctgagacattacatctgagaagatctcttctagttggagccacattagggtttcctctccaataagcatacgccacgcggtctttccattgagtcatcttattcccttcttctatcgccactagcgatttatcccaaggctttatattaacctcagccctagcccaataataatataattagctaggtccaataacaagcccattaaatagagaacagaatagaattaacatgtgtgttaagcccttaccagccccagaaggaccaatcagggaagacaatatccaagctggcgtcatcagagcaataacggaacaaaggaggcggggccgggtgttgttgaccttgaaagtctttagatcggacggttggtctatcatctgggtcaaacatgagctcaagatccggtaacctacctgggtaccaccgtagtaactgtacgatgccccacagagtaaaaacgtctcttgtttggattgactttctatatttcttaacgtacactctcccgtcgaggattactactctgaaatgcgccgtcctcctggctttctcaagcatccctctcgttacacctgtctctttccatggccgtagatcttcgtggatccaacggaagtaagaaggacacgtggatattcttgaatggctgcttctgggtttgtcgttgtttctcgaggagccattttggggaaataattgagtttggttctgaacgacgccgcattggttagggaatctttggcttgtgattggtgattttctgatactagttgttacctgcttcagacctgtaaaagttgtctgaagtacagagagatatgaatttattaactcttcaagttcaagattcacttgattgaataaaaagtttctaaaaaagaagttacttcagattcgaactcacgaaatcgaaacaacccaataagtctaagagaccagcagatatgaagagagaggtgacgaggaacagagtagctttagcgatgctttttgctggatgcgacgccgttttaagatagacatacttattcttgttcgttagaagattgttgttgttcctcttcatgcttttccgttgaagcatgaatctatatctatctcagctttatatatatctatgttcacaaacattcaacaggaagagaagaaaaacgagaatcaggtgagattaaacgttaccgaagctaggaggaagctcaaaggtttgattctggtgatcgattggtgctcttccacgaggatttgaatcttgtttcacgttatcttcaacactaaccagagttcacatcttttgtgttaatgacgttcatatttttgtgtgaatcttgtttactttttagtttttcgaagagttaaaatgtttttaaatattaaatagataatattttattaattagtaggagacatttggtcatccatatttggtattcctatgctcaaatcacatatggacattgatatgtgatacacaaatgtttcccaaataatcgtctcttattaacgttgtatttattggtaaataactaaatacaagacctttgatgttcttagaaaaataatctgcttactacaaaaataaaactgcaagagttcaattaattaaagtcctctttgggaaagtttgttataagtgctttaaactgaataaaagaatccgaacttcgaagaaagaagaaagaagataaaccttaacccattaaataaaggtcagtgacatcatagtccatattcgaccactcatcatcatacaagacagataattaatcgtaaataattccatgttgtagagtactttttattattatacaaatacattaatacatctttcacaggctgttcgaaactgtgagtctgtgattagtgattagccttaattaatttactttattgctttgttagaaaaaaaattacacctttctttaaattaaaacaagttgggcaggaaatttaaaaacccgttgggccattaggattcacaaaagcccaacacctacaaaaagagatgtctccatctcatagtccatataccacatgcttaaaccagtttaaattgcatataccacgcgccacataaccggaaagttttgtacacgcgcgagacacagacattatcctttttgtatctgtcttccagcgtgtcgagtcagtgaggctccacgtcaccctttgatccacttaaattttaaaactaaaataattgtttaaatgaattcgagtgattgatattttattatagatttaatacacacccgacactctgtcaattctataggcatacgagctcactccaaatttagattcagttttttaatacgaactttttagttaagccaagattagcaataatatagatcatttattttcttgattgtagtttgattgttgtttttctcataataaaaaaatcccagctaaaatctgattttcaattttaaaccaatttatatggtaaacaaaattttagttcggtataattggaagaattaagttttgttgaatatcaggaaaaaagaaggggaggacaaattttctacagaggtgacgtggcatcattgaaccactttacttgtcggcagtgaggtgtgtttaatcacgtgtaacgcatccaatgcgtatgagagctttacagccgcacgatcacatgggtacaaaaatcaacggcgaagcaaaacaagagtctcacacttattaaacgcgcgtagtacgctccaccggtataagctaacggaggatataaaaactctttaactcattattgtcctaaaatctcaattttatccattttcacggaaaaaacataaaatctgttcttcttcttcggctgagagacaatggcggaggagcaaaagacgagtaaggttgacgtagaatctccggctgttttagctccggcgaaggaaccgactcctgctccggtggaagtcgcggatgagaaaattcataatccacctcccgtcgagtccaaagctcttgccgttgtagaaagtaagctttctatttacatacgtgtgtgttttatatatgttaatcttctacttaggaggattcattcatgtttacgatgaattattatagtatgtaattcagaattcttacgtttggaactaaggtttcaatttacaattaacaaatggattttcttaagatgcctaaggtttttgtgagttcttttgcatatgacttggtctatactctatttgtttaggtgaaatccatcgctgttagaatttacaacttcatcatggcattttcaagagaattatgtttttcgaggatgatattattaaaatatgattaatagtaaagcaatgttccctgtaattagtgttatcaaaaagtgtatggaatcatgacaaattagttgtggacagctatgaattaaggaaagtgggttactttcttaatattcctacattttttccttcctttaaagttgcttaactcttggaaaataacaattaagtactaactttccagcagtttttataatccttgaacattcatttgttcatctttatttactatctgtaattccttctgtgtggagtttcgttttataaactactattttgatgaccttattagccaattagagcaacaaaatttaacttagttaaaagtgagcttcttgcaacaaatatccatgtgttatacttataagtgtgcttcttgcagaacccatcgaggagcatacacctaagaaagcttcatctggttcggccgatagaggtcagctgataacaacactttgtttctcatgtccagtttcttagttacttagttcagtaatttacttcaaatgtgtgttgtgtgtgtttggtcagatgtgatacttgccgacttggaaaaagagaagaaaacgtcattcatcaaagcatgggaagagagtgagaagtcaaaggctgagaacaggtaaactttcatcatcttctcacccaaagattactattgcttacagatctctgatgatcttgaaatggacagggcacaaaagaagatctctgatgtgcatgcttgggaaaatagcaagaaagcagccgtagaagctcaacttaggaagatcgaggaaaaattagagaagaaaaaagcgcagtacggtgagaaaatgaagaacaaagtagctgcaatccacaagttagcagaagagaagagagcaatggttgaagctaaaaaaggagaagagcttctcaaagctgaagaaatgggtgctaagtatagagccactggtgtagtaccaaaggcaacgtgtggatgtttctaagcctttattgaatttgtatctttgtaacaattcatctctgtttctttcttcttcttttgtttttgtgtgattcaacaactctttttagtttttgttatttgtttggtcgtttgtgtcttgtttacatattgggtgattgtgtgtaaaagtgaaagattaatggagtataattgtatgaagcatcaaatcttgttttgccttttgtttcagttgtacgacttcacatctgatctgtaactcttaaaatgctaagacacttgacttgacacacaccaactataatccttaaacagttcaggcacaggtggagatctaaaagcaataaacaagcgaatgaagttaaaatgtcttcttcggtttgatctcactactcggaaattcctctcaagtcttcaagatgagagaacatcaaaatgaaaaggtgaaaaggtttctaagaacatgaaaattagagatgagagaagacaactttaaggttcatatcatgcagcagaagaagtcttcaattcaaaccaaatcaagccggtactgctttaaaggtttagacacaatcaaccgcttccatcgccatcaaccacctatactgtctcttcttgcctcagtacagtactctatgtgttgccttcatctctagaacgagctagtggctgccaaagctgaatgatttgcctcctcactacacctaaataaccgcaaaccaaaatcaatggaaatttggtctatgagcaatgcaggttagttctaatgtcaagatgcctagagagggatttgtctcaccggttagtccatcaatgccttgccgggtagagaatgtacaccaggtagaagttactgacagtagattgccttgtcgataagtgaaggtatgggcttgatttcagttccaagttcttgctctgtctgatacctgttggaaaccaaataattgagtaagaaagctatagcatctatgaaaagagaggccacaccagttgagaaaaagaaacacgaacattttgaagcggtcctcataagttaccaaattcacagccaacccaaggtgtccaaatcgtcctgatctgcctacctggtaatataatgaagcaaaaacccattcacaatttgaacaaataaaacagagcaggttctcaagaagataaaccaaaatcggcttcccttaacataccctatgtagatacgactcagaagtcctaggaaaatcgaaatttatcaccacattcacagcttgaatgtcaatcccacgtgtaaacaaatctgcaacagacagacattccccgtgaaacataaacacatttgtcaatgttcaagcacatgaaatacacaaaacgtaccagtgcaaacaagatttctgcatgcaccattgcggaaatcatggaaaaccctgttccgatggtcttgaaccatctttgcatggatatagaagcatgagtaaccaagttctgtaattttcttggccaacagctcaacacgattaacagagttgcaaaagataatggattggtttatttggagctgcaatagataaaacaatatttcctttaaaagatacatcaagtagccagaaaataaaacattggggttttaagactgtaacaaaactctgaccttagagaatagcgtgttaaggcagtgcaccttctgtctctcttcaacaaaagcataatattgggtaacacccataagtgtgagctgatccatgagattgataatgtaaggcttcttgagataccgatccttgaaagacttcacagtgacaggaaatgtagctgaaaacatcaaaatctgccggctctctggcaagaactgtatcaactcctctatagaaggttgaaattctacagacaaaagcttgtcggcctgaaaaaagatgtttgcgagttaagaccatgagctcatgaggaaaagaaaattattcaatcaaaatctgcaaatatgaagcataagaggaatcgattttgttttaactttagagaaagttatgttcagggaaaaactagaaatgtccttttgggcaaaaatccaacaatgtttgttaataagaaaaatctagctcaggggtaatagaattaggaactcacctcatccattacaagcatggcacaatctttcaaaacacacacaccctttttggcaagatctaatattcttccaggagttccaaccagtaaatggacaggttgatacaatcgcatgatatcatccctcagactggtaccgccagtggtgaccataacctcaattttcaaatatttggaaagctccttgcaaacctgggatgtctgaagggcgagctctcgggttggaactagaattacggctgcataagaaaaaagatcaacaaaagtactgaaaactcagtaagaaagtagggtttcactggaagttccactgatcaactaactcactacagagaaaggtaggagatcttttaacagagaaaagttctaaaaggaaagtaaaaaaccttgaatgacattgttctctggatcaattttctcaagggtaggaatgcagaaggcaccagtcttcccagtaccatttttggctctagcaagaatatcactaccagtcaaagcaatgggaatgctttcttcctgaataggagatggtttttcaaaacccttctcatatattcccctaagcagatccctcttcaaaaagtaatcttcaaattcatttcctttagtggcagtcacatcctgaagacaagatatggaaaaactaagttctaagggaactgctgtcttgtcaaaacaaaaatcatataactatgcaatcattcatacctctgtctggtaacgattatctcgtggtggcagctttaaggttgctttccagtcttcattactgataagcataagaaaacacataacccgttaaacatcacaacaagagcaccattcataataaccattcttccaaacgagcacttacttagaatcgctaatagcttcagattgaaccgttttttcgacctcatctatgtaacttggatcaccaggaagctgagcccgtcgagaccattgttgttcttgctgctgctgttgttgttgttgttgctgctgcagttgctgttgctgttgaatctgctggggataacctcgctgaacgtactgctgagcatcagattgagactggagatactgaggaggctgaggctgaggttgctgtggaaacggagtccgtgactgaaggtactgttgaggctgaggtggattcggattccgtgactgaaaattaggatccggaccaggacccgccgcaccaatccccggtggaaatcttcctctattattattattattattcatctcgatctcgaaacagagaactctaattctaccaagaaatcttcacaagctcacaaatcgtaaatctaagaagaggctataaacaacaatctggagaatgttaggtcacacgtagcttcgtaagagatgattgattgattgattgattggactctctctctcgggggagggcaagatcggaatatgctaacaattatccacaaaaccgtttccgccagaaactaatcgagcttagctaagatgaataattttcttttgtcgtctggttggttagtgagaaagtgaaagatacatacactcgccggagtcgttgttgttgtttaggtcgtcaagtggattttcattacacggacaggctcttcttcagtttcactcactcttatccacatttatttcactaaattagccttgtacgttcgtataattatgaaataacccccacatttctttgtatttatcattattctctcgtaatttttaaaaatagatcttcggatcttccgcaaacagagcgtacggctgaaaacgtcgatacccttcattgtgctcggagtctaaaattgtaaaattgaaattagaattttgatgatcgacaatgattgaatggcttctcctctttcgaatctctaccactagaaccaaaattaccacaaattctcatttcttcaagaatttttgataaataagacagagaacttgagagatgaaaagaaaaaaacacaaaacctggtgttttttctctcgtcgtcgtttggtcgtgtcctaagacaagaaccggcgaacgaagaacaaactttttgaatctaacatccgaaagaaagagagaaaatgtcgtttacaggaacattggataaatgcaaggcctgtgacaaaaccgtgtacgtgatggatttgttaacattagagggtaatacttatcacaaatcatgtttcagatgcacccattgcaaaggcactctcgtggtatttctcttttcttcttcttcctccattgttactctgtttttcgacaatgcttcattgttttaaaagaccacatcttttcttaacacagataagcaattactcatcaatggatggagttctttactgtaagccacacttcgaacagcttttcaaagaatctggcaattacagcaagaattttcaggcaggaaagaccgagaagcccaatgatcatctggtaatgtcttcaaagattcatcatcttgtttttatttcctcttttttttcatctgatttgtctcaattgatggatactgcaagactcgaactccaagcaagttatcatcattcttcagtggaacacaagacaaatgtgcgacttgtaagaagacggtttacccacttgagaaagtaacaatggaaggagaaagttaccacaagacttgcttcaggtgcacacacagtggttgtcctttgactcactcttcttacgcttctcttaatggcgtcctctactgtaaagtccacttcaatcagctctttctcgagaaaggcagttacaatcacgtccatcaagccgctgctaaccaccgtcgatccgcctcttctggtggcgcttctcctccttctgatgatcacaaacctgacgacaccgcctcaattcccgaagcaaaagaagatgacgctgcccctgaagctgcaggagaagaggagcctgagccggtcgttgagtcttgaaaatgtcgtggaggaatgatcttatcagttctcaagtttgaagtttttatatgcgtttctgtttaatgaatatataaatacaaattgttgttgtttcttcttgtaaattcttgtaaagttttaaagctctttttggagagaatctgttgtaaacaaaatctttaacatccaattttttttgaagaggatatttttaacctttagttttaaaactttgaggaccatgttctgaaacaaaaggttataacaagatattttatttgatgaatcaaaattcaaaacatacggtatagatagcattcaaacacacttctctccatttcttgtaatcaagagttgtgagatttcgccaaagaagaatcaaactcttgacactgtgttcttgagatgagtagtgtttcaagacatgaacagagccttgcattttgccactgtgtcatctggactcgtaactgcaacaacagaaacaatcctatttgtcatgaaaatatctcgcaacacaaacatacagagattaaacgataatatatccaagtagctgacctgaatggccaattgtttttggtgattcatagatttcatagtcatttccaccctgcagaagtaaaagccatatttttacccatcaagctcaacggaaaccatacaacaactctaatgaatagatttgcagagttgagatgagtcttatacctcataggtcttgtcaccgaagaaatggatttcactgaagtcctcgaggtattgcaagcagtaagtcttatcccaacctttagggaagacctaagtcataacaatttgattagactcagtgactcaaaaaatggatttaagaaattgttataatccacattttgattctactcacatcgaagcttatctgtcccccaattgagaaagtaaggttaagatgtgcaaaccgctcacgaagttcagctaccatctttggtcggatgttttgaaccttttaaaaaaagtgttgaatgacaatgctcaaaatatattctataagaaattgaacaaactaaatatagtttcttctaccttatcatatctctcaaattcatctctttcttcttggctgcagttgcgaccaatgggtgatacattgagcattccatttcggaattcaataaatgttcccctatgtatacaaatttcaagaaaataaatcatcttatcactttgcaaacatgattagagactagcagttggatccacgttatacctcttaattggaatatccaggtctgcaatgtagtgcagcgtgaaatttatcaactcctgcatcatcaatttacgctatcagaaactatctatatacatatatacttgcatacacttcaacatcaataaaaccactaaagcaactgctgctacgacacatgaaggacagtgatatgagtttaccttgagtttatcgtctccaaggtgcagcttcaggctctgagaaaaaagatacaaactattaagaaacgataaaacaacaatgtggatgtaagtaagtaaagctataggttcatatgcacctgaattccaatggatttcccatctttatgggcgacaagaccattctcagagaaacaataatcatagtcgtttgtgactgcaaaatttacaaattcaaaagtttaagccaagagaatctcacaaggcaagaaaattagagccagatctaaaactccttcttgaactaagacttaggtaaatcaaactcattccacaatttgaactcaaccaacttaatgatcagcagctatcccaaattccaaatctacagacttcaaggatcttctgtatgcatgctactaatggatctagtcaaagatttgaagcagagaaaatctatatagtttgtctccacttttaaaggatccatccatatatagtagaaaagagcaaaagagaccattctaatagaagtaggaaaatatcctttctttgaataccaaatcgaaaattctacagcaggttatagtttttccgatccgatcacagtcgtacctgttttgccaagctgctcagatatcttacttagatcagatccaccgacgactccaatagtgacgacctgaaactctcacatacattatatcaaacactaagtaggcataaacacaaccaacagaaacggaacttagcaacgatggatcaatgagatacctttcgcaattctcggataaaatcgagcaattctggagtagcttccttccttggagctgtgagagtaccgtcgacgtcgaacaaagcgatcactccgggaattttcgccgccattgaatccggtggtagggaatgatgaagagttttcaaattagaagatgataatggcggaacatgtaaatatataaattggaccgatctaatctttattctttaaccaaagagtgtcgcttaaactatgggtcctcactttttctcctagagatcagtgattggttgataaaataatcgtgacacatcaaaattattcttttctaacaatccttatttatgttatataaagggtacttggacgttgttgacccaaaaaacatgaaatagtattgaggccgaaaacaattaattttatgaagaagcaatttgggccagtactactaatggttttcgcctttttgggccatccggtttatatttgtatatcattatgcaaattgggaaatatgactttataaccaaaaaaaaattcaaacgagagcacttgacaaaaaaacaaggtgatatttgatgtattttcacacaaatgataagaggaacaagagcgtgcacttcacacagcaacgtttatattaaacggttgtatgcaacgtttatattaaacggttgtatgcaacggtaaaccggagaatatgtaatgtaacggtaatattttgttttataaaaaaaggaaattaattaactcacaccaatctataaatacggacttacttcatcattaagagataagaaaatctcgcactaaggagaagaaaaaaaccctagaatcgaatcctctttacgttgaggatcttcaaaagtcttctttgtatataacctaatcgatcagcggttcagagaaacggttatggttttttctaattatatcgtcggcgctagtgaagatccggtgacgaagacttgcatgaacgctatggcggtgaagatactcgctctaggatctgttttggcggttctaagttctaatggttatttcaataaaaatattcggcttcgtgaatcgtaattcgtgacaatcagcgacggagatcgcgacggagagactggggaattcgtttccgataacggtggtggtctggtggaggactgctttgccgtaagattagagatggtgtcgtttgggctcaggactaaggtgcaattcttcaaagcccaacaatatcaatttcagcccgccataaaagtcaattcttagccctattttctttttagcccttaaattacttagatttacaaactgagatagaagttatgaatatttttttataaggttttaaaattttgattttttcccatctaagggttttcaaatttaatttggatattaaatttataaaatgatatgaaagctgaccggattttgaatcctgtcatttgacctaatcatttgatcgttagccgattccacaaattcaacttgttttcgcatcgtttagtagatttaatatacaagttattaatatattttttttaaaggtgatttttgttcttttctttcttacggttttcaaattttaatttggatattaaatttacaaaatgatatggaaactaaccggattttggatcctgtcatttgacctagtcatttgatcgttagccgattccactaattcaacttgtttttcacatcgttttatagatttaatatacatgttattaatatttttctaagaggttttttataaattttatttttgttcttttctttcttacagtttttgatcgttagccgattccactaatttaacttgttttcgcatcgttttgtagatctaatatacaaattattaacattttcgaaaaattttaaaatttttgtttttttttcttttttatggtttttaacttttaatttggatattagatttacaaaataaaataaaaattaaccggattttggatcttgtcatttgaagtcgtatgccgataccactaattcaacttgttttcacaatgttttgtagaattaatatacaagtttcatattaatatattttcaaaagttttaaatttttgttttttattctttcatttttacagtttttatttttaaatttgaatattaatttttacaaaatgatatgaaaactaatcgaattatggatcatgtcatttgacctttgcatcgttttgtggattatatacaagttatgaatattttttaaaaaagtttcatttttttttctttcttttttacggttttcctcccctcattgttcttttatcaatctttgtaattcctttcaaatacaacattaacaatatacaaaatagtagtgagacgagacacaagcagttcctatgactcgttacattcttgtgtgatcactatcagtgtgcaaacgagctttgtcacatcattaaaaatcgaaacttgcatccattgcagaaaaagcttgtcaacctaagatctccaagaaaataaggaatgcttccatttgcatctccggcgaattcactgtgaattttccacttggctctggcctgcgttgaagatgatagctttttgaagaagacgaggttttatggcttaagagaatatagcattcacaaaagcctccggatcaaaaggttggagatcttctacagcttctcctacaccgataaactttacgggaatgcccaattcctcaaccacactgacctgcaagacatggagaaccagtttcaatgacagagctaatgaaaaataagagctttgaatgagatcaaaaattttatgagatatttaccacacagcctcctctagcagagccatctagtttcgtcaatatcaaaccggtgataccaacaacctgaaaaaaatgtaacccagaaacctcaagattttacgaagaaattctagtttggggagccagaatcactaggtttaggtagtttcgtatggtacctcgttgaattctctagcttgtggaagcatgttcaaaccagtgtttccatcaaggacaagtaggatctcctaacaattccgtaaaatattatttttagctaacgcatgatcgaaattggagactaacagagtgtaataatataagcaagataacagaataggataagtaaaaaggctcactcacattaggtgcaccagagacaatcttgcccactgcttttttgcacgcaatcaactcctccatcaaactgtaattagtatggagaccttacataaagaggtgtaatgttcctcagattcagtaaagacggtacataagcatgttttttaagtcagcaagcaaactcttgtatgcttacgtccagatgtgtcgcacagtacaacatcataaccttcctccttcccccttttcacagcctttgagagaactattcagaaacagaacaaacatgttaaagttgtttgtgcaccaaacaccgatactggcaagccaaaataacaatgcattggtttacccgtggctgctttagccttgtctccttcagccacaacaatctcacacccagtcctctctgcccatatctctaattggtcacttgctgctgctctaaatgtatcacctgctgccattaatacctatgacaaatcatcgcaggattgctgatgaacatactgatactcaattctatttctacctaccctggcaaaatttctcatcacctatttgagcaaccactttctagtctcaactctcaagagaagaacaaaaaggatctagtttacatgatatcaaacatgaaaggtgtaccttagttccttcatttttcaatctatgagccagctttcctgaaaaacaaaagccagaatctttcacataaatctttctgtggctaagccaaagcaaaccagctagtcatttgaattcccactctaaagcattaatgccaatttccttaccaagagatgtcgtcttcccacctccgttcactccaacaatcattataacagctggtttcctgatacaccataacatataaccagacttagaaccacaatctttcataactccacttcaacagagcagaggcgtgaaagaataacaagtaacacagctaaatgaagagaacctaaaacccaattgaagctctgtcttgctgtttttcttagccagcatctccaacacactttccttcaatgcatcctacaccattcagaagtacaatcaactagctataaaccctaatccctaacataaccacaatttcgttcaaatcaaccttaatctcgcttcctgatttgagttttcctgacatgatatcctctcttagcctctccacaattctaacagtaatcttcggtccaaaatcagaaaccaaaagcgcctacattgaattattcccactattaggtttcagggaaactccatttgcatctgaaacccagagaatcaacaataattcgaattaagatggctttaaaattaaaaaacctcttccaattcatcaagaactcggtctgtttcagcaagattccagaagagtaagagctcgtcgatgactgctagattttccctagtcttagagaatccggagaaaactttctccacgtcgcttttggccttctccttaatcaaccgacccagccgcgtgaagaatccgctcggtccggccgagcaccggaaccgggtcattcgtggacgaaattctcctctgagaggaaataatccgatccgttcggaggagaacggcgatatacgtccggcgagaaacgagaggtgagcagaagaagttgccatggcagttgtgctagagaatctgtgtaagttactgacttactggataataatcttttttatacgctgcgttttacgtttctattgtttcccaataatgaaccaatctgcaaaaaaatgaataatgaaaaacgcagcgttaatgcttaattttttgaaaactattaattataattataaataaaaaaaatcctcaaatacaaatttgttttgtatataatagattacgtctttttatattctatctatctagattacaagttttatcaaggatatgttagtaaattagtgagagaaaatagttaatcatctacagttatcattttgaaaactataattagttttatttgtttatatactaatttctctttcaaaggtatgtttatatcttactttgaacgattttcaaagatattggaaatttgaaatcataagatttatcctcaaacgagcacaacaagtaactagcaatcattcagctacaatcacatcaactatttcattcattgatggcgccattaagctttggtacaaagtatgtatgttttaaaacctactactatatttgatttctttttcttttgcctctatttcccgtagatttctcaaatgtccatagaacgactttaagacttgatccaaaggatgtaaacaaagtccaacaacttcttcacacgtgattcaattttaactcaaaagtgcatttgtggcgaatactagtttgacaatttatattttgttggcaaacaatttataggacttcgcctattttgattattatatacaccaaatttgtttgctgaggacgaccaaaagtgaagactccaaatttgtttccttaggtataacgtttaacttatctttttctcttatgtttcgcatttgtcgtatatttggtacaccaacagccgaacacattcatacaagcgtcataaacgtgacataagcaaaacgatgtcatgaacgattagatggtatgtggaaaaatgttactaagacaatttgctggtctgttttctttaacgagtacttgaaattacatatgcatgtactacacagttatagtacatacatgtgttccacacaaaaaatataaataaatcacaatcttttttccacagaattgataatgtgggttgagttttcccatcaacggatcggatctctaaattcagtggtttagacctgactttatatatacatatcgtgtaaattactttagattttggtttgagagtctctaattataaaagaaaaaacaagtggccgattataaatttcaaatctgttgaattatctaattaacaatttgcttattttaataaatatttttattatttttgtttttggtagccatttttaaattctatcttcttatattaataagcaccgagaaatacttggtgattattctaattttttatatttttatatgtattcggtcaaaatttatagatttttaactctattactctatatttaatgactagtacatgttctccgttttttgaatatctgaattggcattctaaaaaaaaacacttacaatattcgtaaaccataccttgtaagttagaattagcaattccattcccgctatccaccaaaaacggtataagaaagaactagtagatattgacctagattgactgtatacttttatcaagtcaacacgacaacattgtagaaaaagtactacatagttgatatgagtgcctaatccatgtgccatgaaataactgggcaacaaacaacaaatttccagaaacagtctgtaatgatttattcatcagtactgcaagctaagcccatcggtcatcttgggtcatatgataatatacatataataatatctcgcaaaaatacattatagagtgagcgaccacatcgttgcagttttaaactattgttaaatatatgaacatttccacagctatttagcttagctcacgacacgatgctgctgacatatgtaatttacaatgtatagccatgcatgcatgtgtttgttggccaagatttttcagtttttacctttcccagctattacctacatccactttgaattgggataaatcacgtaactacgactacaataccaatttgtattaatgtaattaactgttacgtcaaaataattgatcaaaattatatatatacgcaaatgtgagaaagcgcggcagcggctctagtgtgttctgggacggtaagttgttcttcgtgcaatgccaatggccatcacagcttttcgtgttaacgagggggtttaattgctccttaaatgtttcaatcactatatgataagagcacgtttgttacattagtctcaaaagtgaagatatacgattaatttatatatagtctgttacattttgtgataaaattgttattgaaattattaactggctatggatcacaggttttaaaagtcgattattttggtgcagacaaaaaaaaaacgcgtcccgtcgacgtttggcaagaatgatgcaaaaaatacctgaaacttcgttcgaattgtcgccacagtttccttcagaaacaagtcaacttaatcgcttgtgttcgacacgtgccgtatcaacgactccattgacttttcccaaaacattacgtacacaattgtattcttcaagttactactttcataattctgttcaaactaaggttctaatttcgtgaatgcatgcgtattataacaaattgcacttgttgacaaaactttgtataacaaaaaaagacatccgtgaaatttctaaggcctgagagcctttctcttctttctttctttttcggaaaacaaaaagtatttgaacaaagcgaatatgaagatgtcttttgtagtggagaggcgtctattctttggaaaatgctactgaataatcttttaaaacaaaccattaataattctgactttaaggaaattaagcaaataagttaattatgtagtgatgtcgtcatcaaatcaaattaataacacgcatctatgtagtcacgccgcacaccaccgttgatcatgccaccggccaaagcatcgaggaaccatccgatcgaccacgtcattattcctatctattttattccatcatcccctgagaaaagcatggaattatattttatgtagaaatcaaaattcagaataaaaatatatacccggtccgttacgtgataagaaaagaatatatacccgttaggattaaaaaatttaaaattgtacaaacggtctagtgtgagaaaaatacaatttaaaccaaaaacaaaatgtgagaaaataaattttgtttgcactttccgagaaaaaaagatacttagaacaaaaaaaataatagaaagtgactggaaacaactacgaaaagggacggtgttcctcagtcaatttagctaagctatataatataaactcatcctctctaacaaatctcacgaaacgaaacaataaggaatctcctgcaaagaggattagacttatacatatagaaacataaaacacacaaaacacaccatgtcgtattcaacattcaaaagatcactggagattgaggtaatctcagcggaaggactcaaggtagatcgaaaaccattgaagaagaaaacatacagcgttgtgagaatcgatgagaaatcttgggcttccaaagtggatgaactaggagggagttatccaatttggaaagatagatttgatatggagatgccaataaacgcaagtgtaaggtttatatccattgaggtttactatcgcacaagtggtagtgggagggacaaaaacgtaggttacgccaagattccggtgacggatttcatgggaggttttgctccacaagggcatttgaatttcttgagttacaggttgagagatgagtatggtgacaaatgcggaatcgtcaatgtgtctatcatggtgaaacctgacggtaatgatcataaatcatcgttgccgtcgtcgtcgtttgcggtggctccggtggattatgctgcgtgttcttggcaagctacggcggcggcgaggaataatcaaatgtggagaccgaggacatcttcatcaatggtttcgactgctggttatggtggtggtcgtgtagtcaccggcgttcctgtttggtgtgcgtatcaacggccgtcttaatttttatttattttctcgtatatatgcatgcacagatttatctttgatgttttttgtcatattttattccataaataaacgtttgatttatcattgattaatctaacaattttaaatgaataaaataaataaaatccatctttaacttacaagtcttctgagaattaacgcttcaacaatcaagatagaaacaaaaaaagttctagctttgtatcagattatttttctgaaataataagactagtcatgaaatctcccatttccactacaatgcattaactatataagtttttgttttcagcttttaacaaaaacaactagtcgtctgtgattctatcactttgatggaagcccggttcgacatgcgggagacgcgtagctattatgaaaattgcgcataaatgatggatttgggtccatcagaatcgtttgacataaagacgggatagttgagcatctaagcttcttctttttattttcttctcattttctggttgagatagtgcttgaaaaaccatgtaattagcatcctaataataaataatcatctttatttatcaaatgtttttattatatgaccaatccaaataacacatttttatcctacttctttttaacatagtcttaaaattcaagtcaatttatatatgttggtattaaatgaccaaaccaaacaactaattttaacaaattatcaataattgttttcaccaaaaaggtgagactttttatttttagaggttggagtttgcatgatcatgttcttcattttttctatataatttggtttataatgagttttgtttgaaattgtagatgctcaatctagctaggaaatcaacattctttcgacaagcagccaagaatatcactcttgctgtgaacgaggttagttcctcaactactcgtaggccataaaagacttagatgggtaatggatgacatatatgtttgtaccatcgttctttaacctttaaaaaaaatctatttgattaaattttcaatgtaatatcatcgttcttttactttatttcattttggctcaagatcctactcaaatgatgagaaactccctctcacaaggcaatacctcaataccaacaagccgttactcaagcaaacattcgaacgagcatacaagataccccagcggaaactcaaaggtaggcgacctatcaaatttctacccgctgatggcctatacatcgagaggggtttgagagccattaagaaaaagtttgagatgcctggcgagatcacaacagacattgaccagaacggatgtgaatttgttctagtatttggatatgaccgaaatcaatgagctagatgagaacggggagaagaagaaggttccttgcacctattacctaaagtattgataatttgatatggtttgattttcttataaagtagtgatagctttcaaacaaattttttatttttagctcttttgctttgtaatttttaataaacttgaatcatgttaaagaaaattacataatcataaatacagtggatcatcatcatatgataataataattgatctttaacatacttggaattataaaaagaattatgtaggcagccccaactaaaaggggtagagcagaggtgggcaggaggtccatacgttttgtaaaaaccaatcgatctggaaaactattttttgtttatttcataagacaagaataatgacaacaattattgagaatttattgttgtataaaaaattgaaaaaaaaaaaaaaaaacattgtaagaaaaaaaaaactcaaaaatcaggagagagcactagtgttgtttttatcttcatcaggcgcaggaacggtccaatactgtttcaccgcatagtaaatcttctctctttcatgaggacccttctcgtggtcagcaattctaccttcccattctaatcctttggttaattccttaaccttgatcaaaacgtccacgtcatctcttataatcacaccaccacccggtctaagaattcggtccatctccaacaatatctcctccggttcacattgaccttggtacaatgtgaaaaccgagtcagcatggataaaatcatacgttcttggatacgtcgacatggcttcacacctaacaaaaaagaaggaaaaccgagtaaatcatatcctttcacaagaaaaattccggtttagtttaagtttggtttaaacttaccagttttgatacgttccgattagaccacgctcgtagatgacaccgagcgtattgagcttagcctcgaccgggacaacgttcatgacccagaccggatcatccgctagagccgccgcgaatccaccgaggtaagcgttcatgtcgactaagtttctgtatctcccggtttcacccaactggtaatctaacttcttgtaataagaaactctctgtttccacagtttcgtgttctccaagaaagcttcaggtgtgatttcctcgagagcgcctttgtttactctcggaggaatcgcgtttaatctagccggccacttttctaccttccctccggccaccgtctttagatcctcagcgtcatcaacttcaggtaatggtgtcaaacaagaatccatcttcgtatacctgaatcattccaaaatttatagccaaattctaacatttctaaatcttagatatagaaactgattgattaccaggccatgtcgggatcttgatcatgacgacaaaactccggatttttcaaaacctctctggttttcttacagtcaatgtggttaaagggtttttgccaaatagcaagatcatctctttgaacaactttcttccaacacaagcttctcgcgacctgctcgatctgagtctgctctgcattcaaatcatccatggtccgttcccaccctttccaccgtttctgccaattaatcggcggtccagaaagtatccagtaccctcctggtcttaaaaccctatccacctccatcaagtaagccccatctgcaacacaacacaaagtgttagaactcaaaactcaaaagggagtaatctcctacttatttagggtttagagtcgaaccgttttggccccacggaataaggcaacgagagcaatgtgctaaatcaaaggctctagaagggtacggtaggcggattgtagccatgattccgatcatcgccggcacaccacgctcgagtgcgaactggacttgagcttcgtgtgtgtctcttggtgcaaatgacatcgttgtaatgtttcttgataaaagatatgcaccgaagctagccacctgaaaaaccaaagacacatttgattgatcacaccaataaaactcaaaaagacatatggttttcttgttttgacaaatgaagtcaaactaagagacaagaaaatatattcttcattttgactcaactactagtttattttttcaactttacaggtttaacggtagagtatgagtaggtcaacagtgacattagacgattaggtgactttagtgggtcacactcagaaaccaaaaatgttgaaacaatatgctttcatttttaacattgaatctacaaaattgtgatgcactaattccaaattttaattattgttcacttatatgagagtaaactaatcaaatggaatttagattagatatggatatgcatgaatatatctttttagttaatatttgacgtcccaacagattattcgattgaacaaatcggtgacggaaaatcttctatttttttctttatttaaatttgaaatataataaaataaagattacgaatatgcataataaaatcgaaccgggtggttcggtttaattagagtgaagagaattttgaacgtaccccgcaaccggtatcgatggctgtacggatagagccgtcgctgagatcaatcaaccgtccgatatcatcaatgtaagcatcagcgccacgtggaaacatcgtacctccaccagggaaccaaaaccgatcattctcgtaccggacccaattctgattctttttctcaaccgtaagctccgtgtgaggcacattagcgaaccacgccacgtcacgactcgccggccatcggaacggcgttttgtaaccgtacggcgccggaattctgcacttcaagatttcttctctctcgggacaatgcctttgcctatactccaatctctccctcgagaatttcaacgatcgcttcgcgtcttcgcatggcgtgtgctcgctcaacgcggcggcacacgacgggaaactaacggcggtttccgtcaccggaggtggatcttgaatgttgtgatgcgcgtcgaagtcgagatctttcgtagaattaggtctggtgaatccctcgcacggtgtaccgtctgaatcatcgaaggcggcgcgtggattaaccgccgtgttttgccaaataccgagaaggtagctagcgatgcagagaagagcaactagggttacgtagtaaagattggccttcttagtccgagatgagattcttgtaaataaattcatctcttaaagaaaaaaaaatcaatcaatcaatggtagaattttttagaaaccaaattgacatatatttataatagacacaacgatgaaagaatcgaatgtgtgacgagtgaagttttcaagggttgatatgaagtggttcgatggtgtaatataaagggaagagagaaaatagaagcgagtgttaggtacgcgctttaaggtcaaagggtcaatgagttttaattttatttttatgtattcgtgagagattaggcttaaaacgtgcgagctagtcataggcaacaatggggaaattattttgttcaaaatattattcttttccattttcagcgaattattagattttatcttttagaaaattaggaaaattaaggattttgtagtatattcatgcattgtattatgagaaatatatcttttattcttttaacattattttaaaaagaagtaaaattgatttgagaatccgcgtttgtgaaagtgcacgctccggtgaagcgagtgaaggttgatacataggtgatgaggggtccgtttgggtcctttggatgcaaagagacgcaatcccaattgcacttttcaccggttcgaaccaattttaatacttaaccgaagcactttttgctcacaccgtttttaactgatattctctgttgctctgtatatacgccagttatgggaatgtaatatgcacttttttggggggacactggacagaggaagtttaaaccttgcgggattgtgaagaaatcccaaagaagcaatgtatattgccattggaatcgtaaaaggcagtgagagtttggtttgcgttaattgatccaaacaacattttgtaccttacacagttacacctaacctaaacaatacccatgacattggactggaaacatttgaaacgaatggaaccgaagtgattttatcgaacttaactcaagtttacaaattaataattataacagatcttaatgataagttgttaagattatccaggtaaaattgatgatttcttatgatttaaatttagagtttaatctaaaactaatttgaacaaatgtaacaaaaaaatcaaaccaaatcttacatttcggaattaaattcccaaaatcttcgtatccatgcatgggcctatcaacaactttcaagatatttttttatagaaaaatatcgaggattttcatatttaataaaaaatagcattcagtgtaaaatgagcgttccacgatgcatggatgctcttcagactccaagttgtagctttaggcggaatgaagcccaaagtctattataataatcagatcaaaacatatatgtagttggattttgcctctagttattgcgtagcagaaacaacatctcataataatgcaatactattgagtattgaaacttgtgtatcaagaatctgaggcataaatttataataaccgtaattcctgcaaataagtattttatacgatgttttataacagcagtgaatttccttaataataagaagaacagaaactttctgaaatgactttctccttaacaccagcttcctcgattgacttcagggtgttttgatcttggggcgtgtcggaagcaactgtgtttgtggagaacaatgagaatcatgtaaatatcagaattcagaagaagaaagttacgaaattggaaagtgaggtcttgtggatgaaacaagtgttacctggtaacaagaaatgatggaggtgatgaatccaaaagctccggtgacacgaggagtgatcttcgttggagctaactgaagaagaccagctgctacaacaatgtccatagctgatttgatcaaagcaagtgacctctcgtttgatttttttagcttagcacgataatcctcatcctacatttttatacaatttgaattgagtctcttataataagattttgtagaattagaagtttcttaacaaagaagaaaactttacctgatacttgtttccattcttgagtcccttttcgatcttcttcattgatgaagaaagccttcccatctcaccaacctgataacagtgaaaaccgatacataagctggcgaaaaaggccaagatgacatgaggaatcgatcggaaaagtgaaagaagaggcggacctcgactaaagttgtgcagacagaagatcccatccagcagaagagagatatacgtccaagtaactcagctcgttctttgttctgtgttgagataacacatataagacattagccaaacacacaaaactagaatacaccagtggaacataaacttgatgatctctctctctctcaccttatatattcctgatctcccaagccagacaatttgatccaggaacaagaatgtagataaaagtgcgttcttcgactgaaaataacaacaaagattgatacagaacaaagatataaaaccgaaacgaactctgagctttgatctctaaagcacctacctttccaagtaaaacaagaggaagaggagttcctttaggcacaggactgataagaccatgcaagtcattcacaaactgcaacaatgataatatttagttaattaaacaaagaggtaaaaacacactctaatcaaaatcaaaaggattaaccttgaaaagacggaagacttttcttgctaagctagtagatttgtcaacattttgagcagtaccaggttgtccaccactcaagaacttggaaccatactgtatagctctgcataacttatctcttgcctctgctttgttcaaatacattaccacaagtgctagctctgctcttgatacatctaacgtcgtccccatcttcttctacctactaatcaaattccaaaatatctactactaatcacaaggcaggacgaaattggaaaatttctactagttttgatcaaagaaaaaaatcaagaacaccacgaaaaaatgtaaacaaatcatagaaagaaatcaaaagaatttcgattcgaaatacctttgggagagatgtgtgaacagagatagagagagagagtgatcaattaaaattcgcaatgcctctgtttttggcttgatcttcttttgattgtgtgtgtaatcggagatagggcttgtttggtcatcttcgtttcccgataaacagacaaaacacgtcgttgggtcaacgcactcatctcttcaatctttcattctaagccgttgatcatgttgactctttttatgtgtactgtgtacaccacattggatcatcctctcccactctgctttcggaagttgaggatatttcgcgcgtcccaaccacgtggcacacatatctaggacaacaagattgaaattccacgtggattttttacatttatttggggcaatagcactcttaaagcccaataatgtttcacctaaatgggctctaaccttggccttaattattaacatttaaaccgctctttatttaaccgacaaaacctttagtcgtgtagttagggttttacttactaatccgccattcactttatttgtaatcagaaactgaaaactaaccaaacataactgcagtctcttcttgtttcgatggaactcaataaggatcagacagtcatgtcggaggataaaaagcctcaagatccaaatcccagatttgcttgcgaaggttgcagcgttctgctcgacatcaacgatggtgaccgtctcgtcttcgctcgtttatctagtggcgcgtgcgtcttcttcctcaatatcttaatttatccagattgattctcatcctcaattctattgtttttaattttttttttgattcttttctctccctcttcttgcagtatattaaaaattgggaataagaattattctttaaagccattgatcggagctccgtttggatctctgttccaagtcgaaaccggagaagatggttctttcctctctcgcattcttcccattaaacaaggtttgttattattgaataccaaattcacattatcctctatactgaatacaaaagaaactgagtttttgtaaattggttatagatggattgaatttggtctaattgatgtttgcttacacagaaagtaacagtaataatgttatggacgattcgagagataatcgagaaatcgtcgacaataatgaagctcagaatcttactggtgaagaaattgaagctatgcggaggttagaagaattctttatatcgtctgtgtttattatattgaatgcgtacattggaagatttggtaacgtttttctcttttatgagtagagagggtgcaaaaggggatgaaattattgaagctctaattgcaaacagcaaaacttttgataagaagtttcagttgtctcaggtaatgtatttatattgttaatgaatctctctgcttctacttttgaaagtttgggagacatatagttgatttttcttgttacctctttgtaggaaaaatataagcttaaaaagcagaagaaatatgcaccaaagctgcttcttcgacggccttttgctcgaaggtatttatttgttcggtttttttctgtcttttttttttctgacttcttccgtttctcttatggatggatctctttatgtttaacagtatatgtgaagcttatttcaagaaatacccagccagaattgggtaagtacactttgtttgttttctttacttgtgtattctgaagatcctgaatccttttttctctgttgagattgaattatgtattgatggttctgtatatcttttttttttgtgtgttgtagattcttacgagtagatgcgttatctcttctgttaacgatggctaatgtcactgcatactcggatgtgcttgtggtggatatggttggtggccttgtcactggtgcagtggctgaaagattaggaggtatatagctttttgcaatcctacatcacattaataagaccactgcatatttatctgtgtgtcttatatgtatatattccttttaacaggcactggttatgtttgcaatacatataagggaagttctccttatcctgtggagatggtaaggatgttcaactttagtgacaaggttttaaagaggtatgttcgattggtctccctagtctttttttcttttctctctagcctctctaattgtagccgttctatatgatgtaactgtaattgacatttatgtgttccttttcttatgtgtaggatcgtgcagtcatcgataaacgagctctcgtcagccaaaactgcgtctactgaaggaaacaatcaacaagaaggagtttgcaaagctgagaacaatattaatgcaagttgccaacctatactgtttcacttgagtctttatttgagaaatatattgtgattgtaacagaaggttttaactgaaaaatgcaggaaacagctacatctgatgttatggttgaagaaatatctgtgacaactgaggctggagtagtagatattgttgtaccagagagcaaaattatcaaagccgcaaaagctggagccaaagcttcaaaagaaacaatagagatgtggcaagaaaacggtttttcgaggtaagtaagtaatataagtgttcctgtgaatgaaaatggtttggctcatcacttaaatataattgtctgatttgcagtctaatcatggctgcgcaagaccaagacccatggatcgtagctaaggatgtattgccactactgtcctactctgctccttttgcaatatatcatcagtatttacaggtatgtcgttagaagaaaactattactaactgctctctaaccaagttagaatagctctaatctgcttcatttggtctttaggctagatacagtagacctatagctaagtgaacttgttcaaagcttttcattatatttggtagtaataaacaaactctcataataattattacagccgctggcgacatgtatgcacaagcttcaacagggtaaaatggcgatcaatctgcaaataacagaaccatggctacgcgaatatcaggtctgataatattctcaatttttttattttgtgtgtgtgttataataatctcactagatcatcaagaagtgtgttgaatgatatatgtatatttaaaatgcaggtgcttccttcaagatctcaccctcacatgcagatgagttcttttggaggctatgttctgagtggcatcagaatctctaccacttgactgttgttttcataaccagaaactgtggtttgatgtttggtcttttctttcacaacgtctttctggttgttttgttgttgtaacattaagggcttagattatgagaacactgaaaataattgaaaattttgacggatatttgaagttaatactagcatttaccttctaattttcttgatggttttgtatgaccacacctgaagactgatagtctgatacgcttgaactatttttggatgattagtgcatccgatcatttgaaagcattacaaaatacattattatacatacggatacggtcaccaaacaagatatcattggctaagtttcatacagattatgaaacatatcaagtacattatatatataccacgttgcttcattttcttctacttcctactaaagaaactttttaatttccctttctcaatcctttcaagaagcttcttcgaaccaggaacctccaactccgacaacttcttcaaataaccaacagctccatgtgagaccatcagcttcttacacttcctgctcgaacacaaagccgccaaacccgaaaccgcatacttctttgccgagttacccggactcggctcaagcaacatcacaagactcgtcacacttttctcatctctcttcacttctctgcaattccttggaaccgtaaccagactcgctatagcttgagcagcaacctctctagctccactcgctttcgcctccaacattcttatcaacaacgggatacaacctgattcaccgatcattctctttgtctcatttgaggtagcaatcctgcaaatagttgacgcagccgcttgctgagctccgattgaacctgatttaagaacatggactaaacttgggattatcttgaagtaagtctctacagaaacagagccaacaagattcctaattgctgcaactcctgattcttgaggaagaggaccgtctaagtaagcgagcagagtttgtattccgttctctgatataaccgatcttcgaagagtttcgttgcttgaagtgagattctgaagacattccgctgcgtattctttagatcccaataggattccgcagttaagtatgttaatcatcactttcacgattccttcttccgctagattctgtcttacttcaggcacagcggaaatgttcttcaaagtacaagcagaagcggattgagaaacagagtcccctgttttgcaaatctcgatcaacggaccaaccccgccgtgaccaacaattgaacgcgatgtctctgatgaaatagacattctctgcaacgaaataaccgctttctccttagcaacaatacttcctgattctagtagccttatcaatgaaggcaatgcgttctcagagataagccagttttcgcatccgcctgattccgctagagagcagatcacagtcaccgcgttttcccttacgctaggcgaggtagccgtcaaaagctgcaccaaagacgcgacgttggtacggcctagagcggttataaccgccttttcgtcttctttcattacctcgacgagctgctcaagcgctttgcgtttagactccaagtgacctatctgaagccgagcaagcaattctctaacgctgaacgtttccaagtcttgagtcgaagaagataaaggtttcgtaacttctccaagaacacctgttttcattagcaatccacaatctttcaagctaagatcaatcttcgcagatagagaatctagatcactctgcatcttcaatttcccctcttgcttctcacttacgcaaacattcgcgagctcgatggtttctttcaaagtttctaagactgcttgaagttgctctttgcatagagtgtgcttagagaagcaaggatggctagacaaatccgataaacatgtcggtatcttctctaatcttgaaatgatcactctccatctgcttgagaaacctttcactgttcttgctttggacaaagcgatcggtacaagctcttgtgcctgtaataacaaatcttcaactgtttgatcaagtagagtcacgtttcccgttttctcctccaccatgatcacacacaaatacaatccttgcactccgtagcactgaattgcacaaaagaagaaaacaaaaacaaaaactttagcgatttgtagaaacaaaaaaccaaagccaaaaaggatcaaatatgccttgatgaatgatgagacacactggcaaataattgatactttagttctgtaatagaaaaaagtaatgaagggagtagttgaatgagtgatgaacaagttggtagatttgttataaataaggacacggattttaaaacaaaaaggaagaagccatcaaaagagtttcgagaatcttgaaaatcatcacagaaaagcttatcgatatttgtttgctggagaacaaaaccctaccagacaaaagttttacaagtcattttccaacttcctttaattcgtcggtgtgaacaataaatgctacaaaatagctaatgatatgataataaacaaatacaagaatcttcacaatcagcatcttctattacatgattgtgtattaatttattttaatgagaaggctcctgggaaacgaaagtcaaaagacaagaatacccttctgaggaacaagagcttcaattcaaacacagatcaaaaaccacaaagattgaagattaagctggtttaagaggaaaagcaataaagagagaagagagactttgttttaaagagaagatgtgagtctttttcaacaaatcgtatgcataaaaacttcataagagttcgaaccaaactccactaaaacacactacacacaagtttggtgacaaatccacaacttgtctttactataagaaaaggaacaaaaaatgcttttaaaaaaaacctttttccttagagcttgtgtaacatgcaagagattcaaaagagaacatgaagaaacaattgaaacccagagctctgtcacattaaacgatttaataattacctggaaacaaagatctatgcttcagcttctgggttcgctgtctggacgatagaatccctctaaagaattagttgcagaactttgaatttcgaaattgaatcaaaaaacaaaagcagaagacactctctttcacaaagagaagttagctgtgtcagagtcgtttagtcagctttagatttgttccgacagagccgtaacgcacgatttttatcgtatcgcgagaattttcgaattcctccgatcgaacggctctagttccatcgaacattcgaacggttggtatacgattggaatttgaaatggctcggtgattagctgacgtggacgtatgagcctagtcgtctcgggagcgtcacgtgtgccaatcgataaaattgaccttacgtgttcgttgaattaacggaaatgccattggttcaagcatcatcggcttttgagggccataaaggggagaaagtgtcgaggggaccgaggcgcgtgaggctttgtgggccttcttaacgtgcacgaaacggcacgcacttgtcggcttttgtgattaattaattttatcatttagatcattaatgtaagggtttattgagctaatcatcctccaattttcataatcgttttaaggtaatattaacacgatgaaataattagcacctacatttatccttcagataaatccatccagtactcccaaaacccagtttcactatgattttcacatttcacaattatttagatcaaatgataagtaaatgactattgttttcctcctcctgttcatagataaattttgttagtttcatcaaacttttaattggacccaaaatatcaatggatcaaaacgcaacgtatttgactatttgtcatgttgtaatgatgggcctaaatttgaagcccaatataaaacgagaacttcctattctacgccaatacccttatccttgtttgttttcgtctctctggaagacagttctcgatccgaaattgaaattctggaatcgcaaaatttgcacgaatcctactaattggaagatctagaatctcggggtttgatccatcaggtttgcttctgcttcggcttctacacatctcagagagattatgatgtcttggtgctttctgttagagtttccgcttcttcttgatattcgtcgtcatcgtggaagctcgggtttcacataaaaaattctgctgtgtacattgttggagctagagatctcttctttggttttcttttgttgttatttaggattttatatgcattgactatgaacgcgcggttatgaaatcatcgaaacttttggatttgacttttgatggtttttcactactgcgagtggaaactccgaagatcgtctatggattgtcatgaatattcaagaaaatacataaccattcataaaagaggaacgagcttcgctgattaaaacaaaggataatcgacaaagaagggttactactagctcaaatatcaacaaaaattcataataaacgaaaagaaaatttgtgggtgagtgaatggaatggagtcatatcttcttcttcagtctcactttttcctgaaagagcatccttcagtgagctttgccttccctcctgtgggtgtgcagagcaaagtctggcagtttccacacatcacaacggtctgagagtggctgaacacagtcgtactgcaccaaatccaaacccatcatttcttagttatttcatatagatttataaccaaaaacatttacagattcagactttaaaaaaaaagcttacatgttaaagcagccttgacacttgacatcctacatcaaccacataacatacaaaagatgtaatcagaaaccaaatctaattgacaagaagattcaaagtgaataggcagctaaaaggtttgaactttcaagaaatgaaggaattaacaaagaatagttcttaccatgaaaaacgaattgggtgattgaacaagacgcttgagcttgtgcttcctcttctcgagctcagcaggagggttaagcagatcaatatcgttttgaaggacctgaaatttacacagatttttttaccagaatcagtcaattatctcacttgtggacttgtggtgaaggaatcaaatcaagaaatcctaattcaaaactcttaaaacctaatgattgccctaagaaaagacaaagcttgaaacctaatttgatatgttctttgtttttcgccacataaactatcagattcgacgatggaaaagaaattaaggcagtctctaatgttctaaacaagagaatcgaaacgagattaaagattgagaaatgagtactgaccattttcgttagcttcttagagattctgcaacgacaagacttggagatcgtatggaatcaaccgacaaatgatcttgggagatgtaaaaccctaattcgcacaacaatgccgacttataggttctggtccgaaagcccactgtcaatatttcttcttttcaactttgtcaacattaacgttttgggctgaaaaaaatattagatccggtccatcatagatttactctattgggctaaataatggaccaattttcttctcccacctaaaattttagtatttcacaatcccacattattaattttgaaaaacctttgtctaatttaaagcaagaaattaaaactaaaggaaaaaaatcaacacataaaaaatgtacaataaataatgatttttttttcgaaaaataattaatggtctgacttcgagtattggtgatgaaaaaactagtatattaatagtaagaaattttaaaaaaatattgtaaaacttgtgaccatttttgctcttatcctcttcacaatttattttccttttccctcttgtttattaaaatggtcacaagtttttgccgcaatttttttaaaaattaattttgctccatttaaaacaaatgataaaaatgcgacttatcctacttttgaaaccgaaacgtcgtcgtttctttctttcgctttcgtcgttttaacacttaacactcaaacgaacacggagcttctatcacttttgcctcgccggtatctaaatgtcgaacaccgtcgaagatgacgacgacgacttccagatccctccttcctcacagctttcgattcgaaaacctcttcacccaaccaacgctaacaacatctctcaccgccctcctaacaaaaagcccagactctgccgttacccgggtaaagaaaatgtgactccgcctccttctccggatccggatctcttctgctcctcttctactcctcactgtatcttagattgtatcccatctagtgttgattgctctctaggagatttcaatggtccaatttcttctcttggtgaagaagataaagaggataaggacgactgtataaaggtgaatcgtgaaggttatttgtgtaattcgatggaggctaggttattgaaatcgagaatttgtctcgggtttgatagtggaatccatgaggatgatgaaggttttgttgagtctaactctgagcttgatgtgttgataaacctttgctctgagtctgagggtaggagtggagagtttagtttaggcaaggatgattcaattcaatgcccattgtgttccatggatatttcatctttgagtgaagagcagaggcaagttcatagcaatacttgtcttgataagtcatataatcagccttctgagcaagtaagcttctttgttatctcataactggaattgatatcaaccttcaatttaggttaatacaatgaagtatactgtgttcaattgttacatcgttacgccattgattgactgctgatttgtaaatatgattattgtaggactccttgaggaaatgcgaaaatttgtcttctcttataaaagaatcgattgatgatccagttcagcttcctcagctagttaccgacttgtctccagtgctgaaatggcttaggagtctaggtttagctaaatatgaagatgtttttattcgtgaagagatcgactgggatacccttcagtcactcactgaggaggtaatggaactaaagtttacttatttatttatttacacagagaaacagaattgagtattgacaaggttatacttccacaggatcttctaagcataggtatcacgtcacttggtcccagaaagaagattgtgaatgcacttagcggagttagagatccctttgcatcttctgctgaagtgcaggcacagtctcattgtacaagtggccatgttacagagagacagagagataagtcaaccactcgtaaggcaagtgagcccaaaaaaccaactgcaaacaagttgattacagagtttttccctggtcaggctaccgagggcactaagatccggacagcccctaaacctgtcgcagaaaagagtccatcagattctagctctagacgtgctgtgagaagaaatggcaacaacggaaaatctaaagttattccacattggaattgcattccggggacaccttttcgagtggtaatgttacataacaagctaggtcatggtttaacttctccgcatgaatgcaacaaccttattacatatgcatccttctcattcaagtcaaatatgctcatgaaattagatttaaaacgtcatgctgatgctgaatatttatcttttaagtaatctttatgtttggtgacttttctggtttaatatatgtatgcaggacgcattcaagtacctcacacgcgattgttgccactggtttcttacacactttcatctcgatcgtaagtagtcagctgtatgtctaattataaattactacacagaagaagcctgcatatcgtggaatcaatgcttaaagtctctgtattctcattcacagattatcaaggtttgacaaagtcatttagtcatgggaagatatactgttccttagttaccgcaaagttggtaaatatgaagattgggataccttgggagagactgcaagtcctggaccttggccagaaggttaatatttcaggcattgatgtgacatgctttgatgcaaaccactgtccgggatccatcatgatactctttgaaccagccaacggtaaggtgcgttcttaaattagaaactttcagtgtgtagtcgtaagcctatgtttaactttccattcacaaaggaattgtccatggactctgttgatttgtataggctgttctacatacgggggatttccgctatagtgaagagatgtcaaattggttgattggatcgcatatcagctctcttattcttgatactacatactgtaacccccaggttcgtcatccatcaatactttgtagcataaagaaagctcaagtttttcagttaataactctattcggttttaattcgtatttgaaatccatttttgccacaagttttcctgcatgatttccactcttttgcgatttcttcatcttacatttaagttgaacgaagaagagaactttagagtttacgttttcttttcaaagcaagagtggtttgatacaaatgcatcatttgtttgcagtatgactttccaaagcaagaggcggtaatacagtttgttgttgaggctattcaagcagaagcatttaatcccaagacccttttcttaattggaagctacaccatcggtaatatgttcactcttctttttccgtttcgatatatcatgttgagatctaaattcttccatctcttctcttttgaaaggaaaggagaggctgttcttggaagttgcacgtgtgctacgggaaaagatatacatcaatcctgcgaaactaaaactcctcgagtgtttgggattctcaaaggatgatatacagtggtttacagtgaaggaagaggaaagccacattcacgttgtgcctttgtggacgcttgccagtttcaaacggctgaagcatgtagctaaccgatacacagtaagaaacacatccattcggtttgactgtcaaagaaaaacaaaagaagtgataatcttattggctgatttcgttagaggttgagttctaatactgttttctgtcctgcagaaccgttacagccttatcgttgcattttctcctactggttggacatctggtaagactaaaaagaagtccccaggaagaaggttgcaacagggtacaataataaggtaaactttttgcctatcttcatgtcctgtggcattgggctcaaaatcatgaggcggagaatctttatatatatttcaggtacgaggttccttacagtgagcatagcagcttcacggagctaaaagagtttgtgcaaaaagtgtcacctgaagtcatcataccgagtgtaaacaatgatggacctgactctgcagctgcaatggtgtctttgttggttacgtagaactgtgtttacatctgcgataagctttgcaacaaaaaggcagcctccttgactaccaattgagcagagacgtcaaagatctacaacgaaaatggatatgttatgttctatctaattgtagttatgtaaccacatgattatgtagtgtttttcatcacaaactccgaatgcatttgttatatcaactactttggtctttacttatttccactgaagaaatgcaagttgcagactaaatccgtaataagagaccaagctcatggaattgttgagtttgctgcaattcaatgaggaatatagaaaacagatatgcagattcgcataaagtatctgttagaaaggacacttaaaattgataaatactctaatatcaatcttccagtaaacaaatacataaagtttgggtagtcgtagagattacaaacaacaagtatcaaaatttgttacaaaatcctagacaatcagatctttttatccaccatgcaaagtggaaatgaaaactacaacatctttatcttcgattactgtatcgagctgaccacttagctcccaatcacagtcattcaccagcacaagaaccccaggtctcctgcacaacagttattaaccttcattgagcttaataaagaagtcttaatgaaatcttaacctacaatgagctgataaagaagaaaaatagtcttacacagtatctcctttcatgaacatctcaggtctctctttgatcagatttgtacgaacccatgaaagcaaatgcttcatggtaaactaatccaggaatcagaaaagtggaatgagtgagagaaaaattgcgagctttatgatccaaaaacataagaactcaagcttacatcatcagagtcagctccattgggcaaatcaacgtttactttatgaatcttttcagaatcacagagcagctctaacccacccctacacatcacatgtcaagtttcactcttctcaatcattgaacaacaactaaaacacacacatggttcaagttcttaaatttcagtattacatacaatcaatcaggaaaataatctcaaaagacaccaagtcaaaatcagaactttagtgaggtaaaaactaaaaacgctacgaataacaaaactccgattacgaaaagattaagtgataatcgtacccgaattcaagagttaattgcatcgtcgttgatgtttgcaggaggaaccaaattcaaaacccagctcttctagggttcgttcgtgtggtgttgttgttcactgtaaaacgacatcgttcaggttgaagacatgttgggctatttaattgggcctaaaaatatactacaagataaggcctattacttttcccgatgaatcatcatcttatgttaaaaaattacttatcgcatcgtaaccgttgattacaggaactgtaacgtatcaacggacgatattgattcctagtttgtcactgaaaatagaaaatagatggtgcctgatatttttccagcgaccggcaaaattgcaaccaggaagagaaagaaaatcagagattgatttaacgtgaatggaattttgttgtttcccaatttcttctgagaaatagcaaagttcagttttgtttctctctatctgaagctcaatggaagcttataagcaatgggtttggagaaatagagagtatgtacaatcctttggatcctttgccaacgtaagattcatttttattactcttctccttaatttattttccagtttgattatgttctgattctctgtcgatttgggtttgttttcgtctcgtcgttagtgtcaatttctaagtttttcatcgtctgcttgtttgaatattttttgcttgaagggttgtgttttaaaatcgaagcttttatttattgggtttaagaatgaaaaccctttgaaaaaatttaagagttgaatcagttcgatcttttaattcgtagttgtggaattc

SEQ ID NO: 381 - DNA, 110149 bp, Arabidopsis thaliana
aagctttggagcatcaatgaggcacttctctttcctttacctcctgatattgcaagaattttcatgtccccgttgtttttattactccagattatagctccataaggcatgattctctgtttatacttgtgaatttccaaatctagtgaaacttatattcttctctgtttggtatgcagaaacgttcattaggcacaatctggagtccagcaaatgtgtgttgcgtgcaattctcttcttattccaatcacttattggcatttgggtcagctgattacaaggtctattgctatgaccttcggtatgtcaaaacaccttggtgcacattggctggtcatgagaaagcggtgagttatgttaaatttatggattcagaaaccattgtttctgcttccactgataactctctcaagctttggaatcttaacaagacaaattcctctggtttatctcctggtgcttgttcattgacatataaaggacatacaaatcagaaggttagtcccaaaaacttttctatctacctttaacatctcatccaacatcattagttagttctgatgtctaatcctttacctgtgcagaatttcgttggattgtcggttttggacggatacatagcttgtggttcagagaccaatgaggtatatatcacatcataaaacaaaatctcaacctttagaatacttaatttcagattatcaaaggtggtatatgtcaatcgcgtttagtttgtttatgaagctgcctaaaattagttgttataacttactaaaaaaactttactttgattttgcgtcttaggtatatagttactataaatctttaccgatgccaatgacttcatacaagtttggatccgtcgatcccatttctggaaacgaatactttgatgacaatggacagtttgtgtcgagcgtctgttggaggaaaaaatcgaatatgcttgtagctgcaaactctactggaaacatgaagctactaaaacttgtttgacaacttggccttttcgctactactgcgggcattggactttttgagtctgaaactaggacaaagcaggtctgactttgaagcaaacgtttttgtcctggaaactatgatcccatatgaccagaagagaaaaaaagttcgaaatcttggagaagttgaagaagcaaaactgtctgtgataatatattatttgattcttcttcctgtaattctatatatatgagatataatttgagataaacttctcagattcttcagaaatgattcatatttggtcggcataacgtgtaatgatgagaggtatataacttgtacaagtgtgttatatcgttagctcggttatgtaattgttgttggagattctctataagagagaaaatatatatatcatccattcatttcatcgcatggctactacctctcgtctgcgtatttcacaatttatggttttagattcagtgttgttttagaagaaattcataacaattgcacatacgatgttattagtgtgaccaccaacttcaagtctctaggaaaacaagtagaatatgtcgttgatgaagggcacatgggttaaatgtggttatttttttcctattatctattactataaatctcgaaatcatgaattagacatgttctttgtatctatgtccaacatgtaatgggtacattgtatgtttaagagtaaaactaggataggaagatgtaattgattgcttggtggcgtgggtttaggcctttgagccaacatttctctttagatttgaaccctctgctttcgcgagagactctctttgtcttgcgttttaaaaatcaaaacattatccttccttcgaagcaaaatctttaagattttggtgctatgccatctcttgcaagtcatctttcacatctgccaggtaagtgtcttttgagtattccaattctaacaagtccggacaaacaaaaaacaaaaaattggttcttcaatggaaaatgaatctaaatattaaatcatcagtgactatcaaattttggcccattctgttcatgccacaaaataatactagcagttctatcatctttgttatgccatgcaataagaacattttctgatatctctatactaatattgtaaaatgctaaagatgatttgattattctgatgaaatattggtaactttgaccagtagttgacgaaacattggtaatcgaattggaaccaaaagaggcaagttgggttcacagggcacatggttgcttcaaacaatcccattactccatccttttcattgtccctctattttaggctctttgtgctcatctctattttctttctttgatcaaaattattataccacaagacttttttttgtgcttaaattttagtcgtcatatacgacaattttttatatacgaagtttattattattaacatcaattgattattcatatatttttaatcaagtggcctttttaataactctctattcttttgacgtaagaacaaatagtaacttttatttgtagaatattcattctaagaaattaatacgtaaatacatatatttctcacccgtgaaacaccaccagtcgagtaacgtgattgaagatatgtttaaaaaaaaaaaaaacatgattgaagatatgagagagcaagagtcagtgaactattttggccgcacacatgtgacacatatatatatgtgtattattccttttggatttactacattcattctgatttctgaaccattagtaacccttgaaaagtaaaagctgataacgttttaggatttgcaaatttgaaaaaagatgaccctacattatttccaactgcaacatgcacgttcctgttatgttaaaagatattattatagtatatatattttgaaacataaaatgattgatgtaactgatccaacggctaattcctcttactagttagtgaattagccacctaataaagattacatgaatcattaaataacaaatataataactatacaacaaataattcatattgtcgtacattcaacaaccgaggtactccaaattaaaaaagaagtcaagcacactcatatatattttaatttttaactgataaccttgaaagaaaaagaaaaaggatatggaatagaatggtaaaatcaatcaatctgccatggttatgaatcaaaaaccatagaaaaatcgttatttactgtttagtattataaatagtgtcaagttaaaaagtttttaatattgtaaaatacactctacctaaacaaaacagcatatgtaagataacatcatcacgataaattgttttattctgacaccacatgtgagatagataggaaaatctttagtatttaaaaaatcaaaatgttggcagattaaccgataatcacgcagattaacacctactgagatagccgttaaataaattaatcgacatagcagaaacaaataattgagtatcaataaaaaaaaggaataatagagagagagagagactgactaatgagtcacatatgacgaatgagtccagtttggctgccagtctgtcagcccctaccattacaccacctctaaagatttgtattttatcataatccaaccaaacaatgcttacaaaaaaaagataatcacatcacatcacatggccttcttcgtcgctgtaacgtttaattaaactagccgccaatttcttttaaagatttttttgttttgtttttgggcttatgtttaaaccatataatccataacttcatttctattgctatttttgaatttaccctataaagctaccaatattgaatttttgtaattcatttaagtttattacataaataatttatttacttatatgattataattttttttatcggctatatgattgtaatttagatcagtacctaatcaagtttctatctttttctatccgttgacagaaaaaagaaaacaattttctatcaacaattcacaaatcaaattggattagagatacaacaactttagtcaaaattctaacacaacaattcatacttttgatcattcaaacatgattttattttttatttatctagaaacatagtaatgtcaattttgacaattattcattcaaaaaaaaatgtcaattttgacaagaaaactaggaaaaaaaagaacaatagaggaatggtcaaaaaagaataaaagaaaattcgaggaaaatcatgcttcttagaagttttttgtttaattagcttgactagtaaatagatttgaccggataaataaccggttgaaaccggtaacctttaaccggtcttcatactataagaacaccttaaacaagtcgtctccttccacttcttgctttattcctctcataccgttttctctctctcctccgtcgtctctgcagaatcactctctcgccggagtttttcacctgcagagctctcgattttttctctcgagcatcatcattttcgtcggatcaatcaccaagagatggcgtcgagaaactccgtcaccggattcgcgttgttcagttttgtattcgccgtcatcttatctctcgccggcgctcaatccctggctccagctcctgctcccaccagcgatggtaagcctctctacttctctctctctcttcttccacgatattcgcatttccagatctgaatcgagactctctccgcgtgaaatctggaaacagtcgaattggattacgaattcgtttctctctgacatttgaaaatggtgtgttttggaaatggcaggaacatcgatagatcaagggatagcgtatttgctaatggtggtggcgttagtgctgacttacctaattcatcctcttgatgcttcttcttcctactccttcttctaatctctctctctctttcttctgtttttttttatttctttgcaacttcttattagtttcttcaatttgccttttttcttcttcttgtggataaaattttcaagagttaatttcatcatcatgttctcgattatgatttctggagattgattgattgatgataatctctactgtttgttcttttttgtttattctcttccatattaaatttattcttcttcccttataatatttgtgtaaatgtcatcatttagcttaaattaccagatatttgacaattaccaactttattggcctcacaaaagaaatctctgaccagttcagaagcaggatatgaaagccagaaaatttgctcaactcttttgaattcgattctcaaagtcttatcttcagattacaatttctcatgaaaaagtttataaatcacggaattgtatatatgccatttcacatgtcatttataaatcacacccttgatcagcatgcatggagttaatttcttgccataagaatctcgtgttaatttacttgttcttacaaaaaatattaaaacgaaaaacaaatgcaacaacttgcataaataatattccttcttgacaaaaaaaaatcaagttttgccgtaagcacctaatacggtaacctttattggattagacgcgcaagtgtgttctttttagcttcgcatcaaaacaaaatctgtctagtataagtgttactgttggtggaagttgtgcagtccgtacttgaccacttcgtaaaacgataccacaatggctacagatggtcctgctcgtcccactctagcccctgctccactaaacatccctctcatccctccgtccctataccaaaaacccgaccgggatggttaagtttggaaacacgaaaattgtctaatggatctctaactcatacctccaaatctctgccaaggtttgtcttgtggtcattgtcatggctctatctgtgttcttctgcataatccaaacaaatttaactgttacttggtttaagatccaaaacttacttaatgcaagctggcgatgaattctagtttgtagagcaacacagtggaattatgaaagatgaagtgaaaaaggtatgtttacctctatttgacgcctagtctttgcaacatctagagggcaagtagctgctgcagcaactgcacccgcaacaaaaccagcagcgaagtttgcacctattatactgcctgcccttggttcttcacccatggccgactgaatgcttctccgggtctaaagtcacaatgaaacaatcgtgaggacatggatggaagacacaatgggtgaatatggatgtgtttttcagagacagattactactcacaggctcaagtatcgaccagcagattgcagagaatggaacatccctagcaagttgagcaccaagaccagtccataacatcctatatccattatttgagcccttcactggattgacgacgtcaactaatgtcttccaaacgccaggcagtttcacatttctttgcgttcccttaaatgcctgttagtaaaacacaagaatcgatatccattggttctgtgtccatatctccacaccattacaatgaatgagggcgaaaatccttaaagagttacctgcatccgtgtccttgctaactcaacagggtaacaagagatacaagccaaggagcgtgctattgtcccagcaactagagggacataaaccgtcaaagatggagacttctcagtcgtgaactcctccattatgttgcgaaaataatcataacaaggcatgtagatcccaacctagcgacatagtcaaagaagtattaataagtcaggaagacccaatgaacaaataagttgcagaagcaaacagcattacttaagagagagaactcacagtcggaatggctaaagttaaacttgcgtttgtacctctccaaagcctagaaaacccttcctgcataaagttgttcctgtgaaactctacaaatgagtaaataaagaactttaaataaaaaaattacaacaattccaatagaggtatccaactagatgatgctacaacttccaagccatattgcagcacagagacactaaaccagtaagatgaatgttctcaaaaaacaaaagggattcacacatatctctatatatagacactgcagctcttaataccatcttaatttcaatatccaacaataatcaaacagagcaattgttctaacctggcggataattttgtagaaaacatcaagagttcccttgtactgattatctgagcatacagatgcagagccagtaattctacacatccctggagcagaattacttctcaaatcatgtaccaactgcaaatgcaataaccagaagataaaaatcaatgctttagcaatccagaatccatttcaaaactaagaatcagttagcaaatataccgtggaattcgtgtcgaaacaaccaagacgacacgagccttgatacggaactcctgcagcctgtgcttgtaatctcgtctgcttattacaataaaaagaagctcaaaatcagattttcgcagacaagtttccaaagccaaaaagtgtggaaatatgtttactttcgaaccttaacaacatcgagaggattgactatgaccgccgatataaaagcggcgcctccggcagacaaagccctttctccaaatttcaaattctcattcggaatcgatttcgatttaggatccaattgtgcttcttccaccatcaggaaaaaacaaaactcgatcacaataactttcaatttcaataatccttcagccaatcagattctccaattttcacgtcgcacgatggcgtatggttggtgttcgtcttagggctttccaattttgcatggaggagaatccaaaaaagaaaggaagaaaaatcttcggaaggtgattcgttgccgttcataaatcatcaaccaaagacaaaacacatactaacactctttgccgtttcaaaacttttgaccacactccctgccgtttttgactaagccttgttttcacattatgggcctcatatgggcctgtaacaccttttgctagaatgagtttgatcaataaaagcgtcgctgtttttacttgactgatgtaatctctgccgtttttaaggcttgaagaccaaatttaatattttgtgaccaaagattacgatttttataattggaaaagaatcagttcatcaacgtgtgaggagggtcttatatgtttgtgaagacaagaatgagaaccaccaagctggcgagatcagtagtaataagtgttatctttatattgacccagtttcaccattagcatttcaccaaccagggtactaccacctaacactattattgttaatgttattagggaaaacacataatgggatttggcatactaaagaccagccattcatcattgatgacaacaacaagaatagctaatatatattgataaaatttcccatttttcatgctgggtatgtttgaatttatatgagtcattatattgacaaacaataactatttgtaacaattatgtttgaatttttttaaaagcattcttccacatagagacataatgttatatgtgaacaagttgggggaaacaaaacttttgcttttattctttgttctttgccttgttgcctaaattgacaacactgccaaagcatggatgacaaacctttatttaccaaaattgatgtagttcgttaccattacttaaccagctttgtatttgcaagataaccggagttaaaccgggtcatatcgaattgatacacaaagtgtaaaagcgttttaagaagggttcacttaaagatcttatgggacccataacaatctcattggtacagaggcaacttgtctcacctctcaatttgatttgggccaacctctgtctgataaagacatttccttttgcaacgtggtttgctacatgggcttagacccacttttttttgtttccagtcatctactgagatattacaaattaaaagtcttttaaattttactgccaaaaactattggttgatatgttttacaatttctaaaaattttgttcgacttcatttaaaaactttgtttacagagcatttcctaccacacgcattagatgactgcattaaaaggtcgattcttctttttaattttaatgcatttgcatgtcttaatcaagtagatcttagaatatcaatatcttgtttttgctttgttaaatcttcattgtgattctatgcggctagtggtccatttttgtcacactcatgagcatgggattaatatgttttttgaaaacaaacaaactttaattttttcaaaatattttcatttttatggtttgttcggataaatgatctaacatgcaggaggataacagaattgcctctctctttttggtgcaaccatcatcttaggaaaaatgcattatactaaaaatcacaaccttttttttattgggtgtgttttgaccattcaaccacgaaaatcaaaggtttcagtttgtattgttgttaaaatttctgatagaggaatggggagcgctctgcttctgaacgagaaagagggtttcagggcagagtagtcacacacttcgggaagccaaaaacggtctggtccaattttaaaaacacgaaagagacaaatctactcaattggtcaaattaaacctcgaacggaccaatactgttgttattgctgtttttggtgaatggtcctttttttttatttctaaaacatcacagacttcagacttctttctcttctactacaatttattctcttacgtatttatttattttgatggtcatttttacttcattcacttcacaattgcataaagaaagtaaagattttgaagaaaacaaacgtagttagtagaagagtaagaaaagtctacaatcaaatttaaaacatttccaaaagtagacagagagtgacagattgaaacccatgtgaataaataaatgacaattccataagacgtttttgtgtaatagtattaggtaacgtcataatcgaaagattgacagattagaaagtaaataattaaaaatgtttataatgggggggactaaggtcaacgacaagatcatgagaagtcttcttcttcattggaaaactctttcctttaaatctccaatttgccaaagcagagcctgtggtggtctttgacagaaagacatctaagttcatgtcccaatacattgtctttctcttctcctcactctttcattgttttttttttgttcttctcatgttgtctcccattgaatatatatcaactcaatacataattcacatccacaaccatgtacactacagtatttctccttaaaaaaagatgtaaacctaactttgtatagtttcgttttgctgtttgtattgaatcaaatgaactgttttgcgtagacatggaccaaattttgaacacaagaaggaaaaaaaaaagaggtgtagtaattgaatgtctttgaaattgagaaggttgttaaagtggagacaatgtgtagggtaatagatgattcaatgagttggttcttcacattaatgggcattgttgctctgacacttagtgccaaaagagaagaagaagaaaaacacaacaagatactctttagatgtaaataattcgtcttttgactatatgtatattttaaaattagatagttgatttggtcttaatccatatagttaggatcttacgatattttccctgcttttttggcttattaaaacgatttacatgtttagggggagaagaatgtgattagatgtttttatgtacaataaaaatgacaagtcacataaaccccacttgatagagagattcatgcgaaggaaacaaaagacaaagatttgcactaaataaatacttttatcaatattaataataaaatatatatacggtctttatactgcttccttgcatagtgacagacttggagagaaaccaaacaaaaacctcccaaaatccccaatattcaaaacccctccctaattaacttaaactctcacaatcttaacactaattactatatttactcgcaaattaaattataaaattctcaaacagataaataaaaactccgttgcgcttcttccgctgatcggagccgtccacgaaatggaaaacggacggctaagattcatccccgtcgttgtcatcaaaccactcatctcactcacacaaccaaaaagagaaacccagaaaaattctggggaagaactcatcaaattacttatccaacaaatgatcttggaaaaactcatcaacatcccatgagctgaaatctccgatcactcccaacggaaaactatcagacagattcgtatccttatcacacactgtgttgttgttgttgatgtttggtaacaaggactggtggaattcgtcgagaaacaaagggtcaggggtaatttcggaatcccaaaaataatctccggagcgaaacaaatcaggcaagaaaaacggattttgttcttccgttggctctgttctgtactctgtttcgtcgttgtgactaaaccggagaacagaagtcggagaacacagactgatttgcgattccctcgccgaatcacaaccagagacagtttcaaggtcaatcaccggagtttccggtaacacctcagtcgtcggactaggaggaggagtgagaaaattcgtctgagcgttatgacctttgattcgaatcgcggctctatcgtaacctatagcagcttcctccgccgtcgcaaaagtcccaagccagagtctagtacgactcgaaggatcacgaatctccgccgcaaattttccccaaggtcgttgtctcactcctctatacttcaccacagactttaccaaatctccaccgttctccgccgcagccgccggggactttttcttcgctttcctcgccggtttaggttcgtcatcttcgtcacagaacctgatctcatccacataacgtttcaccctcggagcaacagatttgttgtcgttttcctcatcgctggaagaatcagtagcgcatgggtcagtgactatgattttgacaatcttcgggaaaccgtcgaacggtgtggatgtgattttccggtgaaccgtgtacttggattttctcactcggcttttcatttctcttttagttaaccggagaagaagatagagatatagagagagagcctgaaaaaaagtagaagagagaaagaagagtcaaaaaggctatctatgaaggaagaagaaaacgccgtttcttagtaacaatccctttgttaaatatagtcacgcccccccctcatttattcctttttcccatttttcaaaaatattattatttccttttgtgtttttggctttttcttactttccttcttgattttcgaaattatcgttatggaatttccgagatttagccgtatcataattatgttttctgttaatgaaaatttaagtaaggcaattaagagagagattagtgggcgcttcaaacgactagccgcttctccgatttttgacacgtggattatttcggtattcaagagcttcggttttggttcactctatagcttggtttacaagtaactttgactattgttgtaccatgacacgcgcctatatgtgttcgtgaaggtcatgcgcgctaatgagaagaaatgggcgggccttctctcacgtgagactggtcacagtactgtcactcactccttttgacccactatgataattatgaattttatggtaatgatgtaatcggaatgtttttaaagtttttgtgaaagatcattgattgttattatttatctcctcttgatttgaattaagaatgtttttattttgggaaattatgatctgtttgcttggagatcaagtgattgcagacattatatattttgtttccttatactaatattaatcagctttgaaactggacactaaaaaggaaaaaaaaaacaaattttggataatttttctcaatatcttttgttttggcactttatcatgagaaataaaaaatatttaccacaaatttatagtggtattggatcatctgatataataaaagtcataaactagaaagacaaaaaaataatatagactcaatttctctttatttgttactgaatttctgaccaggtcaggttattgtgtatatttttatggggatctaggtggattcattttctttggtaagttgttgtaaaagaatctggggtcataatatataccaagtctttcgaagcagtttcggaagataatcaattcaaataattaagagattcgtagcgggaaataaataaggaatactataatcaaaaattaatttatatagtatgtggcgtgcattaacatgcattaatctattaatagaaagaaacaaaagatatgaaacaaaagagaaattggacttatcttattagggccacatgaacaaccttgaagacaaagcgataacaaaagaaattgccacgatatgcgttggacgttgaggcatgagatttatttgttgtaacctaattattatttgctttttggttatactacgaggtatgagttggtgtaggtaggaaacgagatggtctttgtattatcgtctacatgtttttctctctgttttattattgcatttagttgaagggaataaacatcgtgaacaatttacttcacatttgaagcagttcatgcatcatataaataaacaagataaaaacagtgatcgactctcttctccgacatttgatctagacatccatttttatcctaatcgtttctgtatagcgagaattttgcagaaacctgcagtcgtacgatagataataccaaaaatagtacattctcaactagactgtacatctaaaatattatctatcatttttacaaatcacattgaatgacagatacagctatctctctgtagtgatacacatgaggaaaaacagattaactgatataatggaattttgttatttttggacttcttatcctaattctgaaaaacaagccatttttttcgaattccacatttccacttgacattttaccaatttaggcccccaaaaatggcacaccatttcgatatctatatttttgtttacgaaacatttcagcccatatactttacgggcccattagtgtctaaagattcatacgccacctgaacaatattttcccaccaccattacacaaacatgtcgaaaatattcttaacataaaaatcaccacattacattatgtttactgcccaaataataacccacataaaatattacacacaaaataatctatctcacacaaaataataataaaacaaacactcgctaaatatgcccccctcagtgaatttgatcaaataccccaaaaataaaattaataacatgtgtggagtataaaacacgaaaaaataaaattacaaaagaaagaagataacatatctacagtaaagttacaagtatacagatgttagatcatcgtgtttttccaaatcctcgaatccttccgtcttgttactgtatagttaccctgcaacgtaataattaataatctcatataaaagtttagaaattttggatgtaattaacatcaaaaaccaaaatcctaattactgataattttgtaccatttgagtgtattgagaatgcatttaggtgaatcagtatcaagcttgttcaagctaacgccaccgcatctcaaattaacggcgagcattccgatcttaataccgccgacacctaatccaactttagtcttggcaacaacgttaatgaccaaatctttgctctgaaatttcgcagcgagtctcttagccaatcctctctccacgagctgattcttcaccgtcgtctccactttcacgctcgtcgagtttttgggaccttgtcggaatccattcatcgtcgtctctcccatcccggtctcatcgtttcccgaaccaacgctcaaatcaacggcagtgtttccgtagtaaaaaacgagtttcgagttcggattcttcatctcaacgcgggcaacggcggtggcggagagagacgcgccgtcgggatcgtcggcgagtttgaagccgtcgagacggaaggaagcgaggctgaaagtgggaagcttaggatcgaaccagaggtagaaaacagctgttccgaccaagaggaggaagatgaagagaacaagagtaatgcagatgcaacagcaacagaaacgacaacagcttctacgttttttctttggtcggtaagaagtaggcatagggacggcttttctcataggttgttgttgaatgggaggtggaggaggaggaggagaggacatgtttggatctctgtaacctggtggcttttgaagaaccgggttcatctgataatctgccatcttttttctcttaattattcacctctctgacgatctcctgataaatcgtatcaaggaagatcaaaacgaaatcttcaaaatggagagagagatgctatgatgatgatgattgcaggcaaacttggtttctaagagattttgagtttttggaagagagagagagagaagagaatgtttttttgtgttgcgttgtctcttctctctcgttaatggaagaaggctgagacgtgaggaagggatttcgttttaggcccgagactcacgcgcgccgtttttgttgctgacgtgttccctcttttttctcttcttcctacattcattgaaatattcaaatttcagttattagattagtcgattaatttataactgataatcatattgagtttgatacatccaaagtggcatgggcctacagattagatgtttaggccaggtggactctgtttcgagcccattactgccacgtggctctattcggagttatttaccaatggtacgctcaccggtttaacgattcaccacttaaagccctcaaaatctcagagaacgctcgctgatcaaatccgtcgtccttcaaccgtcgcctcctccgtcatgacaattgagtgcgttaatcccgaaggtcttcgattcaaccaagtatgtgcacatatctcttcctccgtttggtcatgtacttgtttccgattaatgtattatcttttgttctttctattgaattgatttcgtatctgtttgcaagatgaaaagctcctctcatcaaaccctagaaacgaggatgaggccgattttgatgaagggacatgaacgtccattgacgttcctgaggtacaacagaaatggtgatctgcttttctcctgcgccaaagaccacactcccacagtctggtttgccgataacggcgagcgtcttggcacttaccgtggccacagtggtgctgtttggtgctgtgatatctccagtaagtggtctcagcctctcaaattcaaatagtatatagtggatggaatggattcagtttaggatttaagtcgttgtctttgttgttttagtctttcatagcttaacgattagtgttttgtttgtgatttcttaggagactcgtctagattgatcactggtagtgctgatcagactgcaaagctgtgggatgtgaaatctggcaaagaattgttcactttcaagtttggtgcccctgcaaggtctgtggatttctctgttggtgatcatcttgcagtgattaccactgatcacttcgtgggaacttcctctgctattcatgtcaaacgcattgcagaagatcccgaagaccgtaagttgtcaattctaagttaaaatctacttatgttttttagcctatgtcttttttgtatgggtaaaaggaattgatttaatgtaattgatgtagaggttggtgattctgtgcttgtccttcaaagtcctgatggaaagaagaagatcaatagagctgtttggggtcccctgaaccaaaccattgttagtggtggtgaagatgctgctatcagaatctgggatgcagaggtatttcaactttcttaaggcctttcttttgtctatcaatatctctctttttttttttattagcttaaaccttatgtggtgctactgccattgttactagactggaaaattgcttaagcaatcagatgaggaagtgggtcacaaggaggccattacatccctctgcaaagcagctgatgactctcacttccttacaggttcacatgacaaaactgcaaaggcatgtgcttctttcttttacttgtttcaaaaatatgctctatacatattacatatagagataaatcatctaatagagtgttctttttgttgattctttcagctttgggacatgagaacgctgactcttattaagacttacaccactgtggtgcctgtaaatgctgtcgccatgtctccacttctcaaccatgtatgcactaatgcttcttgaaattcaaattcggttcccaaaagcaacaagtcttgatgttatctttgtgaatgtttctgctctcgctcttttaggttgtgcttggaggtggtcaagatgcatcagctgtgactaccactgatcatcgtgctgggaagtttgaagctaagttttacgacacggttagtgttgcagtaaaacagttttatttaaaaacttgtaacctggaaagagatatgtaactgtgtatttggtcttataatatatagattctgcaagaggaaattggtggcgtgaaaggtcattttggacctattaatgctttggcattcagtcctgatgggaagaggtaaactaacaaaatttgattttgattgattgatacaatcctcagttgatgagagtgttttttaggctttgttgctgagtgttttttggaatgtattttcagtttctctagtggaggtgaagacggctacgtgagactgcatcattttgactccaattacttcaacatcaagatttagattctttgaacatgtctttccattttttcatcattccacataatattttctctctttttaacattttcagaattgatgtactaccaaattaccaatatactactttgatgataaagcttgttgtttgtcttttcaaatagacatatgcacccacaaaaaaaaaacgtatgaaactgcttttgagaaaggaaaaaaacaaaataggcgcaacgggcgaggttcgaactcatcaaatagggaagaagctaaaaacgctgaagccactgagctttgctaaactgtggcatctcgagtaatttaaaaaattacaaaagggtaaaagtgtcaaaagagaggacaaagttgatttcctagggtttttgcacttcttcctcgtcgtctctctcgtcttcaagtgaacaggtgaagaagaaagccgttttccgtaatcgtttcttcaattatttttcttgtcttttgattgattcgatttcgtatctgtttcaaagattcgcatcaaaccctaagaaactgaagatgaggccgatcctgatgaagggacatgaacgtccattgacgtttctgaggtacaacagagaaggagatctgcttttctcctgcgccaaggaccacacacccaccctctggtttgccgataacggcgagcgccttggaacttaccgtggtcacaacggtgctgtttggtgctgtgatgtctcccgtaagtttctcaatttctcttcaaatagtatcgagtcgatgattagattcattgtttccccttagctacaagcttgtttagggtttatagtatcgagtgaattctgtcgtcttagtctttcaaagctgaatgtttagtgatttcttaggagactcgtcaagattgatcactggtagtgctgatcagactgcaaagctgtgggatgtaaaatctggaaaagaattgttcactttcaagtttaatgcccctacgaggtctgtggatttcgctgttggagatcgtcttgcagtgattaccactgatcacttcgtggaccgtaccgctgctattcatgtgaagcgtattgcggaagatcctgaggaacgtaagttgtacattcctagctgaattactacttacgttttagccaacttcttgtatgtgttaaaaggaaattgtttgtttgatgcaattgtgtagaggatgctgagtctgtgcttgtccttcattgtcctgatggaaagaagaggatcaatagagctgtttggggtcccctgaaccaaactattgttagtggtggtgaagataaagttatcagaatctgggatgccgaggtatttcaatttttcttaaggccttacttgtgtattaatttctctcttttaaggttatgaactaaaccttatgtggtgctactgccattgttactagacgggaaaattgctcaagcaatcagatgaggaagtgggtcacaagaaggacattacatcgctctgcaaagcagctgatgactctcacttccttacaggttcacttgacaaaactgcaaaggcatgtgcttctttcttttacttgtacagtatatcttgtttcaaatttttgcactatacatatagatataaatcatctaatagagtgttctcttttgttgattgtttcagctttgggacatgagaacgctgactcttcttaagacttacaccactgtggtgcccgtaaatgctgtctccctgtctccacttctcaaccatgtatgcactaatgcttcatgaaattcaatttcgaatcccagaatcagcaaggcatgatgttatctttgtgaatgtttctgctctctcttttaggttgtacttggaggtggtcaagatgcatcagctgtgactaccactgatcatcgtgctggaaagtttgaagctaagttttacgacaaggttagtgtttataataagagtgttttacttggaaacatgtaacctggaaaatacacatatttaaataaccgtgtatcattgtgtttggtataatatatagattctgcaagaggaaattggtggtgtgaaaggtcattttggacctataaatgctttggcattcaatcctgatgggaagaggtaaattaacaacatttggattttgattgattgacacaatcctcacatgatgaggttttgagtgtgtgttttggctctctcactgagtttgtggaatgtatatttcagtttctctagtggaggtgaagacggttacgtgaggctgcatcattttgactccgactacttcaacatcaagatttagattccgactacttgaacgtcaaccttttagaatctttgaaaaagtctcccattccggattttgttttctctctcttttaacattttcatgtttttatttactaccaatacaaataccttgatgataaagcttttgaattttgacagaatctttagttttcatttccagagttctcagtacaagttaattaacctgctctatgtgtgagcgagcattaatattcagcttttataaaataaactcggttgtagaaaagaatgccttgtgtgattgacagtcctcaagagtagcgaagaaaatcacccaaagacagactcataatgtttgtgatattcgtgatgattattggatctataaattttcggagagagatgtatgaaacctgaaaagaaagatcctttatgcatgaaaccttgacaaaagaaacaaaagcttacgcaaagcaataacaccgatttcataaaattacatcaggtctaaaacaaggaaatgcaacaaaggaagccattttataaaaaaagaaaagcctctctatattaacagtaacaaaccataacaccaaattttcatctggaggaaaagtttctctttctccctctctctctccgaaaatttatagatcaataatcatcacacctctctctctctctctctctctactatactatctatcaagtttttctgaaattagtagcacttattttctttgtttatgtcgacaaattaagtagaaatcgacatgaattaccatcgatcagcctgcagctactgctttagctcgaggcttcgtatcgagcagttgatgcaatttgcttgtagagttagaatcattgtctccttggttcttgttcttatctccagctcctgagttcttaactctagacaacatatttgcggggactctcttttcgggttccgagcatttcagtttgtcctgcaacccaaaaagaaccggccatgttcaagaaaatgacacgccttcataaagataatttgttggttaatgatagcttacttaccaacaaggttgcatttgctcctcttagtttatcagatttctcattaagttggtttagttcagatcttaatgccatgttttcggctgtcaaggcttccactttcctagcaagttcttctgtctcggccttcaaaacaaggaaagacagtttgttagtttattaaatgttttggtgagagttacacactaagagaaagaatttctaaagagcttcagtgtattctttcagtaaccaaacctgtttccttaatcttgaccttctagcagattctctattagactgtttccttcgctcccgtttcagttctctctcgttctgaagacaaaatttaatacttggtcagggaaacggatcagattagctcgaaaatccaacaagtggaagttgagaataagtcacagggtacctgaagccaagtttcaggaggaaccatggctaaagattgtgacatgaaggggttggaatttgcacttacaccaggagagagtatagctccagatccttgaatgagttttacgccggtatcaccacttgacggagaaacagaatgaaatgagctagcttgaaccaattgtttcccatctgccaaaaaaaccgaattaaaactcccattatatctaatatttacactgattctaactctttgggacatgaataaggctatataccttttgttggagttccctctcgacttcttttaagtttcggttcatctgcctggaaacatgcaataagtgaggttctagactttagacaatcatatgaaaactaaagatagctgagagtaagagaagagaaacattaccccagttgtattcccatcacttccatcagtagaaccatcagtttctgagctgttccgtgatcgtttatgttcatctgcaccattttcaggattcccatttcctagagacatagcaagcccatcaaactctttcagcttcttcatcaatccattgtctgtgttccctgtagatttagtaggagtgtcgatgctcaaaagcgtccccggctgcgataaagaagaactatccattaaacagcgaacaaaaccatttctcaatctttgatgtatcaaactaggtatacaacttacagttgttaaaggtggatccttttgaccttgaggcagtgatccctgtccacagaaactcaaagccaagtcagataaacgatcacggaggattcaactacgagatgtttgaggaacagaattactatataccatgggaataccgggatgagcgtaaactcctcctccatgaggataaacagcagcatagggtgctccatatggtgacatcatatgctgaaagggatttaagaccaacaaaacaccaatgaaacgtcttcctaatctttaccatattagcacaagatgattcgtgtttgtgtttagtacctgaggattccacatgtaaggaggaggaggatgaccagatgcagccatagctgaattgtaataaggaggcattgctactcttggaccataatatgcctagcagcaacacatcatgaaaatcattattaatcatggtattactagtacataactggagcgtaataaaaaaaagactaacctgcatagctgcccaatcagggtagacatgaacatttgtttgatcctatcaacaagagtcaagtcaacgcataaggaatttaagaaaaactaaattgactttggaattatggtttgaaactgttcaacataccaccgggggtgaagatggtttatctgatttggtaggaggctttggttcctcgctgctatttcccataggaatggtttcaaggtttcccactcaagagaacaatgactctttctgcaaaatcatggggatgggtgttgttgtgtgagaaatatagagacagagaagggtaaaatagtatttctctctcacatcctatgttcagaaaactttcaggaagacaaaaggaatcaacaaagtagacactactggacaattctacccctgaaacaatcacatgcacccaaaaaaagaaactctgttcttctctacgctttagctgtttttgttcaaattcaaaacttataatttttcattcaattcaagtaaatgcaaaagcaaacgatcaaaaatggcaaaattttcacaaaacttagaagatcaatgaatgatagagaaaccaaatcacaaaactattcgaccaaacaatctctatttgaaccatttaagttacgcaatacctacaagaatccgaaagctccttgaagaagaaacgtaagcagaagatgaagaagaagaagcttaaacagagagaaacccagaaatttaaatcgcgaattcgaaacctaaacagcaattaaacgcattttcatctttctctctctctaaaaaaaccagagcgaaaaagagttcagtttttttttttgagggaagggagacgcgagagagagagaaaaaaaacggagcgccaagacgatgaccacgtcatcagacacgtgtcatgagaatatataacagcgtaaactacggtggtgtttgatgagttggctcatcgagtttagtgccagccatttcttatgtcatctctaccgtacacgtgttcgatttctagtcgctctacgcttccctcatgtttagattatttttatagtcgatatttaccatagtgtataatcctcttcaaaatccgtcatcacattcacacgtcagtgaagtcatgtgcaacataaaaataagaaaactaaacaatctttccaacgaattttcagaatcattatttttgtatggcatgaaaataaacacaatttaacttttgctacttaccgatgggcatatttgtttattatatagaatattgcttcgaataatttggatacatgataaaaatttgattagaaagaagggacattatggtaaaatacgaaggaagaaaagacctttgactagtagtatctccgacgcggagagcacttctgtcgacaaaactaaagatccgaaccgtccattattcactaccgattcgtatcttccaaaggtgccacgagacgacccacgtgtatggccacgtttttgccatcatggaatcaccataaaaggaaaaataaaaaatacttttttagtttattttctttcattattatgaaaacaaaacaataaagaaaaggcccacaagcccgacaactgcttcgaatccaacggctgggataaacaaatgatccaacggtataaactaagccacgccagtagatagttattggcatttagaggctaaagggccaacgaggctttttttttttgcgttggcgtaaaagagcttctatccacgaagtggtccctacattacaaaatgcgactcacatggatgtatctacgtgtcggttatccattgggtgatgtagtaaatattgtctgggctctctatttttgtttatttttattttgtgtactgtagaaagaaatcagagagcataatactagtactagtattattcaacttaggttttcggtgacgtaagcaaaggtacagaccacatcagctttgaatatagaccgttgatctcggtttctcgattagaaaaaaatcgacggttaagctgcaataaaaacgtgtgttttatataacttcgaatcatctgacgtggccatcaatattttgtagtggaaaaaaaaagtggggtcgataagtcagaaaaggagattaatcatccaacggctcaaacgtgtcccgacaaaatgacgtgtccgtctggtaagcggatagtcttacttacgcatttatgtgggccccatgtgacgaggactcaattcctctatcctcatttcctaaattatccttgtcacttcattctatttcctcgatgtaccattgctatagccgcattgtttgaactttgaatataaaagcctaatgttcacactataggcaatttagcttcatcattacgcatcgtagtaggccttgagcccatattttaagactaacctcaaaagctaggcccaaattctatcttggactatttataaagacccatatagaaaagtaaaaaaatccaatcaaagaatttacagaatgaggtactctttaagccatacttttgctccttaggcaattattgtacaaaggacactcgtggttagagctgctacataacgagattatacaacttaaatgtgacgacatagagagagagagagaagaaaacagtcagtgcaggtctgaggaacgtttaatggtgagctcggctctgagatggagaatgccattgatgaaatgttgactgtcctcggctatgaacgaagtccatggaatcccgaaaaggtttctgtaaccaaccgctttcccccctgtgaatgtgtagtttcctttgtatttgcttacgtattcttcctttgtacttttatctcttgccgcaaattcgtagtccacaccaaaactcacagcccctttctcttgcattccgaggaatagcccaaagcagtggaacgagctttgctggtccatgttgcagtgtgctgagaggaagaaaccttgacctcctaagtggaaagcctgagaatagactcttcctgaagggaatagtcctgcgcattcctctcgcttcaagtccaggtacactacacattgcgggcgaggaagctcaaactccaccacttttacgggtctgtatttgtaagccctctctatgaaacggcggttcatggagtccgatccttcagctgcgaggatgcgttgcctgtgtggggcttctgctttgaagaagagcgcttctaatacttgctttgatgctacttcatgctcaaaatcactgcacgttagtacctttttcagctttcgacacgtcatgtatgggaagcggatgtagagtgcaaggcgtgaacccagaatctctctacgatcttccaatgaactatactgtccccttgcccatttcaagacaaaatcataaacagcatcctcagaagcaatttggagatcatcgctcgatagtatcgcctctattccagccaatggtaaggccataacctcatcatgaaacctgtacaagatggtaacacatgaacaagaattatacaacactagagtaaatgcatttcaaaccactggagagtcttacttggtaatatccttgtagcgcgaggcaaggaactgctttgctgcatcggttagaggttgcactgcttcagccattaaaacactagagggcagctcaagatagagcaaagcagaatcaggggtcatgggcatatttcgcagtagtctactacaatacctcatacaggaagcaacctcaaacttgtcagcagccataagaacatctaataaagcgggtgctgttgtgacacttagagagttgctatacataaagtttaaaagctccatcaaagcaccttcctctacaatacacataaaagtagagcatgagaaatcaacaatgtggactcccttaaagctaatatcgtatatcatatgtaaatcaaagtcagcaactgagttaatacaagaggcataaagaatccaaaacaagaagaagccaacagagagctagtagagaattgaagccaatataaagagattggagaatagcagaaatgaattaaaagcttgacttaaattgtcgtaccttgtgcactaattctaagggttacatgtctttgttctgattccctcattccattagaaaacagctacaacagggtaaggaaaacaagaagcaaaagatagcattacatgcgagatgaacaagagcaaacaataagaacatagaagaagaaaaaaggttaataccttgtagaaaaaggggctttttgcggccaagataggagaactaatatgcagttctttaactctaacaacagtagaacaatcaataccccagtttggctcactagatgcatcatcatcacctacaaaaaccattaataaacaaagccatcacgtttcagacaaatgacttcaacaaaaaacgctcttctgaaaattgttaagtatcacaaattcaaacccagtcactcgagagacaatgtgaaatttagaacggtacctgataaagcctcttcaaccattgcctctccttcatcgtcaagattatcaccaccaggagcatcatccatatcaggttggttgttatcggttaaaatctgttcttcagcacatgccacaatgtctgaaatcgcaactggaaatgcaaaacgtataagtttcttaaacatttaaacccaaaagccctaaaccaaccataagaacaattcataaaaacaacaacaaaatctgagattccaaccgatagggaatcaaacgtaccaccattgtccttcttgttgtcctctcttctcctcttgcgatgacgagcccaatcggcaatactcgtacatccttcagcatcagacctagaatccgaaggcccacccaagatctcgatccggagcaaacgatcggagaagttactgtcattgaaagcgaaaccaaaatcaccttcggaggaagaaccatggcgagagaaattggaatccatctccgtcttagggtcaaatagatcggtgttattggaacctctcatcctccttttcgaaaaccctcttctccgtgtcttctctccggcgagaaccgagcagaagaatcaggataacaataagggtcaaattcgaaaaggtttttttgaggaacgaaaatgacaaagaaacactaaaaaagtctttctctgttttttttttctgaaacaaagagcgggtcgacgttgaacggttatggtaacagggcggtgacggataaaggctaattaaagacaaagaggttcgttaatgccagcctaactaattgtttaaccggtttggtcttttgattgtaataagcactttggttctttttccggtattttgcataaatcgcgtaggtacgattttgattttgacttatcggattcgatttttagtatttgggggaaatttagcatttacttaattagaggaggaaaaaggtaataggcaaaattaggagtgtatttagttggaaagcgtcaaatttggtaagaagacaactcgttcaacaaacggcaatgccttttatgtcgttaaatattcgttggaatcaaagtctaatttggagttttcttttaataaaatacaattacttcaacgttttacagactttgttaattagattttgaccgagtgaaacttggctatgcaatgataacttgacaaaaaaaaaaggactaatttataaattgaaatccggccggtatacatttcttcgtaggccaacacatgacaaaccagttgactatgttgtgtactactagggatcatttgagatgatacgacttaacgtatcgactacaagcaacccagctgctattatttcttgaaaccatcgatggtatattttctcaaaccaaaacaattatagtgtacttgtttcgatctgatcgaagttaaacctaactttattattgttcttgttttaactaaaaacgtatccaagaccagttttgatgaatatatttttttctttttttaggtgaaatgtccccttcgtatttacgacaaacacacgactaatgttaaaattaaaacaaggaacaagaaatatttatacatttgtcagttttaatctgtatttccattaatatcatattttcaaattggcacacgaacgtcttctcgtaaataaacaacattaatattgcttccatgcaagcatcaaccacaaacacctgcaaataaacatgacaacctgaaaaaaaaaatgcactagagaaaaagaaaacaagttagatcgaaaccaagttttgaagaacagagactaattaagagaagaagaaaaggagctcccttcaatccaaacgaagagaagagaatgatatgtagagaaagagggagaatctaagaggtcgtgcaatccccttaaagtgtgctttcttcaagcttttaacaccgcgcactctctatgaggaagacatgaactcttagattctgcattttagttcctcaaatcttgtcctcttcgttttggaggaagggagctccttctgttacacttgaagaacgaatgtcccccaaaaagagtttgatatctttttacaataaaacgaaccaaaaataaactatggaaagagggagaatctaatatgtatggtgatggattgttgaggcttatgatgatgatgtgaaagaacatgttgtgttaagtcgttttatagatgaaagagcatcaaccctagtctactccttgggacgattatggaacaagtgtaaataaaaaattgaaaaatatagaagaataaatggcagtaaatcttattattattatttatttatttattttggcagtaaatcttattgtcattaattagagattaaacataatcttgttgactagattctcttttagagagagatacggttagggtgcaacactatggtttatggagtatttgcaattccattgcattaagactaaaaagagaattagttagatttcaaatgtccaaacaataactaaaccgtactttttgtatattgaagagaatctaggcattcgtaagaccatcattattgatagttttttaggttagtttttagataaagtagatcttaaatttaatgttataattcaattaatggttaagaatagctcttatataagagccaaatctaatgttttttaagttaattcttagataaattaggtcttaaatataatattttaatttaattaatcttaatttttagataacttaagtattaaatagaattgtttgtcatatttgtttaaaattttatgtcatgtatgttttaaattttatgagttgtaataactattaagttttttaaaattataatgtttctattttttttttcaaattttctttttaagaactccaagttaagattccaccattgcatattgcctaaatttcaatctcttaaccaagtttttaacttcagaattttcaaaatcaattataaaaatattcataaaaactatattaaaattatgctaagaaactaccattaatgatgctctaaaacagatagagtttggtcaatcgctattaccgacacatctttgacttggctttttttttttttttaacgtttattaatcaccaatcagtcttcttaaaacttgtggaatttttgatgaccaaagatttgaactaatcggttaaattgtctcttctttaagttacatctttttgttcttaattacaactgccaaaaatagttgaccggagttgtgttctttttttttgtcgaaccggagttgtgttcaatgtcaatatatgtgaactgttgacaaaattagctttttccttttttcatgtgaaattggtttctgtcactgggacaattaaaatatttagtttttttaacgactaacgagcattaatattaaccacaaccaaataattaatccaacatacatgagaagacacgagttaattatttgctcgaaccggaattatcactctggtttcaaagaagaacgtaaacgtcgactttctacacgagcttccatcagcttatccttgagagtacgatgattatcttccctgatcatcacattcacatttctcggatgattcttcgagaaagttctagacttttcttgactctcatgatcatcaacgttccttggactactctctggatgaatcttatctccttccgaagacatagatagattaagaacttggcctgagctcttcttaagctgcagtttgttatctcttcttgttcgcttttcaagcccttcttcgagttccttcaggcaaaccctttgatgcatagataccgaatcatctggttttgctctcaagccacttcctttacttgactgtgatctactcttctccttagctcgcagaagaaatgttttatcatcttcctctagcttcatttgtaatctctggtcactccacacttctgcaatctgcacaattactttatcactcaccggtgactttttgccaattcttctcaccttatcttcataatctttcaccgcttttgcaaactcatcgcagagattttccacaacaacacgttcctgtgtctccttttcaaggtctttcaaagctttggacaaacaatgcttcgcttcacaaagctctcgtgttagcttccggtgcaaagtctctgactcctttctaacttttctctcatcatctaactccctctttatggatcgaaacacatcttttacctcttcttcttcttttttcttcctcagtggcctatcgcttagcttcttccgttgctgaacctccttaatctcggctctacattcatccaactccatctttaaagctctaaccaaagacatattagcagtattctgttcttcgagactccatatccggtttagcaccttgagaagctttgtagaggaacccaaaccatagcttgcagacttaaccgccgaagaacctgtctgactaaacgctggcttacgcaccacaacctacaagcacattaagccaacacacaccaaatccagctcaaaacaagattgttaaaaagcattccttggttaaatttaagagtgaacaaagagcaaaaaactttgttttcttcacctgcaatgaactgctgctgctgctgcaacttgcaggagagataggttgcaacagatcaccatttctataatcatcagttgctgcaatttgcctcctcaagctagctctgcttggtggctgcaaattaaaactcatatataaatactaaacacacttacgagccaactttacgaccatgagatttgtccaatgaaatttgtgcatagacgagcaaaagaccacatcataaagaacaatactttgagattttctcggtggaatttgcgcaaaaatgagattttttccggtcgaatatactctaacctcaccgtaaagatcacaactttacgacctatcaaaacaagaagactaaaaccctacataaacccgtcaaaaacattcaagcaaatcaaaagcgccaaaattgtttacatgatcgtgaagcgggctacgggaatgcgattccacatctgaatcccttcgtcgacaccgtcgcagctcaattctttgccggaattgttcagtttcccacaaatcagcacacaatttccggacagagtcctccgaattcgccaaaaactccttggtcgctccgactcgtggcggcgaaaactcgagccgccaggtgggtggaggagtggaaggaccagctctcctagtatagcccatgaaacttcgtctcagctttttctccatttctccttcttcacactctctctccatctctttactcgctctgttttcacctctgtttccacctctgtttcccttaagctgtggaaggttgtcttcttggagacagttgtgtctcgactctctctgtttctttcgtcttttccttaaaaattcacagatcacttattaatggcttatccttaaaatttgtccatcttgctttatcatttatttatacaaaaacccgaaaaacgtgatttgttgttaagtatgattgtaattcttactactacaattctttgctttttaaaacaatagtagtataatgttacaacatcaaaagcctgttactctctcccgacaaagattacgagtttactctgactttttcttcttcccaacaaagccatagatttttatttactgcaaggggaaatatatctctcagagacagaggatgcgtgtgagtgaacctttttcaccttttactattttcttttctccatggaaatcaacctatttctcctatgtacattttgcgaacttgttaaaatagttacagtagaggtgcaaccttttactgtatatttggatcacaatagttacagtagttaacatactgctacaattgtagaaatgacactaatgaatagaaatgagagtgtatatcatttgtttggtttagatgaaatgtatttctaagataagaaattaacttttgatggatgcacacaagtgggtgaagataatcccttgaattagttaattatgctagtaaatttggggattgagagtaggctaatagagtcattatgaggttaaatgggtgttaataaacgattaaaatataaatcattcgtatcagaaaataaccatgcttgaagattcctggtcctttcatgctatagtctacaactccaaggctttattatgactaatactgacaccatttcctttttttcaaccatagattaggtgagaatgagatcatatcattacttgttatttctcttgcacatgttaatctttgagaattttagttgtttgtaatgagaaagcacataagagagaggttacggagatgagtgtaaatggcgttgggacgtgaacgggaccacaagagatgaatatttggcggctcagagacaacctaacgtgacgatgagaaagaagaaaacgaagagtgagttatggcatgaaaaggatcactatgtccgcacaaaccacacaatcattctctttctttctcccataacaaatttgaaagatacaaattttaaatgtaattaaagtaataatacatgaaatttacacctatagcaaaaatttgaaataaataataaaaacatttgaaataactaatgggttgatcattgtatgggccttatatagttatatattgggccttgacacaaaatttagtcgaatctgtcagagcgaatgggtcgtttaaggaggttatccatgaacgtcgaagaaaacagagaggcaaatatttggattttcgttaagacaatttttgagttctcgttctcttttctgtactcaataggatggagatggatacaatatatgaggaattgagacatatcaatgtttatgggggtcataatacggcatcggttggacttacggacattggtttgcttgcacgacgtctgatctgtgtctttttcttatgtgacagtttcttctcaaggcttttgacccgactggttaatttcgatatgacttctagttgttctctgcctgccttaaccaacgtctccatcgtttccttgaatcgctggttctcctccatcagctttttggtttcttttgatatcccaggttcagtgatttccggttccggagcctgttcgttcaaaataacttctgtctctagaggctgttctttcacaatgacttcggtctctggagactgttctttttcatcttgtggctcagaagtctgttggccaatgcctttggagttgttgggtgagtgatcaacttctgtttcctcctggctcgctgttttagggtccattgcagtcatattcccttcacgagtatatgatgacgatggatcttgcgaaagaggctgtgtttcctcgtcaatcactccaacaggtagctctgagagctcgacatttttttctgaatgcaatacaatatcatcttctccttttcggttttcattttctgatgagttggtttcggcttcagagacttcactagcattctccgggtcccgtatggagtttgtttcagtctcttccaccatttgcggcaattcgtttattggctcctccaaactttccaccaccatggctttgttttcctctacgttggtcactgtcattccgtttccatcagctgacggtggattacccggaacaacagtctcaacctctccaattttctctggaattgttgtcgaggaagcagccgctgcattttcagtagcttgcttagaatccgttgccagggtttcaaacaatccatatccctcttctgtttcagcagccgattcagcctgtttttcatctgttctattcaagacgctcataggatgttcctcgggagacagacgaagtaccttctctaaattcgtgtcagataccattttgttctcttctgtgagctgggagtgctccaagttcactggagagtcactaggctgagatttaatttccacttgttcctttacagcctctttctctgcactggcgcaactatttttcaaggagtcaagcttgtcttgaatgcttgagagctctgtggccaaagctttcctgaactctcttatactaggatgcaatccctggaagataaacatcagtataggaaactgtcagcaaaaatcctacacagcagtacatactgagataaactatctcggccaaccaatgaaattagtctttcatgcattacctcgacagcatccaatttcaaaagaaggttcatcaccagttctccattaacaacaatctccttctcttcaatgtgctgatcagtagaagcttctagcgcctcaatacgctttttaacatctcccatctgctcacggacagtggctatctccttcaatttcttaattggctcccatcttctcacgtcatatccacggtacatagattggataattctagcagcttcctcttctgtaaagctcttctttgcaggctgttctctattctccttagcttcacaaggtttaataatctcaccgtttgattcttcttgaagattagaattgctctcaactgatcctttttctgttcttaatgcgtttaggcttccctcagccatcttcatttctgcgtttgcgtcttcacattttacattacaagcctcaggaacagtccttgattcagccttcttggaggacagtggagccgcgatcttagtctccttagatttttccatccgtttaggatgacttactgatttggaaccaccatttctctctttcggtaatgggtcaacacgcagacaaaccggaggcaacttggatgcttctgatgatgacgaagactgctctttttttgtgctcttaactggctcattctttgcaatccttttggttggctccgttggtttaggcagatggttttctgatagtttcactggaatatttcttggttcctgtagatggttcgccactgggatatttattacagagctcttctcctccgcatctgaaagtacattgcactcaaaattcccttctttgccttttgcttgagttatctgcccttcatttctgtggagatcagaggggcaagactccaagttacgcccttcattactactctccttactctcagaagcttcaacatctttccgtttcccataagatggtatccaaaaaataggatacggaacctgtccaggctcttccttgttcttctggttctgcgcttccttcacatcttgaccctggattaaggattttatcatgctgatatcaaacgggtattccaccgttttcccattctgcatctttttcctgtcttcattactactctcagaagcttcaacatcatctcgtttccgacgagatggaacccaagaagtaggatacgtaagctgtcccagctcttccttgttcttctggatttgcgcttccttcatgtcttgaccttgcaataaggatttgaatttgctgatatcaaacggggcttccacggttttcccattctgcgcctttttactgtcttgattctgtaccaacgacttcatgctgctctcatcaaatggaaaacaaccacgccaagattcaggaaaacttttctgaatcgtcatattgtcaggagctctaacttcagcaggaggctggttatgcttccctaacccaagagagcttctatattcctgattcctagcattctcatgaggaatccatataattgggtaagggcagttagtagaacgaactggaagtacagcttctcctttctcaatctcaggctcatgctcttcaatcacaacgcctctgtctttcttcaaatcacacatctgggaagaacatttcccgcagtgatgcttcccaggcacatccttctcaacatcaaaccaaggttgataaccaactggaaatggtggatgaacgtaacaagacggagcgtaagacgcgtgaggaggatggaaagcggaacgattcatgcagcattgatggtacggtacttgtgggggataacaaggaggccagtaagcaggaaagttgccgtgaacgcagcttccatgacacggtggtggagcatccattgccatatgctgagagttattaccaaatccttgataatagtattcctgtggtctcatttgacatggttgtgatggatccatgtacacaggcatcatctttaatcaagatcacttaaccaattccagtaaaactgcagcaaatacccaaatccatatatcattagaaaaatacaatgtgaatttggttcattcagaattatttcgttaccacaatcaccaaaatctgccaaactaaatcaatcgcatcttcattaaactaagagcaatgaactcaagattctcaaagctattcattaaactaagaagggaaaatgacggagcttacacgaaacagaaacgatccgtaaattccgatgactcagttcctgcgaagctctctcactctctccaccaattaaaaaaagcagatttcttcttcgaattactttctgattcagatgattgcagctttttctatgggtagtgaacaatccaaagacatttcttgatttatagaaagacgaacaacaacgttcagagggaaaagatatttcttctgctctccagatcattctcgcatcactttgaaaaatctggaattttctcttcgtttcttaacctttactaacacgtgatttaagaaactcgcttcgcttatgggccatataaattaggcccatttattttattattgggcttataattaggctgtatattgagcgttagtctccgtctctgatacccaattcgaaaaccacttctcagcctccgccgattcagacctcgcatattcagcttcccagtctttctctctgcgtcgttctagggtttttgttactctttgcttcgaagatgggaaaggcaaagaaacctcaaaagtttgctgtcgtgaagaagatgattagccacaaagctttgaagcagtgagtaaacgattcgtcttccttcaaatttgatccttttttaaagagattcttagttttgtttttatttatatagttacaaggaagaggttctgaatccaaacaagaaggacctcacggaacttccgagaaacgtgtaagcttcctaccactgttagctttcgttgccaagttgtaattatttgggtttcgtttgatttgtttttggatcagaccgagtgttcctgcagggcttttcttttcttacaactctacattggttcctccttaccgtgttttggtggatactaacttcatcaacttctctatccagaataaggtcggttcatcttcaattgcatttctctatcacagagctataatcagaatgtgtatcgatctttgtagagtttatagtcttggtgaacctgattggaatctctcattgtttgaaatcctttttgacttattttgctctggtgtatctaatagatcgatcttgagaagggaatgagagactgtctgtacgcaaattgtgagttacttaaagattttgataggtctatataggttctctctcttgttaaccacctgtaattgtttctggtttgaaggcactccttgtatcacggattgtgtcatggctgagttagagaagttaggtcagaagtatcgtgtagctctaaggtaaatcttttagactttttgaacaaggcttttctgtttatggttttgtttcgtggattcgtaattggtttactataatatttggtaggattgcgaaagatcctcacttcgaaagactaccttgtatacacaaagggacatatgctgatgactgtctcgttgacagagttactcaggtaatacatcgttcccggcttgttgaactttgtattcaagactctgaaatgatataccgatgctctggtcccatggttcttggtgtatacattttatcttttgtatgtttctgtaatattcatttctcataatatacagcataaatgcttcatagtggctacatgtgatagagacttaaagcgaaggattcgaaaggtaaagatagtttgttgtatcagtgctcttgtttatatccatggctgaagtctttggatattatcaacttttttctatgtttgtttgcagattcctggtgtgcccatcatgtatgtgactaatcgcaagtactcaatagagaagttgcctgaagctacacttggtggaggtatgtatcttccggctgagacatctgaatctactgctactatggtattagactatgtgaattcgcttttgtaacctttggctgtttttttttggtgcagctccaaggtactgataatttattagagaccttatgaattccatgaagccctgaagcctcaagcctgagttggtatcggtttacgcgctgaatcaactgagttggaatggctatgttgtgagccattttgttctctatgttggtttctctgttgttaatttgatacaatgttaattaataactcaacagaaatctttattaagcttttacattctaaaaacacattcttaatctattacacagttttgttaatgatagaccaaaatcatgtcttactggacttcgtacgttgatgtggtgattaagataattacatgaaaatcaacatgttattatataaggtaaaagaaacgtggtatgagattgaaatttccttctcagtacaaagagttggtgttttcacgagacatagccagctttgagctttggagttttctgtttaacaaagaacgcagaaagaacactctttgtccggacaggagcttgaatgatctctcgtcgcgggttgttatcaagtgacctgtgtgcagttagaagtttcggaacctccaaatcctgttgaatcacaaacttgtctcatcaaaaccatgattacaaatacacagcttactaatccagttgcatttttctacatgaactgcccgattcatgaaagattagtttcatgtgttctaaatttttttaccttatgggcagtggatgcagcaggaacacctgagacctgagaaccagccaaaggcttcttgtttgctatgttttcatcatcacctgcatgagtttcaatgtatatcatcaatctcttggcaagagttgtctaagaagaaatgctatgtttgatacttccccgactccctgtttctcgtacctaagagatggaacactccagatgtctttgagaaagcttttgaatctttggagctgcacagtaaatatgtattagttatcaagaacgtgagaagcagtactaaagctttttgtgaactcaccttggtgcaactgtggatgttcctttgagggtagacttggtctctgagcctaaatgccaggagagtgatttcgatgcaggggcatctaagtgagtcaaaccaagcatattacttaaactgtttgatatttgactgcttgtattattaactaataagctcaaagatgaggacattgcacctgaaggttgaagacgggatatagcttggtaatgattctgtcttgtgtcagttcgtctgagaggactaaagtgtacccgcttgttaacagaatctaacaacagtcgagagaaaaaagaaatcagatttcactagtaaactaacagaatcttaacaagggacaagaaaaactcttactgggaagaatgtaatgcttgtgatgcaatgggataactgctaatagctgttgctgtctaagaccttctttgtcgatatatgtccggcatgtaagcagttgctgatgaaaagaacatacacaaaccttaagggagattgcctagaaaaggtaagataaataaatagagaagtgtgtgagagagtttagttacctggctaacacaagaagctctcatttccatagttgatatgtctgaattttggtgatcaaaaagatcagtaagcttggaagctacagttccaaggtgatcaacagcattaactagagccttcacagtgtagtctttcaaattgtccaataccctaaacagaaaggtaataatgtaaagagaagaaatgtcattcaaagctactagtagagtaaaattaaggaggttacttacatttgcttttgctcgctatgaagataagacttttcacagtaatcagcagctgaataaagttgaggcctcaagttcttgagctcctgttacatacaataaaggccaaagtaaaaataacatttgtaataagccaaacaaaaccaacaaacaaatcagaagattcttgagtcgtcgtctctaggtagctaagtcatgccatagtctgtcttgataattccaagagaaccagattcaaatcttgaagacagtagtaacacactaaccgacaatcatcatcttggtcccatcaataaacttaatccacaaaatttacagccaacaagacttttaaagtttttaccaacatgtatattagcctagcctacaacgagatcatggatctgcctcaactaaaccaagtttattgtgatcatagctcttaatttctacagaatctaactgatcagaaccaacaaaaaaatgtggacaaggaagaactagtaacagagagatagataataaggaacctgcaatgccttaacgaagctcttgttgcgttccatggaaacctcgtccaaggtcatagctggattatccattcctgatatctccgtttccatctagcgatcagagtgtgtagaaattacggctctctatttaagagattagtgtaacacaatcaatgtttgtgaggtaaggttagctttctggtgagacggctaagctaacttgacatagaaagagagagagaataggaggaaggtgagagtgaagtagaagcgattccaaatccaaaggactcttatgccatttttgcttccagagttattaaaaaaggtgtatagaagaaaacgactttgggaaagacgcactatgttttttttttttttgaatataattctcttaaataagttattatgaacacataaaaaaacaagattaattaataatttgatcatactataagatacctctgaattacaaaattaatacagcataatttgaaaggacattaacttaatatttttgtcgagtatacattaaaaatactcccgtaaaaaaaatcacatgtctttgtatatgctgctttaattgcggttgttgataacacattaaattatttatgtgtttgtggttagattctatgcaagcatttaaagtaaacggaggtggatctataggatttgaaatgacggaactagccttgccaaaaggaccggtcaactggattttataattgactccggcaagttgcatgaaaaagtaacgctggcggacacgtcagcattaagccagcttcattcacatgagatccacacgtgtggactagctgtcaaaacggacctgcacgtgcaaaggcccatgggtccatcatggttttactgggcaaaaatcattggccccaactttagtcttacaaatcatttttgccatttgctttcaatgattctgttcaggtgaattaaaagacagccgtaaatgaccaaacaagtttttttctttggtttgtgccaatgttgtcttcatgttatataattcgaatttctatttagaaaaatatgcgttttttttaagattaaattatggatatacacaaatgtaggctgtataaatcatattctataaataaaaagcttttgtcaaagtatggatatacacaaatgtacgagttgctcgaatttaatttcaagcctgtagctcagtcgcttgaggagattgcggtaaaggcaagaaatgttcaaagtagctatggttgtacttacatttagtcttgaaattcaacttcttcacaccttgcttaactgccttgtcaactctttttgacatctaccgtcaacacgacttcgtggaccaagttccacaaccaggcttactagtttcggtgcctcatggagttgcagtgacttgtcaatatttttgaatcaaaatataatagtaatcaaagtcaacatatttatgtatcatgatgctatactgttattttacaaatttatgtacatataggcgttttattgattattatacgcaaaaaaagcgtgtaatgtattcatgctattgggtttattttaaatcgttccttcttcatctatattacagtaccactctatttataaccacacaaaagactactagtatacataacaccagcatgatgtttcagacgatgatgatgaatcaatctccgaactcaaagtaggtcggcttgggagtcgaagggcagctaatggcttcaacaagctcttgaacagtgagcatttgaaactttggaggcgaattaatggctatgttatcgactttatgctcataaatcttgccattcttatcgaatttatactcagaagtaccatcgaatcgaccacgagtctcccacggaccacgaggaattccatgaacagtccatcgtatcatcagagtgttctctgtgggttgccaaacactaacaatgtccacacatagtgctctgaagaagatccttccatggaaacgtaaggccccaaatatggatttgtagttatcaattcccatgaaagtgttcatagggtctttgaaaacaatatcatccctgcgaaattagacaagagaaagagctaatcaccaactgataaaacagatcattctctaagaaacctaaccaagaacagatcaaatttgggatataagcatgactctgaagcaaaaagattctttgagaaagctaatcaaagagcagttcaatttaaatcgagaatcttcatcaaacctgtaaatgtcaaaattaagctctttgtagaacaacaaaggaaactcttctctgatactacgaacggcgtgacccatattcacgtagtaactctgcttatcttcttcttcttcttcttcctcctctctgctaatcttgtagtcttctttcaccggagctgagaattgccagtacaatctcgatttcggattcttaacaccaggcaaatctctggcgtcaatcgccgaaaccgtagccttcctcctcataaacacatgactaataacactcgaattcgcatcggagaagattctcgccgagacggtgggtatctccggcgaacgaacaaggaatgccatcggaggatgaaaagaccgggtaggagattgaagatttaaaccaggacaaacatgaaaacgataagggatttgcgtaggaatatgctggattgagagagaagacaagaaggcgcgacgcgaggataggtcaggaaaaatctcctaaggataatttttcaagtccgcatggataacgattctcggacttgtcatcttcaattcttcaacgacaatgactcgttgaaggttctgatgattatcccaaaattgaaattatatgacggtccatttatggttagggcttcacgtacctttaagtaaagcccattcattattataatttgattacaaaaataattataggaagcctcacttatatctgtgtgtatgaaacggtttcaaagaggcccaactagttttttgttttcttcctaaactccaaattcatttggcaaaatgttctttcatttgttgtataataagcatgaacccttccagataaaactttacattgacgtgaactcaaacaatttggttcaaaagctcgggtttttcggtggagtactttgtcatgtatattagacccgcacgatccgtcttaaacgtagaacaagcacgcatgtctgacaaatttgtttatcaaaaatagattcttaggcttagcgattagaaaattataaactcagcagaaaatcaaaataaatatgtagttttttatcacggtagagttacacctaaaacagttcaatctaattaaaaagtactcgacaaacgaaacacctttttagccatgcgtgttcacagcttcccaaagcaagttcttcaacacaggattagtcgcatctctagcttgaatcgccgcgttcttcaaagtcctaatcgtccacacattagcttcccaccacgaaagactcctatacggtagattatgcttcttacaaagctccttaaccaccggcgatactgtccggagatgacaacgaggaagccgaggaaacaaatgatgctctaactgaaactgcaatccaccaaagaaccaatccataaacgatctacacgatatatcaagcgtaccggcggtttgtttctcaaaccaatcgtttccgtttggtggaccggtatacacatctgctgcgaaatggtttaaacagaactgaacatgttgaatcgccgtgacggcgaagctcacgaagacgaagatgaatctctcttgccaattcggaaggaacgagactaagagagggaaccatgtccagaaaactaaaattccggcgatgttcaaggcccgatctgggacgtggcgtttcgagaatagcaataggaatgtttggatgaagaggttgattcttccgacgcacattactgggtaaaatgtccagtgttggtagctgattaagaatcgagctagaggatcgaatgttaatttcctgccatagaaacgtgacgtcatcgaattgaagaattttgtagagacggcgaagatcgggatgtgttgtagatccggatcgtggtcaaggctgttacaagcgatgtggtgagcgttgtgcgtccatttccaccacgcgattgagatgccggtgagacagttaccggagagaagctggattagtttgttacacggtttggttgacgtcaccgtgtagtgaccggaatcgtggccgacgtaagcgctttggatccagaggagaccgagtaaaacggcggagatgaggtgagcccagatgctggtacacgccaaaacgccgtagagaaccgccgcgagcatgacgccgacgcacgtgagtgtgtaaagagtcacgtgaccttttttgtcgaagaggccgcgtttggagaactcggcggctaaacgacggtagtcacgtgagacgtctgacacgtggtggtctctcacgtgatagccattgtgaagcttttctaagtggtgccatgcggttccgggatggtaagcgatgaacgcgtcggtgacgtcttggccggcgagattgagaatcgctgcttcgcctccgggatgagatttaacccaatcggaaacgtcgtaaactttaccttgaatcgaaatccataaatctccaggtttgttgtgttttttcaaatcctcgcttgtaacgtatctcttcttcgtttgatccgccattgatgaaccagagaaagagatttagttcctattatccaaagtgcaaggaaatgcacagaacccaatttgagaaaggttgcaaatgcaaaacctttctctctatggattcgtaattcacagattctgaatcgattctacgccttctcttccttatatttgtgtgtgtgttttttgtttgtttactgttttggaatcgatgttcgaatctttgacacttgtgttttatttttagaaccgttttaaatggttaagcaataaaaaatccactggttttaattaccttttaactctataaatggaattgttgattagaggaaaactccagtgacatttgacaaggttgtcttacatgttaatatgtcaatttgtcattagtttgggtgggtctatcaatttcttttagtggttgactcagaaaaactagagtatcctcaagagcaactttaaagttgtcaataacagaataaaatcacaaaagcaggaaaaagtggaaaagtactgttagttctaaactttaaaaattagcatcctatttttgtgattcaatgaactttagtggcggatacaaaaccttttaaatgggcttatatttttcctaatgggccaaagtgtataaatttaaagcccaattatttcataagcatcttctcaacctcgcgcgctctgttttgcttttgccggcgtcggatctcggcaaagtctcctccgtagaaattatctatctgtaagtctcagttagtctcacgattatcaacttccatgttggtagtgattttttaatctataagctaacttccatatatccatattttttgttttcgttgctgagtctcacattaggttgtggaactgaaatcgctggattttggggttttctggtaagagggtctccaggatgaatccggcgaattttcagcctccaaatcctccgttccactgggctccgatgttacctccagacccgcctcgttgtggtatgttttggaatacaaagaacataaccgatcagcttaaacaacttcaagatacgcttaacctggctaaatcaatgtaagtaaagccacatgaagttgtatagttgtgttaatgaatcaattgagtatcggagtttcgatttctgggtatagttatagatagtgaatcacaatctagttcattgttggtgaattcttataagctggggtatatttagggagaaagaactggaagcattgaagatgatcaaagacgccaaaggttctgtggaaaatgcagtacaagattcgggagtagagtatttagaggctagaaagatggatttgggacagcaggaaatgctttcagtggatgctgctaactccttgatgtctaccttgagagcacagcttgagccttttaggttcgttgttgatgagaatagtccatgggaagagaaatctgcagcagtaagattgacttgcaaaatgaagaaatcaataaggaacaaactgtggaagaaacgaaagagacggtgtgctgcagagatgcgtgctaaggtggatttgtttgctctgtttagcttatattgcagtgtcgcagtagttgagttattaactctatcatcctgtctaaatggtttcaggagcctgaaagatttgaacaagctgatcgagaggcagatgaatggagggaaaaggaaatggccaaggacatggcaaatagaaaggttatgaacatcactgtgtggaattcacatgttcctcgttttgatatctgacggggtcttatatgtttttaggttgatgagatgaaggcaattgagaagatcaaggcaaaacgtgagcgaaagagactagaacccgaggtgagacttctaaagccatctcagacattatctaatgggaactctaataaggtttcatagaaattcttttacaattcatctcatggattcaatgtttcagcttgaactagctctgattgttgaggaaatgcaagagttacgttccctaagaattgaaaaactaaagaagcaaggtatgtcaataacctgatgtggtacaatgcgttctgataccagagactgacttaagtaaatgggttatatgtacactatgcaggacatttccttcccgaagaagatgacaagtttttcgagagtgttcgtgctgcagtggagcaagaggaaaaccaagctcagtccctaatcaacacagagaccgaagagcatgtcattgcctctgaggagaacactactctcactaccagtaacaaaaccaacaacgacacagataaagatagcaatactaatgcagcttcttgtgaaaggactatgaaagctcctgacaatggttgcgacaatatatcgaatttaccagtcgaggtctatcactactactacggaagtaatatcgacatgggtagacttattgaggtgagttttatgtaaaagccctatctcttctatatcatatcttaaagaagtgattcagctggtttctggtaatatagatcagaagagaatgggatgcatatctgagtgccggaggaaggtaagttaccaaaacaatatttcataatttagcgcttttgatgttttgctaaatgttttgatgtctatatacagccggattcctggacactgggtccagccgtcgccaccagctaatgagatttgggcttcttgtcttgttaatactcccaaaagagatcttagttagtcgctgttaggattctaggatactggtttcatgcaacaccctttactcaagattatgcgatttggtcatttgcctctgttttgaaacagaaacagatcacaagtttaataatcaagaacagaacaagtctttagcgatatcttaatcctcgatgacaacgtcattgtagaaccaattcttaccactggaattcgtgtttcacattagtggcaacttatattcaagtacacattttaaatacgtcacttgtcactggaatttcaaccttcaatgagttaagcatcaatatacttagttttggatccttgttaatttttcaaactttacacaccatctggtaaatagtcaattgtagagcattaaaaccgtcctcaagtcgtcccataacatttaacaattgatcaattatttgcagattaaatttccccgaaaataagttaaacctgttttgaggtgagtttatttgaaagccctctcttctatatcatatcttaaagaagtgaagtgattcagctgtggggaagatgattgttgagctattcaatagaacgatgaatcacaactgcccatctgccccaaattggatattgcaaagaaatctttcgtgaaaagtgcatttgaacgcactaagccgatacacacatatctctgcttttggaattttcaacagtggtgttgaagttcaagtagatcattataagttcaaaacatcacagataacttgcaacaattgctaaattcacaaatttccccgtcaaaatgtatatctaatctaactaatacaattagagtaaagttgaatcaaacgaattgtggggaagatgattgttgagctattcaattgacattgaatcacaactgcccatctgccccaaattaatgtcgcagagaaatctttcgtacaaagcgcattacatcgcactaagccgatacacacaatctctgcatttaaacaaaaccaacactgaaacttcatatgaaactagctatacaccaaaaaacacaagagaacccacgaaaacgtagatcatcaaagagctcttggagattcaatctacgaaggttaaataaattgttagagaagcctcatttcatgagtttactcgcttccctgctgggtccttcgcttttgcttctaatcacattctcatatcacaagaatttaatcgaaaaccaaatccataagggatgaaaaaccgaaatccggaattgaaaacacagatctcggataaatccaccaatctccgattatgaatttccgaaggtaaacttggcttgaatacgcattgattaaagcgtttcacccataggtccttcgttgcctaatttctaaacatgctacaacgaatacgatgctcagcgaatacgaaccataatattatcggacatcaactcgcgagacgagatttgtcccacgatctgtttatttccgatattaactcttcatcgcatcgctcgataatcaaagatatttataaaaaaaaacgtatttgaaagctaagtaaagttgccgaaacggcgaggaagaagatgagctataaaccctagatgagctgtggaagtaatagaaaatttagataagtttatatagagcatctattatttagggttaatgcgacgtatcatagccgttagaattctaaatcaacggatgtggattaggcccatctttgtgatctggacgtttattcaaaaagcctatctttgtgcaatgaatctcattgtgtgagtgaggcctatattgggccttaatggtaaaaaaatgtcatggagaattcacaatcgattttaaacatttttcaacaagtaacaaatcatatataggttagtgccatgactactagttactaactagtacctctggtgatgggttatttcactcgtcgttttatttttggatttgagtttgggaaactaaaagtgaataataccaaactcgcatctgaactccaaagtcattaccatatatataaattctcaaaaagacactgcaaaatgcttaaacacatgtgaaagattttatgattctcttcaagtatcgtcgaaatcaattaagctttcattcctccaaaaacttcttaagatgtttcaaccataccacgtactttcgcgtgcctgtcgtcatgtacttgtacaaggcaaattttgggctataatcaaatatcatacgcaaataactgtgtctgtaatccacgtttctgcaaaaggccatgaaagaaagaaagaaagaaagaaagaaagaaaacaagattaattataacatttctgctgtgctcatgcctatctgactatatatacaaacattatggtgttttcttattcacaaagcttacttggaattagacaacaaatcacacggccgttgatcctcccaataattcccccgactaatcacagatacaccattcatggaagtaccattaagaggaaaagccgtgcacctaaactcgaggctgaggccactgatcttcttggtaaaattcacagttagtggaaaacataatccatcatattcttcatagggcatacctgctacaactacaatatattcctcttggtagtctctagtcaatgtcacagtcttacctccatcatcttcaattgtgtaagggtttattcctggagtcggctcatcatcctggaagcatattaattatcagtaaacttagatacttttattgcaatgtaagaaaggagcagagtccaacgctagtgggaataataacatatatgattatagaatgaacaactttaggtggtataaagccagagcagagcatataaagaaacctaaaccattactattagttttggaaggaaagcaaaatgcagaaatatttacaaaagcgagatcatggagttgcaaagcagaatagatctcggagtcaaatcaatcggagaagcatttggttggagctctggcgatcatcaatagccgtcgaggaaagaaagccacgagagaccatgggacgcggcggagccaaactcacaacggcggagatagataggaatcgaccacaaacggaagcaagcttagatgctgacctgcaccaagcgaaaaccatggtcggcgattgatttctctctacgaaaatggagttttaaggttttttagttccaaataaatatttatattcttatgattatttagttccaagccaacatgtcatcacttatagtgttgaagttgaatttctatcataaggaaacaaaagattttagggctgcaatcacttgatctccaagctaacgtatcatttcgtgaagtttagatagagcatgcattaatgagacgtaatcatagccgttagaattctaaatcaacggatacggactaggcccatatgtttgatctggacgtttactaaaggcccatctttgtgcaatgaatctcagtgagtgagattgggccttagttataaaatagagccacaggtaacccgacccgtccgataagttgacccgacaattgaaatcatgaaaatcatattggtgttgttgttactccgatctacgataataatcttacagaggaagattcttgtctctttgataaattctcggagtaggaggaatctctgactccttcgggcgagttgagctatgtggagttcggttgccaatttgaaggagaatttgaacaagattgcgcacgatgtgcatgacgacgacgaagatgatgatgaagatctcaccatttatgggtccaccaatggcggcactgatcggaggaattctaatggctttaggtattcgaggtctccaatggccaatggtttcgaatcgcctgttaatcctgaggtctatttctcttcttcttcttcttcttcttcttcttcttccagttactggattcactggataattatttatgctcaaattttgtagattgagagatataaagcagagatcaacaagcttcaaaaatcagaatcagaaatcaaagctctttcagtaaattatgcggctctactaaaagagaaagaggtaaagaattgttcatggctttatcaagactttgtcatacatcggtttcgtgctttttttatctcacacagtagccacttggttacaggatcagatttccagattgaaccaggagaatggctccttgaaacagaatttgacttcaactaatgccgctcttaaagagtctagattggatctttcgagggcatcgaacaataatgctatcaaggtagatagattctgctttttgcttgtttctgctgtatactttgcatcatgtccatatacacattgttttttgatgcaactgacgatttaaaacattagactaactaatagtcttttgtagggaaatggtgatcattcacccaacaggtcacaaagatccccaactaattggaaaaatcgaaaccaaatgaacaatggcattgcctcgaaaccaaacgggacagagaatgattccgagtcgcataaaaaagaaaaggtagttttcttgtgtaatgtgccaatttaaaacatgtattatgttttatcagagtttcagaatgaaatcttcaaaatttagttagatatatccggtactaggtaaatgaccttattctctgtaatgagagtgtaataaattactctggtgtgtgctttttactgaacgcgggactctaagcgacaatctgaatgccttttaggagtttgcagagatgcttgaagagagaaccagatcaatggcatctgctcaggctagagaacttgagaaagagcgagaaaaatcagcaaatctgcagattttactacagggtatagagtaacacaattagcttggctgattctttttatctatcttatctgttattctctctcattcaccttgctttaatcagaggagcggaaacaaaatgagactttcaaggaggaactccagtctctgaggttagataaggaaaaagtaagtatttaatctttaagaactttatttttttttgttacttaggcatcaccaatttcacactacagtattgtcatctgattaatgagaagatatttattccaactgtatgcagacactcatggagagtaacaaagtacgtcgtgaattggatgcaaaattggctgaaatcagacaattgcagatgaagttgaatggtggggagcagcatgcttttggaatttccagagaaaatctaaaagaggttaacaaagctctggagaaggaaaataatgagcttaaggtcatacaaacttttaattttcttggcaaggaatttttcatttttggttttcctctgagctgcggactctgaaactgatctacatttcgttatgttgtgtagttgaaacgaagtgaattagaggctgctttggaagcaagccagaagtcaacaagtaggaaactcttcccaaagagcacagaggatcttagtagacaccttagtagtttggacgaggttctttaatgcaaacttttaattcagttagccctttaaccaaaagaaacattgtttatatgcgaaattgaagtatggggcaagcatttatttactgtaccttctgctatttctcatgtataaataggagaaggccggaaccttccctgggaaagaagatatggaaaaatctttgcagaggctggaaaaggagttggaggaagcacgaagagaaaaggataaggcacggcaagaactaaagcggctcaaacaacacctgttagaaaaggttatttatcctactcatattcagttttatttattttatattacctgaatataatttgcaataattttgcaaagttgattgataatcctataattgtaacttttaagatgtgtagtgaattacttttgagtttttgacaatgttttcttgctaactttgaacaaaagtctataaatctttcttgctatattctaacaggaaaccgaggagtctgagaaaatggatgaagatagtagattgattgacgagctccgccagacgaatgaatatcaaaggtctcagatactaggtttagaaaaagctcttaggcagacaatggctaatcaggaggaaataaagtcgagcagtgaccttgaaatccggaagtccaagggtataattgaagacttaaatcaaaagctggcgaattgtttgagaacgatagattccaaaaatgtggagcttttgaatcttcaaactgctcttggtcagtactacgctgaaattgaagctaaggtttgtattagtcgtgaaagttgtttttcccatttagttgttagtgtaaccttgatttatgtattcctgttcttataatgttgtaggaacattttgaacgagagcttgcagtggctaaagaagatgcaatgaaactctcagctcgtttgaaagtaaaaatctctaatcttttgctttgtcaactatctgatacgtcatatggattacggtttatgctatttttctgtttcttaaggatgttgatgaacagttagagtcatcaaagaaagaaaaggaggaaatcacatcgaaggtattgcacgcagaaaatattgcagcagaatggaaaaacagagtaagcaaggttgaagatgacaatgcaaaagtaaggcgtgttcttgagcagagcatgactaggctcaatagaatgtcaatggactctgattttctcgttgataggtgggccaatgacttttatttacatgttgttccatgtttcttcagattctgatcatcttgacatatcctttattcaggcgtattgttatcaagttgctggttacgtacttccaaaggaatcacagcagagaggtaagatttgtggaattaaaattccagaatctagttttttattagaacactaaaattgtagaggaagtcgttttgtattaaattttagcacataaagcttatgcaaaatggccttaagcttatcgttctctcatctgaatgtctctgagtaggtgttggacctaatggttcgaatgcttggattctcggaggaagaaaaacagcgaataggattggcacaacaaggagcggcaggtaaaggtgttgttagaggtgtattgggttttccgggtcgcttagtcggtggcatcttaggcggtggcggtggctcacccgattctcatccaaatatggcttcagataatcaggtatcaatagctcaaaaaaaaactcttgaggattgaaaaagtacatttgattgattgtcttgcctcttttgtttggctcagtcttttgcagacatgtgggtcgaatttctacttaaagacgcggaagagcgagagagaagagaagcagaagatgcagcaaacaaagagcaagagaaggctactgtttcttctacgcagagaccaaagtatgaacaatctgattcggagttttcaactgtgcctcttacatcatcgaatagtaatcacaggctctctagattactcacttgactcggtttggtatatacatttatacacgttttgtagaaatctaaaatccgaaactcttgcttcttgtgttgtaattatctctctcacacctatattctattaattctttttcttatatcattcaaagaaaaaaaaatctgaagctttttttttccgtgatgttttccgttatatcattaatacgtatattagttacttagaacaattgatgagtgcaattgattcatttcgtcagtggaatgattcatgcttgtcttacaacaatgttacaaatttttgttaagaatccttatatgtgatttatatcttctatatttgtggaatattcaaaacgaaacaatgtctcacgtttcatgagctcaagaattctccataaaaagctggaaaaaatggtatttgaaaagaaaaaacaagtgtactcaaaacgtgataaaatcataaaaaggacagttgggccattagcggcaaaaccctgcaagtgaccaccaatttcacatgatcaaaaatgcaaaaagaaaaccatagacgtctgtctctctttttaacccaattttgcctttgccttgagagaagcaatgggaatcttagagagaaccttttcatcgaaaaccacatactgtttctgcaactccttcattgctttctctgccaatggatcaaccttgtcctcgtgtttctcatacaacattgggactgtgtgcaatatcacgaagcaaatgtacaccaaagtcaggaaattgaaccaattgcccaccaccgagatgatccatagaccgacaacaacctgacataacaaatctcatcatcagattcaggacaatgagtttacttgaagggtcttaatgggctatgacatactgtaacttgacacactgttgctagaagatacttacgatattatgttttgtataagtgatacattcacggttcaacagagaaaggttgaaatgtaactaatttccgatacaaacttaatcatttcctaaactgtttaactaaacacagcaaacgtcagcaacaaagaatgagcataccatcaggaatttttttaggtcccttcctaaagcaatgcttcgtaggataacaaaagcttggtttagttcgtttctcagagaagaagcaaccacaaggaaagcctcctcgggaacatggatttctggaatttgtggtgaagtcctgcaaaaatgaaaaaagaaggttttaagaccatttaaaccagacaaagaacaaacatctagggcggggttaacatgatcaagggtttgaatcttacttgttgataagtgtgtgagcattggaccacaaaaagaggcctccaagagcgagtatcgaaatgtgacacaaaagactcaacaaatgatactcaaccagctcgaacagaacccaaatagcagtcgcgacaccaagaacagcacctgatagttttttatccctccacaagaacacatcagcagctgcaaagagtcattgagaaacagaaaaatcagaatccctcagaactcagaagtcaataacataataaaccaataaagccaatttattgcattcatacaaaaattggtgtaacaaaatttccacaagttgcaaaattagagaaacgtaaatgtcttcaatctaatcaaccaacttaagaactctccctattcaaaaacattatccctaaagttcaagtcttcttttggatgcccaaatcttaatggatcgattcaagaaaatgcaattatgtaatcatcaccaagcgatcttatacgagtgtaactagaccctaacattgcagatcaagcatcaacgcatgttccaaatcgatcaaaccagagaaaaaaatgatagaaaaagaaaagacgagacactgaatatataaaacccttacgctttccaccaccgagaaccttgtgaacaggcttctctctgccaaacatacgatagatcttcgccttcacagccgaaggagaatcaggtttctcgtactcggattcagacgatgacgacgaatcgtgatggtgaatcttctcggagatcttctccatcagagattcctctgtcggcacagatttttcaatttcttccgccattgatttttgaaattcaatttcttcgattccccaaaattcaacacagaaaactcaaaaatatctcaacgtgaaggagaggagaggattaagcaatggcaaatataataggtttcacacaagacttttataaccacgagcctgaggttccaaaacccgaacgtcgtggttcggagttaatttttaaataaggtcatcaacggcgttagtattttgatgacgaaaacggacgttaattgacggagaagcagagccttgaaacgtgtaggcaacgataaggaagaaaacgttgaatggtgccttttcattaagtaaccgataccacgagtagattcacgacacgtgtcccatatcgtatagcgaaatttacggctcaaacttaattatgatgaagcattaaagctcacgacgtaatttcgcttgtatccccttaagagggccttctataatgtttgcctttgggcttttaatatattactgggccgtcaaaaaaataaaaatacaagctcacgacgtaactctctctttaagtaagcggctttgataggtcgagttattttaagttttaacatgtattaatctactactgctttttttattattcagatgtaatgtaataatgctaaactctattacattccgtaggtgatatacatctaattatgtatcctatatacaagttgctagaaagagaataaatcaaaatcaaagcgaggttaattacttaattacaaaaacatattaccactacgctccacaggatagtgccgtgtaggaaaaagcgaatttgtggactagtgtaagtcaaataacacattcgcatttcattatgactatatattgactaaccataattttcaaatgtattaatataaagtgttcacaccaaccaaccttccttaggattcgtgtgactaacgtgcgccttacgaaaaatataacagttttcggctatcatcgaaccagaaacatccaggtcacgtagaagaaatgcagaattgcttgaaggcaacgcttcttcaaacataggtatgttgtgatcggttagtttgaaacaaaaatcacatgtgatatatataaacaaaaacattttatctataaaaatgttaatttcatttagaaaagttgtcctagagtacactttaactcgaccaacatttggacctacgagtttacgacgttgaattcatcttctgtactcgctatgcaataaaaaaaactatactatcttaagtcgtaactctttttgttcccaactttagaaacatctatttccgacattcaacaaatctaatattttaactaaacttagtttccgacccttgaccaaaaaacaacaaaaaactaaaagtaagttgccttgttcaaactcaaactcttttatttaagttacacaacacggacgcgtattttattttgaaccgctcatattgataggggaaacggaaaaaaacgttcaaaaacgccaatagaaaaggataaattttgtaaggttagtaaacgattcaaactagatttcatttcgatgaaattaatggcaaactccacttttgacggattttttttaattacaaatcagtaaagttgtaatgaaacggagcaaaaataataaataggaattaccctaatttaggcgaatggatctatgtaataataatatcatcttcttgctctcctccgatcggccgcgtactgggagagaggcacaacttctgacaaaggcgttgacagaggcgttgaagtcggcgttggaagcggcgagttccgacaaacgggacaagatccgttgagtttaagccacgcatcaaggcaacacaaatggaagtagtgtttacactccggcatcatcctcagcatctccgcttctttatactcacataaacagatcgagcacgttgtgtctcctccgccaccaaagccatctgaggacgcggcggaggtatctttggaaaagtggaacttagggtatgagttgatgacggcttgatcaagtcccaccacgacatcacctgcttcgagatcttcattgtcttcctcggcgacaaagattatgcgggggaggattacacttccgccacgatcgcctgtggattccacggcggttgtgcggcggcgagagtcacggcaacagatgtatgaggataaaaggacggtcgagagaaggacgagaaaaccgagagctatggctatggagtagccaaagcctagagttgtgaggtaagagtggttgcctgcttgtggtggcgacggtggaaggggagggtggactaggaagacggaggcggaggaggcgagtgttgacatttgatggtaaagaagaagaagactgggtccatgtgggagagagagagaagagagtgatagagatttttatttttttatttttttgaaaatttaattttaattaatttagttaggggaagagaaaaagaggtgggtgggaattgcagctgatgcatttaatattgtttggaaactgaaatttgcatttattagtaagttaggtttttattaattaagtggcccaaccccaaggaataatatattttcttgttttactttgtaattttttttgtttattgtataaaatgtgttcgagccatgtaacgttgactgtttaacaatattcgtttgatgggtcctctttgaaaatattttacacttattcgttgtcatgtttcgttgatattcgttttggttacatttgagtaattcaaggcttcccactacaatttactaaacactcttggctcggggttcgtactaactaaggacccgaggtttgaaaaactgataatggtcacgattaatgagtatgtaaactaatcacgaagatcgtaggaaaacgatgtatttcttgtatctagatcatacaaaattacaactaaagcaaacaatgggttatggttaaactagcaaaattgtatgaatgaaattgttaaatcgaccagttagccaacgcgtactaactaatctacaacgagtcggtttagtacatatgatccaaagattttaatacgttaatggattagtcatcggtcaatttttggaacgttgatattatttatttaacgtagactttatgttcactccattcaaaatctgatcaactgtacaaaaacaaattttgcaagaagaagaaaacataaagaaacacatctattgcatcgtgctgataatcaaatgacccaaattttttaaaaaacaactagaacaagtagatagtgttttttgttggttttgtcacgaaagtttctaatccgcatatctcacgttgtctaaaaaaaaaaaaacgttaatcgatcgatcgtatgacgtatacctcaaagatcgatttttttcttgcagtcaacatcttgaatcgcctgtcccgtaatgttcacagccatcgtgcaattcatcttaacggtcacgtgcttcttcacgatccccataatcttcaccttaccaccaaccctagtgtaactccacacgttcacaagacccgacctacttatttctcgacccaaacccggatccgataatatccgatcaagcataatatcaaccgtcacgttcatcctcgaagtccgatgcggtctcgccttccccggtagcccatgcgcttcacccaccaacgttcctttgtagtatatatccgtcgtggtgttggagtacttaaacgacgccgtattcggattcttgaccgatacgtcaacgatcatcgagatgtttgtccccaacagttggacttgattagtccccgtgactgaatctaggccgttgaccattacgccgttcatttttatgatcgggtctttgactctgaacaccgtgaaaactaaagtcaacacgatcgtggttagaattagagatgttgcagtgacgcagattgagcatttgattctgtttctactacggtgtgtgttcttgatgttggaggcggattcatcgctcaccggaagtatggtcgccggagctagcggccgtacatgttcagaatctgccatggtggttttttttcggtctttatctgattaattacttctggtttatgtgatttatataaaccaaacttagtgatggaaagtgttgaattttatatgtcctgcctgtgtttcatgtgcaatcaattctttaaatgaaaacccaaaataaattttaaaaagtaaaagaaaaattaatgtaattgtcctaaccactaacacaactggggtcaattattgcagtggaaaaatgggaatggtattaaattgagtctgaatttaacggtcatataggtggaagaaaagtagaagctgcgtatcggtggggatgccgatttgcgccaattagaatttgccagctcattacacaaatttgacttttgcgtcaacgtcagaggattctttcgagaaagataaaaagaaaaaggaagtataacgtcgtatagaatcgttcccacctggaaactatttttagataaatagggttcaatttcatcaatttatgtacattgttttggttttaatgtattttgaatgtatacaagacacaactttgtgtttgagtcttccacaatcatttaaacagctgttttctagttcaataatttgaaagaatattgacagattatttggatttttaacactaaatgcattagttttagttagttcaacattccagtttgctcctaaataatctttcgcaattatatttagctggagacaaccatcttttttcatacacaaacttatgtttattagtttttttttttgtttataaacttttttttacatttgacttgcggaatagtagtggagtgtattcattttcatatgggataatatatggttcaaatctctcgacattcaggaaacagatttttctacgcatagcaggtaaataaagataaatcacacacacaattgaaaaacatacataattaataaccaataaaatccttgttgaaatcaacaaaataaaaaaaggattccagaaatgtattaatctccgatcgtctatgtttatggatcgtacattattgaaaattagattatgatttaagaaaactatatttgaaataaggtaattaaaagaagtcgcgaagggaagggagcttgatctctccctgagtagagacaggaatggtgatatcaccaacaacaggaatgtcgaaggttagcccaatgtctagttgatagtcaatgtcccagtccgtacacatatccttcatcagactaaccgctatgctataagccaccttaaccggtacgtccagaaccgtcgtgccgctcccaaccaacgaacccgggtccggtatcgtgcctgacgcgatcgtcctacgcatgccacaaacattattaatcagcacatgatgaatgtacgttacacctatacatggcgtgtgcataacgttacataaaaagtactgttatgaaaatgttatctaagcttaaatcctcaaaatacaaaagctgagaccatctatatagctttgtgcctttgtttccttgataacacgtgttattagtaatgtcatattatgtatacagtagacttgtgtaaatatatacattaggattgatataagatgctagatatcatcaatgcacatggataatgaaattagtatatgtatgtatatataatgcggcacaatgcgataaaaatacaattagtgagaaaatgagatctagccatttcggtgatgagaccagacaaattaccaacgaaatccatacacatatatattaaatactgttatcaattaaaaatagtcaaacattagatcggatatacctaattgatacacatttctattcattagtacaaagatcggatacacttaacgaaaaatatcacatatatatttttcatattctcaaaatttagatgatcaaaatatgtgtcacaaattctatttatcttaggctagatccggaatacggatactatcatgatatgtgtgtaataaaaagtgcacaatacggtgttagagtagatcagacggtacaagaagaaaaaaaagagaagatgaccttgtggcactcttgaggatgtaagagatctggcagatagggatggattgagagtaaggattcttgacggagaccttggcgtgataatctactccatcacgtgtcacgcctttgaaatcaacgtcgtccacggttgcttccggcgtcggaatattcgccagcttctccgcaaagaaacctttggctttgtccaacaagcttgaaatcaccgaagccttctcttccaccaccttttcatccgctgatgccattcttttttttttttttttggtgttgtttcttcaaaggatcagatctctctttgtctctctctctcttttctaaagtttatggcgctgtcggttctatatattttggtacctcttttaaggatgataaataccttaattgccggagcgtgacatttttgatttttctttggttgttggaaaaggaataatataataatttttccatcattagaaaaggaataagatcctttttttagagcatcatggtcataacgtgcgttcttacttctttgctcgtccgaaaaaaagatgaaacatgtttattatagaatatactacaattatattttgtatattatgacttttaaattagcaatatgttttaacttttaagcaatatcctaaaaaattaattattagttgttttactattatgaccaattatttttaatagattttaacattatcaaaacttaaactttaaagatatttaacaactacatgttgagtagtactactttctaaacattaatttttggtaaataatcccaagaagatgaaaatataagagattattttatcttcctaaaattagtcaaaacatatatattttataattttaaagattatttgagatttagaggtatacatacttaccttcccattgattgcatttgcttaagttgaaaagtggatttatatatggaagaagaaaaaaaatatgaaaatgtagtttttttgtttcttcttttaattcggcaatccatatttattagtacactttgtggcttcaacttcgccaagacttgttcgcttcttattttcggtgactatttaaggatgctgatcaaaacttgaaagcaattcatgtaatatatcggaactgacttcgtacatgtgacatgtctcattgacattgttcatcgtgtaaataaacaaaacaataatcactcacgataagccaataggtttattcaaacgaaaggaaactgatttggcttgagaaaaatctatggaaaccaaatccggttttattcagtttaccagacgatattgctctatgcctctctataatcatcacgtggtaatcgttttaccggaatattacaattgatttgtttttttattttggttatatgcttaaaactgatttataatcaaaacgagattgcaactatgaacatgcaaacatatatgattacaatgctttaatttgctccgttatatgaaccatggaacattagaccatctccaccagtaaaaataaagaaagtttctcaaaaacatattaattaatattttaatcaaaacagatacattaattattatttaatagttgaactaatagtgtgattacacctgtccaatcatccgagaaatttaactctccttctctcctactttttctcccttctctcatattttttttttaattttttttcttttgttaggtatctcattgagatacttccattggagatgctcttagaacgttaatatatatacaaacataattaggtgaacttagagaggaactgcaattgatgaagaagaggagttagggtttgcatgagctcctcacaaggatggttatggattccttcataagttgtctccacaatgctcgtctccttcgacagcctctgaacttgcttcttcacgttacacatgtgttgtgtgcatctataatagctccttttgatgatcataagtgagaagaaacacacaaaaaaacaatctttttaaaaacaatttcagattatttatgttaaaaagtttacctgggatacaagctgttcttgacggatttctgaccgtactttctccatcgataaccatcatcgagaatatctgcatcactctttgtgcgaaacgaaaatcgcggatttttcatcttcttatctcgagaagagtcgacgaggccattcattaatgaagaggagatatgatgaatcaacgaattgtgtgttagaattcttcgtgtgatttatattgaagagatatataaaaaggtttagaagccaactacattcaactacttcagaccaacaacaacaaaaaattccttcacgtcatctcacacgtgtgtgacttaaaaaacagagacatggtttggtctttacttgaactcctggaaactgtaaacagtagaatccggttttggtatcacaatgcgcaatctcataaaaaagaaccgaagctacgatcttaaaggagctcgtgcagaaccctcggatgctctccaactccaagagagttccaactagtaaccgcgatctcaatctctacatttctctatctaaacccagaaacggaaaaataaaaaaggaatcgcctttggaacagaagttcaataagatcgaaacagagactgggttaggctagagcctagagagaaacagagactgggttaacataaccagactgaaccaaaatccggtttaatatagtaaagatattttaaaactatctccgttgccgggactcgaacccgggtctctcgggtgagagccgagtatcctgaccagctagactacaacggatcttgttgatttcgttaaaatattgaatttatagttaagctatcacaattcctaacagtgtcattgctatgcttgatttgtgtgtgaaacccagaactgaatcgccacttgccagaatctaaacagcgtcctcactcactaggaattgaatcttcttaaaagtaaaattccttgttcttgtaaacacagacacagtcacagataagagggtttcttcatcttcacaacaatggcgtcctcactcactaggaattgctctcgcttctcaaaagccatctctgtccgtttcatgagtaacctaccggaaaacaccgtctacggaggaccaaagccacaaaacccaaaccaaagagtgacgctaacgcatctcagacaaaaacaccggagaggagaaccgatcaccgtcgtaactgcctacgattacccatccgccgttcatttagacacagctggtatcgatgtttgtcttgtcggtgactcagcttccatggttgttcatggtcacgacacaacacttcctatctccttagacgagatgcttgttcattgtcgtgccgttgctcgaggcgctaaacgacctctcctagttggtgacttgccatttggtacctacgagtcaagctctagtcaggtaatgttataaaattgaatctttttttcttctagatacctaaattaaacatatttgttgataaggcatgttcttctgcttaatttttgtgtaggtaattagattcttgattgcaatttcaatacctgaattaatcacaacactcagtgggacttacaatgttcaattcatttcctgatcaaatgtttaggtgattggattcttgataaaaaaagtcttaaatgatacattatgtgtcaatgtgtcattgcctgtgtaatcacagatttagctttagtacttgcttatgcaaagtagattctttacaagattttgtgtcaatgaaacaaattagggacctgattttgggtttaaatgttggcttcaggcggttgatactgcggttagggttttgaaggaaggaggaatggatgcgattaagctcgaaggaggatcagcttctaggatcactgctgcaaaagctatagttgaagcaggaattgcggttattggtcatgtgggtctaacccctcaggcgattagcgttcttggtggtttcagaccccaaggcagaaacatagctagtgctgttaaagttgttgagactgcaatggctttacaagaagctggatgtttttcggttgttttggaatgcgttccacctcctgtagctgctgctgcaacttctgccctcaagataccaaccattggcattggggctggacctttctgcagtggacaggttttatttgaaaagtttcgttctttccggttttgtgtgtagccaagagacaaatttgcatttctcatacctgttaattgttttcttggaaatgcaggtgctagtttaccatgatcttcttggtatgatgcaacatccacatcatgccaaggtaaaatcctgacacaattattgttttcgaaacgcattctcttgttcgttcgttcgttatcaacatgcttcttgtttcatgctcttatatttcacaggttactccaaagttttgcaagcagtacgctaatgtcggagaagtgattaacaaagccctaatggaatacaaagaagaagtctctaaaaaagtgtttccaggtccttctcacagtccttacaagatcacagcaagtgagctcgatgggttcttaaccgagttgcagaagcttggttttgacaaggctgcttctgcagcagctttagcagctgagaacatggagccttcaaagtgacaattgtatccaaaagcttgagatatattgtcaattgtacttaagacactagagaattatcatttttttcaagagaatgcaaattcatagagtacggttaaaacttgagacggtgcaaggttgaagaggttcaagcatggtttctctgttgcttgtccaaccgagaagaatggacctttgttttaatgcgacagtgatagtatgtttatatgtgtcatcttgaatagattcattacagatctctaagagcagagtatcccatattagtttcagaagcaagtttcatatatttacggttaaaaaaatctaatttgaaattgacatcattcttcatctgcgctagttttgtgtccccactaaaccacggctgggtctcagaagttgtttgaacagagcaatcttagggacattccaatgctccacgtgcctgcaagccaacattcatcaaaatatgtttaaccagcttcttcttcttcacaaaagatttcaaagttgaaaagagattagtggggtttatattaatgagctcataagtaatctttttacctgcaaattttcccggattctgtgtcgaaataatactccgtgtaaccagttgctgtaaaaacagatttccataaaaagacatagtaaaagttttgttctttttgtcttcattactaatcattgaagctattaaagttgcaaactttatcctaaaaaggctacaaaaatctgaaaacttttaaggtttccttgataaaataaatacctgaaagaatgggtttccatggaaacgacatgacacagctaaatttccaatgtccaattcctttatcctgcaaaactcatgatggagctctggtgagaaacaaaaaacgaaacttttactccgacatcttttagtagttgaccgtacctcaaaattctcccatttcatgagcttcatattggatttctcgataaggcttccgaaattagtgcaattccttttgaaacgagcaagacccttgaaggatccagccggatcagcgaattcacacttctcctcataaacctccggcgtcaaattacctgaaaactcagagatttcgatttagacaaaagaaacagaattcagattggatgattttacactgacctgtgacgaagtaggatcgtttaaagtcttgtttaatcgagtccacgacagctacacgaacggctcgaccagaacaatcaacaggaacctcaaagcctgtcacaatcggagaagtctccggagatcggaaaacagaagcagctattccgagtagctcagatccgtaccaagcgattttgagtagaacattatccggctcgggtcctttacttgtctgtggctcgtcagtaggattctgtcctcggcaactcactccagttgcttcgaatcggcgattagtccggaagattgaacgaccaccatcgccggagaagattggattaacggtggcgatggaatgaaaggaaagagaagctaccatttttaggattcaattttgtgtgattgattgatttaggagatgcgactttttgctttaaaatgttttaaagtatctatttgtggttaacagagaccacacaataaatagtgatagtaacgagttacacaagtaacacgagcataaatctgattcgctaaacaatgaatcatattacaggaagaatataaagttgaagtattctacactttacttgacaagtttatcctaagaaatctgcggttttgatcagctgattatgtctatggcaccgggtaacacctgaaactttctaggtaggaatccaagatgttctccatctgactgcacatagatacttccactgtctgtaatctcttcaacttcgatgctttgtacactacaagagaggtagcataaaggtggtgacttttctagtgctaaggtcgtttaaaggacaaaatgagaagaagccaaagaaaaatattaccttcttgaagtcacattgttaaccgaaagatgagtcccgttgtacagcttatgaagtttaagtacgaaatcataccatttgaagttttgaagaaccacaacctacagggaagaagtcaagactcaagagctaccatattcccaacataggatttgagattgaagaaaacgaatagttgcacctcaagatttccatttccagggatggcgttgggtgtgattttcattccaccaccaaagtattttgcgtttccaacgcagagagcagtgacctggggatatatttcccattcgcctccattgacctgagaaaataacagaatgcttttaagttacttgctacggtgcagaagggatttcgcagaaaaaaatttgcttactctgattctcatatcttggttatgatggcccatgaacgcttgtagggcaccaattacgtagcacaagtttccaaatttcttgtattttgaagcgtaaaatcctgcctttgcgctcctgcaagtaatgagcaacaaaaggacagatttacaaccttgcatcattagggatcaatcacagatgaaaatttccacgatatgcttacaaatgaacatcagctacattgatgaagtaatgcaaatcctttccttccttgtcgataacaccaacatcaatccgtgatcgcatccctgagaaaatgctggttatgtgatatatgagacatagatagacagttcagtagtaactaagtcctaactcctcaaatgaattcagtgacatacctctagcaatgcgctccactgcttcacaaggatcattgttcctaaagaatgcaggatacacttaacatatggctcaacataagtttcaaaaaaacacaacaaacagaagttgcaaaaactaaccaaccaaatgttctagcaaaatctgagccagtacctaagggaatcagctgcaaaataaaaaggatggactaagattgtatgttgtaactccacaagagatatacacaaaaacaagtcaaaaagtcaactcaagctactcacaccaagtgcagtcgatcgactagcttccccactgagataaccgacaggtttcccctcccaaaagaaaccattaacaacctgtagataaaaaaaaaaaggacagaatgagtggagctaagaatctccagagcgcagttctagcaaccaaaaatggcaattcctacctcatgaagtgttccatcacctccaaccgcaatgacagcatctgcaccatcccttatagcctgagaggataattagaagcaacagaggatcatcataaaaccaaatcgacaagacagagaatactgtacccagcaaagtagtatattactttcactactccttacctctcttgtaatgtcaatggcatgagaaggacccgatgttaataattcacttacctggagaaacaaacaagaagacacgtaaactcagttgaaggaactgaagaaagcgaaaggagatggcatcactaacacaggggcacaaaaaggcaagtgaatcaaaaactcacattacagtctttaccaagacgagatcgaaggtgaggaagcaacttcttccattctttagctgttctaccattagcacctagactcatataaaagacattgaaaagaatcaagagacgataatactaaacctcaattccacatcgagattgattctcatattaaaaacatcatttttaaatccaatgaatttcgaatctcagttttttttcatccagtgagtaaaagggcaaacacaccttgagggtttacgacgaaaacgagatcacggaggccggaggaggagacgacggcggcggcatcgccaccaccaccaccgcgaaaggtgaagcgatcagaggtaatacgttgctgtttcctaaggaaagaaggttgtttcgccgtgaaagggcaaagtggagtgcagcaagtggatcgtagcattgtatggccgcaatttagctccggtcatcgccgttatcaagttcatcgcgcgattagacacttacagagaccttctgtttcagcgagaggctttttcacaacgtttatgggccgttttttatcttcaaagttttaaaaaggcctattttatctagcacaatggtggagttgtctcaaagtcaataaggtattcaatatcgacgtaattcgattaggaatcttttgggaaaaatgccctttggacctgatggcccataaattgaggtagctatacctaatgggcttaaagaaacaagaaaaacgattgagataaagacagctctttagtctttgtccggatgtaaattaaaagtggggtccatacttttgtcgaccgatttgttccttgacagctgtcatttgggctttgaggcccatgttttacgcaaatccaaggaattcgttacgtaaaacaaataaagttgttatgccttttaaaaaatattcacagttgctgaaatttttttgatgaggattttacaattttttaaaaagcaaagtactaccaaaaataataatgaatcgtcaaaattaattttcgattaaatcttctcagtttttatttttaaaagtaataacaggagtctgtaggacgtggtatgtattagttagccgttagatttggttataataattaaaataaacaaagactacgccaatcgaccaatgacttattttataatcccacgaaatcgtctcatttttggcccttcgataaaacttttaattattttatagccgtccactttccgctaagaatttaactacacacaaggctgtgaccaattaaaacgtaacagccattcactaatggtatacttgtaaggttgtaactagtttttatgtgacgggccgtagctttatcaaactcgacctccgccagacatttttctcagccgatcgactcagaaaattcaatgaagcattagaagaatcatttccacacgattttccctgtgatttcttcatttccggcgacttaaaacggtaagtttcgtggaaattgagtttttttttgttatctataattctccttttattgtgtgtgttcttctgtaaatcgaagtttgtgtgtttagttctaagatagattttactgttcgatgaagagtttgtaccgaacttctgtgttcaaaacttccgtgtagataattaactcctagggttcttctaattttggaaagattgaaacttttatcctaattccttggttctggacatcttcaagtgtagattatggcttagaacaattgattatgtgtttgttttcatcttcaaattttgattttacatcatttcaataaaggtggtaacttcttttttttcaagatctcaaaagttgtcagctttttgggactcttaaggttgggacttgggattgtattgttcctcgattagtccttctatgtgtggcaacaacacagaagatacattgagttcacagcaaatcggtttgtatgattaatcattatcattattctaacaatatttctcttttcattttcaggtgtctagcaaaatgagccgaccacaagatccaccccgaggtttcttcccatttggaaatccctttcggatgttatcatcaaagggatcagatttatcgccatggctactttctctattgaacggctttgagctacgtttggaagagagactgaagaaacttatgcctaagaacaaagatgacatcctcactttatcctggatgaagctagctatggagtcactctgcgagactcataagaacattaacactctcattactgatctccagcttcctgtctctgattgggaagagaaatgggttgatgtttacctcaacataagcgttaggttactagatctctgtaatgcctttagctctgagctcacacgtctcaaccagggagatctcttcctcaagtgtgttctgcacaatttacaatcggattctggggagaagtatctccaggctcgatcttcgcttgatagctggaggcaacatgttaatacaaacaaccctagaattgaaaactgccgtgcggttctagacagtcttgttaaatctctgagtctgcctaaagtcaagaactcgcctaaaggaaaggttctgatgcgagctttttatggtgtgaaggttcaaacagtttatatctgcagtgtatttaccgcagcctggtctgattccaccaaggatcttttcgatttacctgtctctgaaaaaccattatgggcaaaggtctttactgatatgcagagtgttgtaaatgctgagatcagagacatgttgtcttccggtagaaccacgattctcaaagagctggagagcgttgatgctagtgtcgagaagctatacccgatgatccaagatggcgttgatcctgtcgaagttgaattcttcaaagataatgttatggaattggggacacaagctgagaaattgtctcaagggttggatcagttactggaggaagttgatagtttctttaaactgactttgagagggcgcgatgtgttgctctgtaatcttaggtcaagtgactcaatctctggcaatgcagttggagaagatgtagactaaaatagtgaggtaaacaaacaagtttaacccttacaaaaggcagctttaggttctataaatagtgttttctcttttttctttgttttgagtccatctgtcgagcttgtctcttccgtttaggtgtgttggtcttgtatgtgtgactgtatgaaatcaattctgcaataaaatataaatatagaatacatctgtttggcttgaaaaaatcactgctctctttgtagtgatccaatctttctaaacctgtttcaatcaaaggaacaaatcagaggctttgatctatagttaagtgcaattagtagtaacaaatgaaaaatgcaatattgagctaatatcgagtgactctgcttcttgttaccatacacgtatgtaatctttcatgatctttagattcacgggtcccttgagagatcttttacagttgaaaaaagcttctctcttcacatggatttagtgtcttcaagagatactttaggagatccttcaacttcaacaaaagcccttcttcttggtttctctcgttctcggtctgatcattgcatcatcatgtctggagaatcaagctctggttctaccgaacattgcatcaaagttgtaccgacacacggtggccgctatgttcagtacaacgtttatggacaactctttgaagtttccagaaagtatgtccctcctattcgtcccattggtagaggcgcttgcggtattgtctggtaagttcttttgattctttgtctgataaattatgaaagcgttccttctattgaatgttcacaggctcttgattcttgaatttcagtgctgcggtgaactcagtgactggagagaaagtggctattaagaagatcggtaatgcttttgataacatcatcgatgctaagagaacgctacgtgaaattaaacttctcaggcatatggatcatgagaacgtaagccttaagcatcatttctcacatttgacaacatcttttaagtttctcaaatttgctagatctatcaagtgttcctgatcttcagggtcaaatgctctttatatataatttcgtttactctaatcttcaagcctcggtttgattctttaggttataaccatcaaagatattgtaagacctccgcaacgagatatcttcaatgatgtctacattgtctatgagttaatggacactgatcttcagcgaatcctccgttctaaccaaacactgaccagtgatcaatgccgtgtaagtctctgtgttgttctaatcatttgtaaagtcatggaactctctgatttgatctttattctatttacttgtcttcctgttacagttcctagtataccagctcttaagagggctcaaatacgtgcactcggccaacatattacatcgtgatctaaggccaagcaacgtgctacttaactcgaaaaacgagctaaagattggtgattttgggcttgcaagaacaacttccgacacagacttcatgactgaatatgtcgttacccgttggtacagggctcctgagttgcttcttaactgctcagagtacaccgcagctattgatatttggtctgttggctgcatactcggcgaaatcatgacgggacaaccgttgtttccaggcaaagattatgttcatcagcttaggcttataacagaggtataccagtaaagtaaaaaaagcatcagttttacacttttcttaaactgcaatgcccaattctgatttcacttaatatccatttcttgatattagcttgtaggctctccagacaattccagcctcggcttccttcgcagtgacaacgcaagaagatacgtcaggcaacttccgcgatacccgaaacaacagtttgctgctagattcccgaaaatgcccactacggctatcgatttgcttgagagaatgctcgtctttgatcctaaccggcgcatctcaggtaacaaacaacacaaagatccttaaaacattcatgtggttttttgcagtttgcttttggcttatcaattagacctgcatgtgttgtgtgtgtagtcgatgaagcccttggccatgcttacctatcaccgcaccatgatgtggccaaagaaccggtctgttcgactcctttcagctttgatttcgaacatccttcttgcacagaagaacacataaaggagcttatctacaaggagtctgtcaaattcaatcctgaccactgagagagaaacatgtttgaatgatttgattcctttttaaaagtctgctccgtttggtttgatctaagattcctttatattgaatctaaactcattttatctttgattgaataattgctatgatgatacacacatatttatccatatcgtaagcccctgcagagctcaagtttctttaaatcaaatttcttaaactattgatcatatatgatagcattttaaaaaaattctgtttaccaaaacagagtattatgtgtaatagttcgtttagtaaaattacagtttttgaacttattgccaaatagattgatcggaagttgaaaccaagagttttgtcattgtcttgatcggaaatatcacacgcccacacaacgaagctttctctgaaaaagtactaagatatgtatgtatgttgataattatagtatttttccttttgaagaaaacagagaacaaatgtactttaataccgttgtctaagattttaaaacgctgtcgttgtcgattataaattagacattggcgctaaaagcccattaatatcaaggccctcaccccaattaatttaaaagaaattaatatcaaagcctttttgtatagagagagacaaaagataaaatatctttttttcatgggcagtttctattatgggcttggtttggcctaatatatatctgttatttttctgttgtggggcattacatagtccatctaatgttttgtcttgttcaataaaattatctctcttgtgaaaaaataatataaataagttcctatatgactcttgtctctgaccaacacgtactatattattcatataaaccagataaatattaaaccgaatatctaagatcctatctcgccgatataccgtgtaaaagacacgcgccaagattcttcattaccaaaaatcccaatcatttaacaaccgttcgatcagcgcgtaactacaacacttccgttgcggcgcgtgagataaaactgacgaaaaatttaacaaatgtaaaaaaaaagtcagtattcaacaatcaagacgacgaaaattctctcgagtgatgatgctctctcttcttcttcttctactcacactaataagagtctaaaacccttaattctcagagaaagtttcacctacaatggcagagattttgtttctgcttttaagaactctcgtcgtgttttcatgtgctctttcgatctgtaattgtcttcaagatgctgcggacaataatggaaactttttcacggtctcgagcttcaggtaccctgaatccgaagtcagaccctacgatacacgttacatcagaggtctgttttaatctgagattcaagctttttcagctgctgaatgatgatttgaaattcagcaaatggaattggatttgttatatctgatcagttgcttctggattatgatcattttggactatcttcttttggttgatgctatctgattctctgtttgattccgtacagttgatttgcctccatggttctcatcattgaatgttgctattgaatctgatgtagacatcgtgagtattacagatctttctcctccaaattttgtttttggtattcaaataaatatgtaagtaattgctatttattgtatgtagactgcaaagagcatttcgaagatttccaaaagtcttcttcctgttatatgctttcgagatggtagtcctcctctgcctgatgcctcaaccaacgctcttcaaggattaggtacgatttaggtaacaacatgctagttagcttcttttgtctggtcaaagagatcatataccttcttactattttagggaattgagaaagtttttttatatttttttgatgttttgtagagctaggacggttctttaatggatcttttgaaagagctcaagatagtgagattgcacaacagtgttaccctatgcagaagaatataaccttgagattgaccaatgaacaggttttaaattacttcttgtgtgttaggacttttttagatgatgagtttcttttctttttttaacgttattgtttccagatatctcctggagcttggtatgttggtctctttaacggaattggggcgactaggactcaggggaaaatggtaacactccctttataaaacttctgcctttagtgtttgtttgttctgattttgatttcttataatttggatactgcacagattgttcgctcctctgcgttttcatttagtgccaacattagtgttgaaggttgtaaaaccgctacaatgtgggggcctttctgcaaccagactatttatccgctttcatgttctcggttcgataaccagacagcaagtgttatttcttgcgctgattcttttcctagttcttgtctgactggtgctgaaacgaagacatatgctttagatgtagatggaatagctgaacagttagttattatggcatccaatgtcaaagtagattccaatgaaagttatctcatgtgttacgcccgttttgaagcctttgcttcagagactctgcatgattacgctgctgatatacataaagttcccttaattgttaacaaaccgaaagctggtcgatggtatatagttattagtttatctggacgggagaaccggtttgcacagggcacaaattccagttctagggtctgcttttccattaatgttaaagtactcggatgtcctgtaggaaaagcaggaccaaattgtgggcagcaaatctacattcttcaggtaagttgctctaaaagcttgtgagtatgtcaaaatcaagattgagttatatacttattagaatcgttgaacacgatatattttatgcaggcagttatgaggagaggatggttgacaccttttcaatcatattattttccggtcaatgacgcttcactttcaggctcgagcacaaatttccccctcgaacccatcgtcagcaacttttcctctattccagaattagacacaagcacatggacttattttctcatgaacatccctcaaggtggttctggtggacatatccatttcagattattatcagattccacaatacagtatgaagtatatcttagatttggtggattgcccactattgacgaccgggattactattatgtaaatcgaacaagtgccagccgctcaatgttcttctcattgtataattctagcaaagaaatggttgatttctacatcttgtatgctcgagaaggaacctggtcatttgggttaaggcagctcattgactctaatactcctgctgcttccagaggttcacctactttagtatctctttctctcgaaagatgcccgagagggtgttcgtcttatgggcaatgccgatatgcttttgacgctaatggattgacatcttacaggttttttatctatctcgagtctgccaaaatatgtaaacatgatggaaagtacattatcttgagatcaaattcttgtgttgtgtttcagcttttgttcttgtgacagaacccacggaggctttgactgcagcattgaaattgtgtcacaccaaggtatcttaatctatcagtgtttgaaactttgacaacttttctgtatactcatgtgcgtaaaacctgatgcagaacatattgttcagtctattgctctcatcgcatcaaatgcagcggctcttttgccagcttactgggctcttcggcagcgggtaattttcttggtttaacactttaatccggggctcttgttttttttcttttttccatctaaatgctgctgattcatgtcgtaaacaggagtatccagagtgggttctgtttacatccagcggaatctcgagcgctctgtatcatgcatgtgatgtaggcacctggtgtgttttaagttacaatgttttacaggtacgggtagttgagagctgcatcattgtcatcttctatgtgacattatacttaattacgagatggtaatttttttgcttcagttcatggatttctggctctctttcatggccgtggttggtacatttgtgtacttatccacggctggtgaagcagttaaaaggacaatacacacagttgttgccattctcacagctttattggccttgactcaagcaacaaggtatctgagatgtttgactcaatggttgtgataaatagcaccttgatactatttctaaacatttacattggcttgctatctttttgcagggcgtcaaatattatcattgtgttagcaatcggttcactcggtctcctcatcggatttttggtagaatttgttaccaagtatcgatcatactgcgggtcggctggattttcattgaacatgctcgacaggtaaaataaggaagccattctgtttcctgacttacgccgattacctactgtgacaaaatcattatttatctgaggtctgtcatattcttgtcataggccacgggcagtcaaagaatggtttagtaatttgatcaagacgctcaagaaacggtttcgttggggctttgtggcggctggtcttgtagccttcaccatggcagccataagtttcaaagtagaaaccagttcgagctactggatgtggcacaggtgtgtgtgtatgtaaagtttatcaaatatgaataatatcgattgtatcacttttctgaaggttggcttatgaaaattgtgtgcagtatttggcatttcacaatctacacatcttctttcttcttcctctgttcgaagattgcaattgtaaatcacgagaacctagcccacaacggagctgacaactacgagttaacaaggcaagactcgctatcaagaaactaagataagcataaagagaggcctttactgattttttttgtatcttgtaacaagacatggtgatgggtaaatattctctcccttacttagattctttcgatatagaatctgaacctcactttcaacttgtatctgtaatcttgtatgtttatacactcatagtgacatgaaaagatcactggagttgtccagttgcatcatttatcttaggcctaggctatgtaatgttttggtacaatgggaggctttggcgttcttgaacaatctttacttccatggctttttaagctgactaaagattgatgtgttcatggttataattgctagattgagtagtcccctagccaactgcaacctggagttttgggattgtagcagtttctcctctctcttttacgcagtagagccgcttgattccaatggccttcagagacataagcgtttgacaggatggagtagttcacaggtttggtaggttcaatttcaagaagcttctttgcaccccatttcatggattctcttttctcatggatgttacatcctcctgtgaaagctgccaaagcatgtgtgcttggttctgtgggcattgaatttaaaacatcagaagcctcgtcgatgaaacctgctcgaccaagaagatcgatcagacacgtgtagtgttcatcctctgcttctatcttgtaaaactcagtcattcgtttgaagcaacggagcccttcttgaactaatcctccatggctacaagcagacagaacctctaaaaaagtgatcttgtctggttgaagtttctgcagcatactttcaaacatttgcaagctttcttctgcgaatccatgagaagccaaagctcctatcactgaagtccatgaaacaagatcaggttctcggatcgaatgaaaacataaaagtgcttcagataaatttccattcctggagtaggaacttatcagagaattagcgaccgacaaaaaatctgctgagccctttttagtaaccatcgcttgcacttgcttaatctcccaaattgcagaaaatttggcgcaggaacttagaacacttgcaaaggtaagctcatctggttgaagattctcaaggagcatttgaccaaaaagtctcatagcttctcttccttctccattttgtgcaaaacctacaatcatcgcattccaagacactacatttctcacaaccatcgattcaaaacactcccgagcatcactcaaatggttactcttagcatacatattcagcaatgcagtcgccaccggaatgtcgaattgatatgacactttgaagagaatggcgtgaatctgcttcccttgttcgatcctgcatgcactgagaagactcgagaaagtaaaataatcacccctgaatctgtttttgtcagaacccatcagcttgagtaaaccaaaagcttcatcaatcataccgttaagaacatacgacgaaactaaagcgttccatagcactaaatctctatccaaaaccgcctcaaaaactcgtcttgcttctacaatgagaccacatttcccatagaaatgaactagactagtactcggaaagcaactcgattcaagaccttgtttcaccatcagacagtgtaattggataccagctttcatattggtcgaatcagtacacaaccgtatcaaccccatgaacgacacatgatccaaactcacatcagtgaaaagaatccgactcaaataacaaaaacctagatgagctctgtggttggtgtcaccgtctcgttgaatgaccccgtgaatcagtatgttccaagtaacaatatttctcaaaggcatttcgtcgaagagcttatctgcatcatcgaattctctgattttcgtgtaagcttgcaagagcttgttttgaagaaacagagaattgtaaatcccttgttttaccatgaaaccatgttcttgtttcacgtcagagagatgatccaagctagcagataacttcgatacagaggatatagctacaggtgaagaagaagaagaaggaatggttctaatgttttgcaaggatgataagtggttctgatggttcgcaaggaagatccgagttgatcggaggaatgtaaaacgcatctctcaaacaaaaaaaaagagacggcgtggcgggaaaattggttttacatcactgtaataataagtgactctatctatattctataagagttgaatttttttatatctattttcataactgatgatataaattttgcattagttaatataattgacgttaatatttacatcatttgtaaataattgatgttaaaattagtatcaatttaattaagtgatttttaatattaagataaattagacgattaaatcttttagaagtacatttgaagttgtaaaagcattgaaacttgatttgataaaattaatcaaactgaaagtttcttaagctatcatcacttcttagcgagttaaaaagaatatattaattatccaataattatatttaagactttaacagtattttttcagaaattaagaagtaaattaaatattctattattattcttctaaagaagcagtcttaaatgactattcaaattttccattattgattaatagccactcgaacccagagctagctggttctccccgaaatgcgttgatttaaataaaatagaattaattttatattaaaaatgtacatcaaaatcttaaaataaaacttattttgcattataaaaataatctaaacatgttacaaggccccaaaaagagccaataaaaccacaaggtgcaacctctcaatgtctcttgctttttggtttgcaaaaaaaaattaactcaaccagtggtgggttaaataattaactagagttaaaacgtcatatgacagctaatatatatttgatggtatgggtctctctctctttcattttccaatgagtctctttatatataaaccgtcgtgctgcttcattcaataaaacccattttgtctacattttcttaataccagcagaaactacagaaagaagatttatataaataaaaaaattactagacaaaaaggttagtgattccgcaatattataatctaatcctcttcgtttgcaagtttcgtattttcacattgtttagtaaccctaattttgggggaaaattagtttattcgattttttgaggaataagggtctgtatctgtgggaaatttgatttttgaccctaaacttcttcttcggtcaccatccatcgaaacccaaacctcgaaagagagagagagaaatggcgggccaaggggaagtggggaagccggtatagggttttgccaaagggaaaaaacttccttaaaatttcgattttttttatgtttcccgcttaaaaaaaccctaattccgccatggaatctctgaggtcttaatcgtaagttcgtgattctttagttccttgatcttcttgggatttcatttttcgtttctctttagattactgcttcttcttttttttgttaggtttgttagagataacgagaaatgggatctgttaattgttgtagggttcgtagttcgttgttaatggcgggttggtcgatggtagccgacgaggatgccgtcgattatagcaagactccaaagagtctcgatgcgaataggtctcctgaaagcgttaacccagaatctacagggtttgaaaagaagattaaagaactcatctccttgttccgacctttgcttgattcttttctcgctgagttttgttcggcggatggttttctacctcttcctgcgatgaccggtgaaggaaggaccgttgatttgttcaatctctttttgaacgtgactcacaaaggcggattcgatgcagtttctgagaatgggtcatgggatgaagttgttcaagagtctggattagagtcttatgactctgcatctgcgaaattgatctatgttaagtatcttgatgcatttggtcgatggttgaacagagttgttgcaggagatactgatgttagtagcgtggagttgtctggaatctctgatgctttggtggctagacttaacggttttttatctgaagtgaaaaagaaatatgagctgaggaaaggtagacctgcaaaggagttaggagcagagcttaaatggtttatttcgaaaacgaagagaagatatgataagcaccatgttggcaaagagtctgcttcgaatgatgctgtgaaagagtttcagggatcaaaattggcggagaggagactggagcagataatgatccttgaatcagttactcaggaatgctcttctcctgggaagagaaaacgagaatgtcctttggagacattgaaatggttaagcgatgttgctaaggatccatgtgacccatctcttggtattgtgccagatagatcagagtgggtatcttatggaagtgaagagccatggaaacaacttcttctgtttagggcctcaagaacaaacaatgattcagcttgtgaaaagacttggcaggtgggtatataggtacagttattccataatctgcagttactggtattaaaaaaaaaaagcctataggtagatgcaccaactttcctccttctatgtcgatttgaaaattcgttattgattttaactgtggtgatgtgaacttttgcctgtagaatcatgaattgcatgtgtcattgaagcattctaagaagttactagtagaaaattctccatcagattttagcagaagaaactcgattcttcataatgtccgcttccctgtatccaacaatgaactttctcgatactgtctcactgtacttagactgtgaaccatgtgattgaaatagaatctaattagtctgatggtgattgtttgtcagtactctctgatttaaccactgttcttccatgtttatgccattcaagtcttgataaattgctcatgtgtttcagaaagtccagaagatgcacccatgcctgtatgatgatagtgctggagctagttacaatctaagagagagactgagttacgaggattacaagaggggaaagactgggaatggctcggatataggcagttcagatgaggaggatagaccatgtgctctagttgggtcaaagtttcaagctaaagtaccggagtggactggcataacccctgaaagtgattcaaagtggttgggcactcggatctggccactgaccaaagaacaaaccaaggctaatcttcttatcgaaagagatcgtattggaaaaggaagacaagatccttgtggctgccataatccaggatctattgaatgtgtcaagtttcatatcactgcaaaacgggataaactgaaacttgaacttggtccagctttctacatgtggtgttttgatgtcatgggtgaatgtactctccagtattggacagacttagaactgaagaagataaagtctttgatgagttctccaccgtcacttagcccagccttcatccatcaggccaagatgattcttccttcgaagagcagaggaaaaattgtgagctacttctacaacgtgacccttttgcagtacagagcaagtcagagtagaataacacctcacgatatagacagtgatactgatcaaatattcctccgcgcaacagagaatgaaaatccagcccccgaagcaaacacatttcagaaacccgccctgctttcgcctaataaaaaaagatgtcgatagagctatcacccggttgagattcaagtaggagcagctcttttagttttcttcgtttttggggcttctattgccattgaaactgctttagactctgtggggaaaaggcttcataatagcatcttcttagcaaattctggttttagttttgaggtaaatacttgcatctcttccttgatgatcctacagtaggattcctttttgttggcattgcttgaaatgctttgcggaaactggtgaatcagagagatgatttctatcagtacagtgagagaaatttggattagtttggtgaatacaacagaggcaaaatgtaattgctatatgtttttttttctgtttttttccaaggaaaatgaagaaatgagtaaatctctcttgttattaatcgagttctcagtttcatgatttcgactataaccccctcatcacaagataaatttaaacctttacacgagcaaagttaatcataaattcaaagattggtagcttattgggaggttatataacactactaaatgatttgctatttttacttagagaagcataaaccattttctgtatcaaataaatgatattttcttttgaaataatagtgttaaggattttgaagaaataaaaattaatttagttacattgtacaatgtgattttcttcaggaattcttattttttaaaaattaagttaaacaattaaattcagagatactaattagttcatattgtagtttagagagaatacaattgtatttaaaccaacaaaactatgataagatttgttgggtcagatattggaaaaaggactaaaaattgtcatgatgttttgggccaatgattcactcttcggcccataaaggaacccatgaaaaatccagatcatcatagttatcccacgcgcatgtaaatcgcgttgttaaaagcgcccgtttttcgcagtctaacccctacggaaattggcctaaaatcaactgaatccaataatttggagtccaagggcgcgtgagctaatattctcttcttttctttctttatcgtttttttttttttttttgcttaaacgatatttcatgcctaattactctttaaaacctttttccctccaattttctttaaattactgatcattattttatttgtcgcaactaaatttttatctactgaaattagtaatggtattattctataaagctaaaccgtgtatgttaagagattggatagggttaatgcatgtggacacgttactcatttttcatttaaaaaaaagacatgtaatttgttgtcctcacgtctactatagtcgtaactcccgtaagtttatggctcacgtttctcttaaaatcattcattcttttggttataaaatactattgagaaatgataattgtaggataagtcccaaccccaccatcattttccttacaatatcatccgttgttttattgtaataaatcatcgatgtccatttttatattttatcgtagtgtgttcatgtttggatttgaaaatggaatatttatgacgacaacaacaacaacaaaagaagaaaatgaaatatattagtcaatattaactaaatgttctttcacatagacttatattgaaaaatataatatatgtccattttgatttttaaaaaagtaactacagtatatggaaagtagattaaaggattaacaaaaagaaaagataaagataaagcaatgaatgaactcattttttggagaagattggagattggaaggtttcggaggaaaaggtcggttttaacaggggagcttttcttattgctcagagtgttgttaaaggagataggtttcaatcttatgcggcggttggacatccttggtggctccatcaactatttgagggtgagagaatctcttcctaggccttgtttctttgttttggtttgtttgaccattgtcaatcttcggtccttttggggaatggttgtttgcacgactattcttgtaaccttaattggtctttttgtaaaggttctgtatctcaaacaatattcatcaatatatcattatattggagaaaaaaaaaaaaaaaagataaagcaatgaatgaaagacaaaggcaaaagggtaaaaatggaattttgagggataaatgaaagtaaggcaaatgtccatttcattgatcttttcttataatatcatattttttctttcattttggaatctttctctctctctctctctaaaaccagattcttaatagaagaagaagaagaagaagaggaaaggagaaatctgccatggcgtcgccgagcaaacgtcgagagatggatatgatgaaactgtgggttcattttccaattgattgaattatatctctagatttattctctggggtttttcttcttttttgatctgttgatgaaatttcttcttcttcttcttcttcttaatgatgaatttggattaaataggatgatgagtgattacaaggtggatactgtcaacgacgatttgcaaatgttctatgtcacattccatggacccactgacagtaattctctctttgccttcttctttttttttttttgcttgcttataagctacttgttgaaatgccttaatgaatctaaaaacgagtctttgtttgatttcttcttcaaactcaacttcagattcatcaatgataggaactagattgaatttggattgttcatagaagcaaatgatgaatctttgatagaaaacagaaagtttaagtgtctattttgttgtggtaaggtctttatcaggggggtgtatggaagataaaagtggaacttcccgaagcttatccatacaaatctccatctgttggatttgtcaacaagatttatcaccctaatgtcgatgaatcgtaagtgacaacattccacattttccctttttcactgcattacatgagctgcatatgtcgacattgtttagtgttgttttgcgtactcttatactcggttttgcgtttgtggcagttctggtgctgtttgcttagatgttataaaccagacttggagcccaatgtttggtattatactaattttttcacttgttttgagtgcctgattgcatccatattgaagttgtgcttgttttgcagatcttataaatgtgttcgaatccttccttccgcaactgcttctatatccaaacccatcagatccatttaatggagaagccgcttctctgttgatgcgagaccgtgcagcctatgagctcaaagtgaaaggtaaactcactctcttcttcccatcttgcttattctctttttaacctataatattgacacttcacaatctttcacctttgaagaatattgtgagaaatatgcaaaaccagaggagattttaagtgatgatgatgatgatgatagcatgagcgaagatggttcggactctgatgatgatgacgacgacgaaatcgttgggaaagccgatccatgactgtttacaaatcaatctttctttgcactttcattactccatcttcaactttaaaccagtaatgctcattgcaaagaggagagaagctttcctctgtaaatttgtaaagacttatcattctttaggactattgaaatctcttttttttaaacagtagataaaatgtaacaatttgccatctcacaccaatgaaacattaatccatatctcattttgtttgtcttatcctccaatttttgtttttttatacatgaacatatcggaagatgcatattgcagacaaaaggacattcctctaaaagtttactataaaatttcggtattacgatctaaagagcaacataaacaagaaaaggaatcatagacctacagaattatttgattactaaggtcacagattcactgctaaattgctttcacattgaatataagcaaaagagccttaatcctctcaggaaccaacaagggtccctctataaatggctaggccgtcttttaccagaatctgtccttaacctcttcaccggatttgcccatcccacagaatcaccggccgcaccgctgttgtttggatgagtgggttggtttggccaccgctgctgttgtgctagccttgtttcccttggaactccaccagacacaggacttctaagaccacgaccaatcattgctggaggtggtgaaactgggctgctggagccaccagttcgggttttcggaccagacttctctcggtctttcctctttttcttgcagattactaattcccctggatgagctaatattggggattcatcagtgtggcttgttgtccccccaagctttgtttctttctgcggtatctgtactctgatccttgagttctcacgttgttgagatctctgaggagagcttggctcggtttccggctcgtttactaacttttgcctcttgccttggctaattcctgctcctcttggggttggtgtagacaccaaagttggggctgagccagaaaaggaaagagcattccttgcttcccggaaatctgtgtctgggaaagacatctttaatagatcaaagaacagattgtgaaccttctttgcttcagatctcacctgcgaaaattttgatcacctttaaatccaattggcttttcaatcaaacagcaaaaggaattcatttttatttacaatgcaaaaatcaaacctcatgtgaaaacccatagaattgcattgctccccttagcattaactgcacgtcagatgcgagttccataactcctgcatactctagtctttctacccggtggtctatctctcgtagttccaaaaggttatttacacctccagctgcataaccattctgaattctcttccacaaatttgtcagcataggtacaatctgctgaccttccttgtcgattctcctctggagcttgctaatcacgattttgcactgcaaagtccaggaccaaaatagttcagactaacgaaacaaaatagatgcaccaaaaaatatcaaccgaatgttacaatgaagtaaattccatttaacagaacatacccgtttctgtatgatgtgggacattcttgcaccagcatttgaagagctaataggactagttccatcccatgtttctctggaagcttcagcgttatcctccacggtaagctgtgtagcattcaatctaccagattttggtgatgagacatggagtttggaagtactagctaccttctttgcaggtacactccttagtctcgaggacgaatcactctgatcttgtcttgaactatgcgagtcaacaactgtccttaactttgatcggtagctacgatccacttgcaatggctgagctgcaggcatctcactaccgtcaactctttctgccgtctgacggggtcttagacgaatactccgtttccgttttatcgtaggttgcagaacctgttcttcatccccttcatcacggtcatgggcccaacttcctgatcgttggagatctatgtgagaatcccctgatgctgctatttccccctcttctaggtcatccagctgttcaacataacggaaaaagcaaacattacacaaacaacagagaagaagatagacattcaagatagatcaggacatcaggtacctaccagtcttttagagacagaacctggcctagtgtccaatgcagacaaagagccaaacttttgtgaagaaacaggagatgccatttctttcgatctatggctctctggagaagatcctgacgaaccagcatcatcacgaggaggattttttttataactaccagaacccggaggataatcataaccacagacggggttctctccatcaaattctcccttgttggtttgatgatctccaagagcgccagtaagttcatcatcatcaaattgtcgaatatctccctcttcttcattcccagaatcaatgttcctttcctcagagctttcctcagagtaacctgcaatgtcatcttcaatttccttgtagttaatctttttgctcttgggccggcccctttttctctcacctccaggtccaccaggttgtacaatcaggttactgctagacaacatgttctttgacggtttcttagacaaatcagcaacagtagcattcacctctctggtactagctcgaagccacttaggcacctgctcatgattagtcatctcctccgtccagtcaaattcttcatccatctgatcaaataactcaacttcctcctcgcttctggcaatcattctgttcacctcatgcagagaaggtacatcatggacagtttcttgatatctctcttcgtcatgcaataaagtctccaatgtcattcgtcgctcttcatgagttgtcctttggtcaaaacgaccagcattaatgacctcatcagccatgtcaatcttatactgttgaatattattccttatgagaccctctatagatcctatatatcggtccttcccagccatgtcatcctctaggtctactgaaccaccacttctaagctcgtcctccttttgatggctggagagtttttcaacaactgcctccatataaatcacttttacttcccttgtctgccctatacgatgggctctggcaactgcttgttcctcattcttgggatttggatcaggatcatatataacaactgtgtcagcagtctgaaggttgagaccccgtccagctgcacgtatactaagcaagaagataaagcaatccgtatcaggatcattgaagtccacaatagctgattcccgatcttctaggctggtagtcccatcaattcttctgtatacaagccttctccattgtagatactcttccaagatatcaagaagtttagtcattgtactgaagagcaatacacgatggcctgtcctctgtagctttataaggatcctgtccagaatccacaattttccacatgaccttacgaggaaatctttggaaaagtcattgaaatatggataattgagcaaaggatgattgcaggctttcctcaactccatgcacctattatttaaagttctatatatcttggcttggtatatcggattcttttgagccctaagtttttcatcgtctggatcaactctaagagttccagtcgctttaatccaatcataaacggcactctgaatagcagacattctacatcgtaagactacagaaacctgcaacccaaaagcataatcagaggaaatatctagacggaaaataacagcaaaaatataagatagatcctaccttagcaggaagtgacccttccacatcctcaacacggcgtctgagcatgaatggctctaaaatttgatgaagtctgtgaatgactatgacctttttttcagtctccagccagtcatcttctatattatgcgcaggaccttctttttgaaagggttgcgcaaaccaatcatgaaatgcttttcgattgtcaaagacatcaggaaggagaaggttcaatagtgaccaaagctctttcagatcgttctgcaagatttaataaaagcaggataagaatagtcaaataatgtaaacagcttatacaatcttggtttccatttgttatatgtcctgatttatgcccaagtagctatacagctattaccaacctgcaaaggtgttccagtgagaagtaatctcctctggcagcgataccggtcaagatctcgggccaaaacagattctctgtccttcatccgttgtgcttcatcaattataatatatttccagtcaacttttgagagttttgatcgatcatacataatgaactcataagtcgtaacgaggacattgaacttcatggcgcaaacctcctgttaaagagaacaggggatgtatcaattaacgtcttcaaaacatctggagcaaaagaaactttttcaaattttacctgagagaacaattttgaacgttgatcctttgtaccaacataatatatgcatgaaacagatggcagccaagtatggagttcactctgcagaagaaaacccattggactttaatcaggtaccagagagaagtcaacgaaagatagcaaaaaaacttatacgtattctaaagaacacagaagagttcatcaacaggatatggccatgtcagcgcaactaacagctagttagctagagtcaaagttaagcttagataatggatataagaggcttgtgggttctcgcggaactgagtgagataattatgagttgggagacttggggtctcaaatactcccttggttctaagcattgattctgtggaaaatcataagagagtctatcagaaacacaaaccttccaattcaccagaacagcattgggaacgatgatgagatgcggtccataattccctttaaactccataaggtaagcaatcagtgccattacctgtacaaaacaattagtatattatgataggacaatataataatttattggtcaccaaaggcgaaagaaaagtaaatccaggaatccctgcaaatcgggaacagatttaacctgaacagtttttccaagacccatctcatcagccaagatcccgtttaatttgttattatacaacgatagcatccattgtaatccaacctgattggcacagagcaaaaaaccttagaaaccatcaaaacgtggcatgacagtgagaaaaaagcaacaacatagagtatagatggaggagataccagctggtaatcacgcaaagttccagcctgaagcattgaaggttgtcttacaaccacttcatttacagcatgagccagagtatagtacctagagttggacataacagagttagacatcacccacggcgcctattcctaatcttgtgatctgtagaattctctcacatatggatgtgcaggattatcagcattttacagataagcacatactttttaagtattcagctgcattggtaattatgagttacaactagtactttgctaattccctattttaatcattttttgtgtgactaatgcccttacttgttgacagatgaattttcttttggcgcattcatttccgtaaatctatttctgatcacaacttcttctcgagcacaagtagctgctgccctgacctcttcttctgacaacccctgcgtcaaaaacggaaacaggtaaggtactatatatccactatacctttgaaaagaaaaagttctattttctgaaacacgcaaaagtcaacatttaagttaaagtttgaagaattatctacagagtgtaatggatattcgctgtggagtagagaaagcagtatgtatacctgcaatctcgctgctactgctgcagcatttgctgcctcctccacttcctgttgattttttgtggcagtaatcttacctccaagtttatgaagataatcttcggtttgggtcaaaaatgaagagagaacagcatatctttcagcagcatcaccaggcatattagtttgctgttccagcaacatctccctgtatctttctacatcattattcttcaaggcctccatccttttgttgcggccatcatcttttctctttgaaaactctctcaacatcttttcatggtatttggccactcccctgttacgagcagtgcgtgcatcacgtatagcccaatgagcctcaaggagtttcttacgccactgaaaaatggttttcagctgcttctctctgacagctttctgattggccagtacttgtctattcatttctaggcgttgccgttcgcataacctcacaaatttgcggtacggcctatccggcatggacattatctcctgttgttgtcgatctacttcctctctaacacgagactgaagatcagatagcctaagctttttctcttcaatttgaagccgtaaaacaagatcaggcctaatccttttcctttctaaattttttgctagcagaccatttatcttcttcaaactgtctgttcttttcttactaaggaactctgcaccttcttcacaaatcagatctttaatatcatatgctaatgtgagattgttattggcattggctgttgcagacccataagagtcaagttttcgagtgaaaaagggaaaatcaaacaacggtccataatatttcctggcagaggctgtatccttgggcggctggggagagtttgcttgtggaggaaccttagattggcttccatcagatgcaacagcctttcccttatcagctgtagaatcacttctaggattcttttgagtactagaatctgctccttggtctgacttaacagggaatacatcagtctgttgctcctctttcgtagccacgtcagtagaagtagcttcttttcccaggttttgaaataattggctgtggcctgtcgtcaaagctacttctgtatctccaacattatcttcctctttagaaaaaattggtccatttgaagaagcagcagcctgagactccttgccacactctagcgaccttgcttggtcttctccagttttgtctgaagatctatcctgaactttccctatggcaggagatatttgcctctgcgtctgtagttcaagcggtggtggagaaatagcttgaagaagctccggaggcaaagaaccttcccctttctgtcaaaaaaaagcaattaaaaacattcaacctggcttgcagacacgttatttataggcatacatctccagcaaaacatacaataaaaatgaagacataaggaaaaagtcagagctgaaaaccttcaaacgcctaaatgccagtatctgggctttgagaacatggagttgctgtttggtaaatcctgatcgctgctgtgcttgttgggtcccctgtccactctgaagggacgagttactgagtggaccagtatcagatggcgctactaaatttggagtcggtgtattcagttgcctaggctgctgcatttgcaaatgttcagcaggacctaaacttttttttgtagatgcattctgatccaaaacaggagtctcatttgcagaagtctgcaggggatttcctgagggcatcccatttgtaggctgaactaaatgtcgaggatacattggattctctctcccttggccggagaagggattcatagcaggattgaccattctgggactggaagtcgaggcaaatgagccagtagataatgcatgtctggccttcgctgatcctgactgcccagagatatcactagcagagttggcatgtggtgaattctcacctggaacaaccgaagatgaagccggctggctagagattggaatagatggtgactgtgaggccacattgccttcaccagctttctgttgagcagccattcttgcctgaaggatgtgtgccatttggctggcgttggcaggatgtgagagatcgatattacgctcacgcgcccatgcctgcattgcctgccactgttgtgcaaatgcgagttggttgtttcccatgttattgacaagctgctgagcctgtggtgcttgcattggccttatcatatttccaggcattagttgtccggtacccacctgctgctgaggatgagattttgtttcgttcctttgctgagaacttgattcagtctgcctttcaccgcgagcaaactgatcgcccgatggcttcgatgatgaggcctggggctgactagacggattcaagtcttgcatattcaacattcccattcgtgcatcttgatcctttcccacacttgatgaacccaccattcccatcctagcttgctgctgtgctttttgatgctgagcctgcatagcaaactgaatatacgcttgctgcattggattaaaattttgctggccctcttgggtagaagaaccctgttgttgttgttgttgttgttgctgaggagactcaaaaaaatttctagactgctgaggcatttgcatagagcccggagacgaagcaaagttgccaccgcccatcattccctgaaccccaccaggttgatatgcaaacatattttcgtttgtatctgagtttctgtgctgctgctgctgctgccatatcagaagcacgataataattagtaacaatcaaatgaacaataatccacaattcagagcaactatatatatatgtggaaatgaacaaaacatgttctccaagtggctaccattacacaacttcaatttaaagatattggttactttccttttacacagaattgataaacagtcaagtcccactaaaattgaatagccgcaagtttaacagacaaacattagccactacaaacaagcattttatccctcctaagtcataacgaaccaaacagagacttgagaatcctttacctgcctagacgccagctgctgttgctgttgctgctgttgctgttgctgttgctgctgctgcacagatgaagaggaagaagaaggagaagcagcggatgacgtggaagcagtccgaccagccggacccatggccggattccgagcgggccctccgccactgcctccagattgcatgcaattggtcgaagaatctgacagtcactacactggaaacaattaaacccaatgcacaacgaagctagtagaagaagacaaaaaaaaagtggaaaaaccctacccaataaatccctacaaaagaattcggacagcgagagcccccgaggcaaaggaaaaaacctcaaatagcaacagagagagagagagagagagagagagagagacactgagtcggttgaagcgcacacacctttctatttctctctcttcttagatttgcatcgaatttgggggaaatcggaaaacgaaagtcgcgggggatgcaacggtataaactcagatcctttgagatggcttctcgaaaaataaaaataaaaagggagggaaacgaaatccacggaatcgatgatcgattcctctctttgagaaattcacgcagatcagaaatttctcgcagtcaaaccctagctggcttcttacttccctttttcttttttttctctttctttttttttttggaaggggcattaattttattttatttttgattgtaggtcccacgcctcgatacagttggaacacggaaaatgcgtttcacgaggccacccctcggttttcgcttttattaccacaagtacccttccttatacaagtcagttgcacaaatgacgatgagacacgtgtgaatttaccaaacgttccttttgttaaccaaatggaatgacttttaatttttccatgtttatttcaaatatttgtttccgtattgggtaataagaatactaaaatgatactactataaacaaatttggaaatcaaaaaaagaaaaaaaaaaacaaatttggaaatcaaattagacttatgtttgttttacttgattaattaatttgaatttaaaattagacaaattttgacttttagttttaccttctgtagtgcagtagtagattagagagaatcatacaattacccttgttttatttacggtgcaacctcgtgtcgttttcatctttcagccttgatatgcttgccatctttacgtcaatagttggcacgcagttctattttaagatagaaaaacggcgaacagttttgaaccagcaggttcagtttatgtcgttaatagttttttttcccgaaacaagtaaaaagtcacattattatggttttgtgacttgtgtgcgagtttgtagaagctttactgatatagaaatgccgttgccgatgcagtctctcttcctctgtttctgattcctgaataaatttgttaaacgatggagaagatcgttcgttcttcttcgctgattctacttgttggcctccttctttttatgaattttcacggatttgtccggatcgccgaagcaacgaagcgacggatcgagatctccgatgacctagacgacgttgaagacaatgaagaagacgagtcatggaaagagtgggggaagaaagcaacgaccccggaatttgatccgcctccggatttcaccaatatgggattcgatcagatccaagaggaaatggctaaacggacttttggaaccgtcgtcggtttcgtcaagctccggttaggcgtcccccgtaccaaggtaaactaaaatccaaatcgaatcgtgaatttggggtccttaagttatagtttcagttactgttcaaaattctctgaattcgatatgggtccagttgcttcaggggattgaatagtgatctgtttatatgtttcaatcaggatgtggtgattgatattgctatgaaatggacaaaagttttaagaacaggagggataggagtaagattcatggctgtagatcgaagcacagtgatgttcaatatgcaaaatgggaagcttgtgactgaggtaaaagccacagaaaacacacaatgctgaaaactttgtttagtggattagtcaaaatctaacatcacaatcatatctttcaattagctaagggaattcgtgctgagccaagaagaagcttacgaggtcaagatagggaagcaagagtttagaagacctggagatcctccatttgaagatgtctttgacaaatttcaagctgagcaaaggaaagatcacgaagatggtgatggtaacaagaatgatcttactaaggatgaattataggtcacagaaaagcttctataatgggtagtactgaaagttcaactcttttactgaatcttacctaaacatgtttggtttttagtttccgttgaatgccgtagaatacaataaagaggaaagctttgtttcttttccaatgagtatatgcactcatttaagcttattgctaaacgtggagagctcaataacctgaatcctgggaatgcctgctgcttcagctctctctttctcagtgttgtatccccaggttcctgttttgagataagtttttgtcagaataaccaataaggggaaccagaagtgatgatatgggagagggaagagaccacctaggtataaactccatttgtctaattcaggctcttttatgacatttttcagcgttgcgagtctgtcttccacgaaactggccaaattaaaaatgcatagggattgtaaactaatggtgaccattaccaagtcatgcagatagaagaattattgatagatatatagaacgtgagttactgcagcgtcaagccctgatgttctggtttatcttgaagtagctttagaacttccacctttggcctgatgggatatcacacagaaaataaaactagattaagggtagaatctggatgagaaacaaaatcattggtggacctcataatgatactgaccctgaacccaaaccataaatcctttctgatggtatgattacacctgctatttcacgcagtaacgcttctgcaaagcggccctgcaatttaacccacccatactaacaaagtttagctcattatagtgacagacagtatgtgtatccaggacagttttgaatagaattggaatcattactgcacctgtttcgtggtaacgatataaatctttgagctggcaaatttcagtgcatctgaaactcctgggtagaatctgcaaatatagtagaagactatatcaatccttattttttgtataagatgggtctctgaaacttagagttggttagtaagatttgatgttgaaggcatacctattggcaccaatccaagttgtcaagtccttgttaatccaatcatctctaacttttccaaacaaatctaccaaagcatctctatcttcatcccaagcttccatgatcacgggcttaaactttgcccagctctccagtatcccatcaaccgtcaacccctctgcaaccttaacaaacaaagtgcaattcatcatctacaatacaaaaaaggatcacttaaccagaactaagtatagtgaagaagattctgatgagcattcacactcactgaagattttcgaatagacggtatcttggtctccaataacagccgcacaagtagaagattttcatagccagtttcaaccacaggtctcacctacaaacaccagctcttgaatcttcaaattcttcaaattcagagctagaaataatctcaatctaagctatttcagtaaccaacaatactttctaagctgagaaaaaacagtaatatacaatatgcatttgatcgacgatccattcctctaaagcggaatcaactccttcgaacaaatcaggccatctcactttggctgcctataaatacagaacaatcaaaagatgttcaagcaaaactgggcaagaaatatcacaaaactccaaaatttcaaaatcagaatcagagaaacacagaagtatctcaaatgcgaaaggtaaagttaaaagagtgaaattgaccttaacagcagatagagagctttctccacaactatcacagagaactccatcgaagtccaaagcgtagagatctcccattctccttctccttcaccactactagtttcaatcagctgccacacatttgttagagacgaaggttttgttttttactcttactcttcgagagccaatgttaacaagccacgtgtttgtgacgtttttgtaaaaacaaaatcgcatatatttttccgcgttacgttgcgtttgcgttagtccacacgcatatatatgtaaaaaacctgttattatcggtggcgtacccaatcaattaccgactgcagccggtcgcagcgtctattcagccgacctaagaaccggtatcgccggtatcaataattgctgatcttttccttctcttcttccccagattctcaagtctctctaacttggagaggagatagaagacatctcatcatcaatctccggatccaatccaattctgcatcgactcttcagaggtatttccgatgaaccattattttccccttgtagaaattattctcctttctcaattgatgattgtccacatagctagattttgtgtaaagagatattttgtattatagattgcatctactgctattgtttcccgattgattgaagcaagtagacaagaaaaggattcggttttgtctggttctgaaatttccattggttccaaattgtcatccttgatgaagaagatactttgctatctattagaaaccagaatggctcgtgtattgcctgattctttgtttaccttttgttgattagagtgattttgcaattggagatgttagatgttctctgtttgttttgtggctactaacccaagaaggtttcttttcagttttattgggtcattggagatttttttcggttgaggatggctaacaatgaggagcatcctcctcgagggaatgaatgggaagtcgtctcgctcacttcatcagcttatgctgctgctcctggtccgtataacgttgaatcaagagatgtgcgcaagtatgatgcttactatggagcggaaacttcacgtgatctgtacatgtctgaacactttgtattcccacctagtgagcatgagaatttacccattgatgaatctttattcgtggcggagcaaagaaaggatggccgagacttgatgctggaaggtcagggattgtctgatcagtttcattatgaagctggaaacaaccaacagagtatctatggtgaatctgcgcttggttcttctagacacatggaatcattcggaagcgaatcagccgtgtatgaacacggattagttgatgcagagggaaacttagatctccattctgatggtgagggtgaaaaggatgtaaaaaaatcaacacacaaccttccttgtgaagcttggtggaaaaggagagctatttctatgtattcacgcacaagagaagcaaatgcgatatggtccttattctttgcagctgcggtcacaggactcgtagttcttggtcaacgctggcaacaagagaggtggcaggttttgcaactcaagtggcaatcaagcatcagtagcgaggtaataatctataaaatcacggaaaaaacttcaattaagaatcgttatgttttttacaaatggtaaccacctaacctaagccattcattgacgactcttgaatgtttttttccacacagaaactgggcagagtacttgaacctctctcgcgcttgaaagacgtgattgtgagaagtaacccacaagcttctctcgtaaggagtggctcctccagtgaggtctagagacgaactatgatgtttgttgattcgacaatctcacacaagcataggtaagtacaaacttggtcttgagttacatgtgtgcgtgattgtctaaagctatttactttcttgggagcctatgttgcttcattatcttgtactattagaatggagatccagttgccttcttacaaagcaatctctttaggtgtcaaaagcgcttgtactagtgtggaaactggaaaatatacacatacacttttttttctttctaatttggtaattatctatttctattcactttttttttcattcactttcattgtatgcttactataagaggccaaatatataacacatacgttctgatttgcagtagaaatgacagaatcgtacaacagtattaaatgttgaaatggatttgtagaattatgatttatgacacacaacttatttaagtgaaagtttacgaaatgacaaattttacttatgttactaaaataacgacaatacggcttactagtataaaatagaaatttccatttcacaaagatggtaaaaaccgtaaaatgctgatgaaatcgcaaaatcattttttttactaccaaagagaaccattgttacaccgatacaagctttagctttagcatgtgtcgcagtagtcgagacaaaatataaatccgtcgttctttagtttcggtggtaaacgagagaataaatgactaatgatatagataattaagtaaacatgtgattatgcgtattgaattattagcctctagagtggttgagtgttgtctgaattactattaattaccatgtgaataagcgacgtggtaactaactatcataatgattcattcattattttagctacttttcaatatgattttttttatatctccttttgattctatatatggtggtcttaaatgccaaatgagacaagtaacaagtaaagtgaccaaaacaatttcacttaaatgaccagttttacgtgggacaacccacggaatctaaagatttctatgttgtttattacttaacgtgataggttaagtttgtttgttaagtcgtaagaatcgtaaccatggactcattaccattaatgtgccaaattccgaatagattttgtagtcatataaagtcattgcgtttattcaataaacaagtcatagctatcgagaattccttcattttattttatttttttggtaaatagtgcatgggatggatatacttgatgcacctaatctaactattttattgtctattatttatgtaacttcccgtacgtaactgtcaatttcaagtataaatattaattaatttgtaaagatattattatttaaaatgatctacaaagtgtattgtatatgtttttattttgccgttgatgggaaggtaacctaattagataactttatattctctatcgatttgtgtcctttgtcttaagttttaacctaatattgcatatttaaccacataaatacactaacatgtgtaaacattcacattctgcaaggatttttttgtttttaaaagaacttgaaacaaaataaaagaaaaggatcaactgaaaaccaactgtcaatcaagttcatttaaaactcaccttgtttcatacagctgtaatgaaaaataatagtaatggatttcgaagtattttaaagttccaaccgggtattctgcaatgcttggtttgaaatttgaaaaagttgactatggttggtcaatgcattcatgctttgatgacaaaaatcaaaattatatatataaaaaatagttttcttccttcacaattatccactatagggtttatatatactatatactctttaattaattctccgatagttgttccttttgaaaagggttgaattttctgatagtttcgttaacttaatcgtttttcttctatgcattaatttttcgaaaattgaactccaatgcagtacatgactacatcgtattttaatattttcccacagcttctaataatattacaacggggggtttaaattcaaaatttaaaagattttaatcgtcgacatgtgaaaatgtagtattaggagtgtgtttatatatcccatgtacacatcacgagttctcgtatgagtatgtgttggttcttacattaatcaatttatcacgatcacgcattaagaaggcgacacattattatattgtagacattgaatacttgtaacgtcctttttaaaaatatattgacaaatatgtcaccaaacccaaaagcaacctacatatgttgtgtagttgagcaaaactatcattggtgagtttgttcacctataccctaacaatctcaaatctaaaaccctaattactcatccctatactctattgtatcacaaaaataggattctataattttatacacgcacatatactttgtcaaagcgtatcataaaaaaatgaaataaaaatcaacgaaataacgtgatatggctagtaatatagtacgtagtcttacgacaatagtttaacttatacgtgaaaaagtgggataacatgagttttcatatttttgtcatcaaatgatatgaaatagaataaccgaacatagatcattttttcactaattgagaagaagagaattagagactatcgactcgtacgagtggtgaaacccctgtcattttgccgttatacaatctactgaccatgtccatgactaataatacatctatcaacaaccatcatgtcccttgaaccgacaccgaattacaaaaccctaacttaatatcttcaaaacatgcaattaatagacacgagaataagataaaatgaggaggcaacatcccatgcttactttgtgacttcttttacacgattttctaatacattttaaaaatactacttgacatctctccatttttggggggttttgaattaaattgtatatataaatggttcatgcttggacattgaaaacctgtgggtcatttagtcatagatctctctctatcttccttcctcctcctcttactaggctcctcaactaaacgtcttcaatgctctctctctctctctctccattcttttacgacctcatagacttgaaaatttaccattctatttttcaaaacctttatattgatgagattaatatataaagtctccaaccacctagctaccagcctagagcaggaacattaatggtggtgcacaccatctcatgcttcacataccctaaagttcttcactccaagtttatgaggagatctagagagataatcatatagagaaagagagatctccagagaaaatccattgaagggaaaaaaacagtctgtctttcataattgctctttctataaatcttctctcttgtgttcttacctttcttctaaaaccattctctctctctttaacacttcatcactctttacggaaaatttcttattttcaccacctgagccatctctattttcgtcaaaacttctcaacttttgtgccaaaacgtcatttcttctgagggaataaacacaaaagaacaattttcccggaaaatcatggagatttccactgctctaatgattctttcggccatcacggcgtatttcttatggctcacattcatatctcgttgtcttaaaggtccacgtgtttggcccatattgggtagtctccctggtcttatagagaactgcgagcgaatgcacgactggatctccgacaacctccgtgcttgctccggtacgtatcagacatgcatctgcgccattccgtttctagctaagaaacaaggtctcgtcactgtcacttgcgatccaagaaacctcgagcatattctcaagaatcgttttgataattaccctaaaggtccaacgtggcaagccgttttccatgatcttctcggccaaggtatctttaactccgacggtgacacgtggctttttcagcgtaagaccgccgccttggagtttaccacaaggacactccgtcaagccatggctcgttgggttaatagagcgatcaaacttaggtttctgcctattcttgaaaatgctcggctcggctctgagccgattgatcttcaagatttgcttcttcggcttacatttgataatatctgcggcttaactttcgggaaagacccgcggacttgtgcaccgggtctaccggtgaacacattcgcggtggctttcgatcgagccacggaggcttcgctacaaaggtttatattgccggagatattatggaagttcaagagatggctccgactcggcttagaagtcagcttaacaagaagctt

SEQ ID NO: 382 - DNA, 95214 bp, Arabidopsis thaliana
gaattccacggtatatttgctaactgattcttagttttgaaatggattctggattgctaaagcattgatttttatcttctggttattgcatttgcagttggtacatgatttgagaagtaattctgctccagggatgtgtagaattactggctctgcatctgtatgctcagataatcagtacaagggaactcttgatgttttctacaaaattatccgccaggttagaacaattgctctgtttgattattgttggatattgaaattaagatggtattaagagctgcagtgtctatatatagagatatgtgtgaatcccttttgttttttgagaacattcatcttactggtttagtgtctctgtgctgcaatatggcttggaagttgtagcatcatctagttggatacctctattggaattgttgtaatttttttatttaaagttctttatttactcatttgtagagtttcacaggaacaactttatgcaggaagggttttctaggctttggagaggtacaaacgcaagtttaactttagccattccgactgtgagttctctctcttaagtaatgctgtttgcttctgcaacttatttgttcattgggtcttcctgacttattaatacttctttgactatgtcgctaggttgggatctacatgccttgttatgattattttcgcaacataatggaggagttcacgactgagaagtctccatctttgacggtttatgtccctctagttgctgggacaatagcacgctccttggcttgtatctcttgttaccctgttgagttagcaaggacacggatgcaggtaactctttaaggattttcgccctcattcattgtaatggtgtggagatatggacacagaaccaatggatatcgattcttgtgttttactaacaggcatttaagggaacgcaaagaaatgtgaaactgcctggcgtttggaagacattagttgacgtcgtcaatccagtgaagggctcaaataatggatataggatgttatggactggtcttggtgctcaacttgctagggatgttccattctctgcaatctgctggtcgatacttgagcctgtgagtagtaatctgtctctgaaaaacacatccatattcacccattgtgtcttccatccatgtcctcacgattgtttcattgtgactttagacccggagaagcattcagtcggccatgggtgaagaaccaagggcaggcagtataataggtgcaaacttcgctgctggttttgttgcgggtgcagttgctgcagcagctacttgccctctagatgttgcaaagactaggcgtcaaatagaggtaaacatacctttttcacttcatctttcataattccactgtgttgctctacaaactagaattcatcgccagcttgcattaagtaagttttggatcttaaaccaagtaacagttaaatttgtttggattatgcagaagaacacagatagagccatgacaatgaccacaagacaaaccttggcagagatttggaggtatgagttagagatccattagacaattttcgtgtttccaaacttaaccatcccggtcgggtttttggtatagggacggagggatgagagggatgtttagtggagcaggggctagagtgggacgagcaggaccatctgtagccattgtggtatcgttttacgaagtggtcaagtacggactgcacaacttccaccaacagtaacacttatactagacagattttgttttgatgcgaagctaaaaagaacacacttgcgcgtctaatccaataaaggttaccgtattaggtgcttacggcaaaacttgatttttttttgtcaagaaggaatattatttatgcaagttgttgcatttgtttttcgttttaatattttttgtaagaacaagtaaattaacacgagattcttatggcaagaaattaactccatgcatgctgatcaagggtgtgatttataaatgacatgtgaaatggcatatatacaattccgtgatttataaactttttcatgagaaattgtaatctgaagataagactttgagaatcgaattcaaaagagttgagcaaattttctggctttcatatcctgcttctgaactggtcagagatttcttttgtgaggccaataaagttggtaattgtcaaatatctggtaatttaagctaaatgatgacatttacacaaatattataagggaagaagaataaatttaatatggaagagaataaacaaaaaagaacaaacagtagagattatcatcaatcaatcaatctccagaaatcataatcgagaacatgatgatgaaattaactcttgaaaattttatccacaagaagaagaaaaaaggcaaattgaagaaactaataagaagttgcaaagaaataaaaaaaaacagaagaaagagagagagagattagaagaaggagtaggaagaagaagcatcaagaggatgaattaggtaagtcagcactaacgccaccaccattagcaaatacgctatcccttgatctatcgatgttcctgccatttccaaaacacaccattttcaaatgtcagagagaaacgaattcgtaatccaattcgactgtttccagatttcacgcggagagagtctcgattcagatctggaaatgcgaatatcgtggaagaagagagagagagaagtagagaggcttaccatcgctggtgggagcaggagctggagccagggattgagcgccggcgagagataagatgacggcgaatacaaaactgaacaacgcgaatccggtgacggagtttctcgacgccatctcttggtgattgatccgacgaaaatgatgatgctcgagagaaaaaatcgagagctctgcaggtgaaaaactccggcgagagagtgattctgcagagacgacggaggagagagagaaaacggtatgagaggaataaagcaagaagtggaaggagacgacttgtttaaggtgttcttatagtatgaagaccggttaaaggttaccggtttcaaccggttatttatccggtcaaatctatttactagtcaagctaattaaacaaaaaacttctaagaagcatgattttcctcgaattttcttttattcttttttgaccattcctctattgttcttttttttcctagttttcttgtcaaaattgacatttttttttgaatgaataattgtcaaaattgacattactatgtttctagataaataaaaaataaaatcatgtttgaatgatcaaaagtatgaattgttgtgttagaattttgactaaagttgttgtatctctaatccaatttgatttgtgaattgttgatagaaaattgttttcttttttctgtcaacggatagaaaaagatagaaacttgattaggtactgatctaaattacaatcatatagccgataaaaaaaattataatcatataagtaaataaattatttatgtaataaacttaaatgaattacaaaaattcaatattggtagctttatagggtaaattcaaaaatagcaatagaaatgaagttatggattatatggtttaaacataagcccaaaaacaaaacaaaaaaatctttaaaagaaattggcggctagtttaattaaacgttacagcgacgaagaaggccatgtgatgtgatgtgattatcttttttttgtaagcattgtttggttggattatgataaaatacaaatctttagaggtggtgtaatggtaggggctgacagactggcagccaaactggactcattcgtcatatgtgactcattagtcagtctctctctctctctattattccttttttttattgatactcaattatttgtttctgctatgtcgattaatttatttaacggctatctcagtaggtgttaatctgcgtgattatcggttaatctgccaacattttgattttttaaatactaaagattttcctatctatctcacatgtggtgtcagaataaaacaatttatcgtgatgatgttatcttacatatgctgttttgtttaggtagagtgtattttacaatattaaaaactttttaacttgacactatttataatactaaacagtaaataacgatttttctatggtttttgattcataaccatggcagattgattgattttaccattctattccatatcctttttctttttctttcaaggttatcagttaaaaattaaaatatatatgagtgtgcttgacttcttttttaatttggagtacctcggttgttgaatgtacgacaatatgaattatttgttgtatagttattatatttgttatttaatgattcatgtaatctttattaggtggctaattcactaactagtaagaggaattagccgttggatcagttacatcaatcattttatgtttcaaaatatatatactataataatatcttttaacataacaggaacgtgcatgttgcagttggaaataatgtagggtcatcttttttcaaatttgcaaatcctaaaacgttatcagcttttacttttcaagggttactaatggttcagaaatcagaatgaatgtagtaaatccaaaaggaataatacacatatatatatgtgtcacatgtgtgcggccaaaatagttcactgactcttgctctctcatatcttcaatcatgttttttttttttttaaacatatcttcaatcacgttactcgactggtggtgtttcacgggtgagaaatatatgtatttacgtattaatttcttagaatgaatattctacaaataaaagttactatttgttcttacgtcaaaagaatagagagttattaaaaaggccacttgattaaaaatatatgaataatcaattgatgttaataataataaacttcgtatataaaaaattgtcgtatatgacgactaaaatttaagcacaaaaaaaagtcttgtggtataataattttgatcaaagaaagaaaatagagatgagcacaaagagcctaaaatagagggacaatgaaaaggatggagtaatgggattgtttgaagcaaccatgtgccctgtgaacccaacttgcctcttttggttccaattcgattaccaatgtttcgtcaactactggtcaaagttaccaatatttcatcagaataatcaaatcatctttagcattttacaatattagtatagagatatcagaaaatgttcttattgcatggcataacaaagatgatagaactgctagtattattttgtggcatgaacagaatgggccaaaatttgatagtcactgatgatttaatatttagattcattttccattgaagaaccaattttttgttttttgtttgtccggacttgttagaattggaatactcaaaagacacttacctggcagatgtgaaagatgacttgcaagagatggcatagcaccaaaatcttaaagattttgcttcgaaggaaggataatgttttgatttttaaaacgcaagacaaagagagtctctcgcgaaagcagagggttcaaatctaaagagaaatgttggctcaaaggcctaaacccacgccaccaagcaatcaattacatcttcctatcctagttttactcttaaacatacaatgtacccattacatgttggacatagatacaaagaacatgtctaattcatgatttcgagatttatagtaatagataataggaaaaaaataaccacatttaacccatgtgcccttcatcaacgacatattctacttgttttcctagagacttgaagttggtggtcacactaataacatcgtatgtgcaattgttatgaatttcttctaaaacaacactgaatctaaaaccataaattgtgaaatacgcagacgagaggtagtagccatgcgatgaaatgaatggatgatatatatattttctctcttatagagaatctccaacaacaattacataaccgagctaacgatataacacacttgtacaagttatatacctctcatcattacacgttatgccgaccaaatatgaatcatttctgaagaatctgagaagtttatctcaaattatatctcatatatatagaattacaggaagaagaatcaaataatatattatcacagacagttttgcttcttcaacttctccaagatttcgaactttttttctcttctggtcatatgggatcatagtttccaggacaaaaacgtttgcttcaaagtcagacctgctttgtcctagtttcagactcaaaaagtccaatgcccgcagtagtagcgaaaaggccaagttgtcaaacaagttttagtagcttcatgtttccagtagagtttgcagctacaagcatattcgattttttcctccaacagacgctcgacacaaactgtccattgtcatcaaagtattcgtttccagaaatgggatcgacggatccaaacttgtatgaagtcattggcatcggtaaagatttatagtaactatatacctaagacgcaaaatcaaagtaaagtttttttagtaagttataacaactaattttaggcagcttcataaacaaactaaacgcgattgacatataccacctttgataatctgaaattaagtattctaaaggttgagattttgttttatgatgtgatatatacctcattggtctctgaaccacaagctatgtatccgtccaaaaccgacaatccaacgaaattctgcacaggtaaaggattagacatcagaactaactaatgatgttggatgagatgttaaaggtagatagaaaagtttttgggactaaccttctgatttgtatgtcctttatatgtcaatgaacaagcaccaggagataaaccagaggaatttgtcttgttaagattccaaagcttgagagagttatcagtggaagcagaaacaatggtttctgaatccataaatttaacataactcaccgctttctcatgaccagccaatgtgcaccaaggtgttttgacataccgaaggtcatagcaatagaccttgtaatcagctgacccaaatgccaataagtgattggaataagaagagaattgcacgcaacacacatttgctggactccagattgtgcctaatgaacgtttctgcataccaaacagagaagaatataagtttcactagatttggaaattcacaagtataaacagagaatcatgccttatggagctataatctggagtaataaaaacaacggggacatgaaaattcttgcaatatcaggaggtaaaggaaagagaagtgcctcattgatgctccaaagcttcaccgagcagtcatcacttccactaacaaattttgtcgggtcagatggagaaaaatcaactgaccaggctctcttctggtgttctgtgtactgcgaaaatccttgtccagtgccggcatcccatatctacattcattagcaccatacagtaagaaaatggcaagtgaaaaccatgaaatagacgcttctatatctctatcttatcacaagattaacatgtacacatctcatagaggaagagaaagcacatgaggctagtcctatagatcctaccgtgcaacatatgatggtaaataagaaagattccaaacttgacatcgataggtacctgaactacaccatcgtagtcagtcgaggccaagtagtttttgatgtagctattccagcaaacacagcttaatttagatttgttgaccatctctactagtggataatgaacaccgacagattcattcataaatgcattgaagtcaaaaatcttgatcttctttgatatcccagctgctgctatgtgttcttcatcagggtcaaaactcaacgagcagaccacacttgcagagtttaaaaggtccccacttcttattgtcccacaggtttcgaacttgctataccgagcaaatttgcacaacccctcgaaaaacacttcgagttgatctgaagattttcctttggtactcatatcctgattttcattttggttttcagagcatctgtccctgtcctttagtgttttgtcagaacgggcagtagcagcagaactcgataagttgatttgtgatcgcatgaaaaaatatgcatcttcaagttgacggatattactcatcagcctgtctgtattagcagttggtacaaacaaggcactggaagttgtacagtgctcgtctaggggagatgattgcacccttttttcaatagctccatgagatctcaccagagatacatttgaagaatatcttcgctcggcctccttaatatcatcctctaaggtctggatatcttgcaaaagtttagatgcttttttcttcttctgcacttctaatgaagacaaaaaatgaagtaacagctcagatatctcctcagcagcagcagtcgatttaactgaatcatcctcgcatatcaactctgactttagtatatctctgtcacataaagagaaaagaatgagaacagaaaaagaaacaagaagataattcacacagtagcatgccattttttttcttcacaattaagcgggaaaacattaaataaaattgaagatatccggcaaagaaatcttaaatacgactatttaagctaatggaaggtctacagattctcctttgtaccactcctagactcctagtaaatactcgcccacatgaatcataaaagagtagcactcagctaaatacctagctgatggtcgggaggagggttcaggatgtagaagccaaagacaaaatccagcttccttcgggtatttcgagagaaatgttggtgggagaatccgatggcgtaaatctgccatcattgcagcatgcatctcgcctgactcgcaatggcatagcaactgaaacaacaattggtcaagctagatgtcagtaggcgtcttcacatgaaagtatcaaacaagtaaacaaaaatactgacaagttatatactgcagactggaaaatactagctctgggattcaaagttcagactagagtaagaaatttcatgaaaatgaaagaatataaactacccaaagcccacataagcaggatatgacagtacatagtgttcaaatgcaaggaaatgttacatccttcttggtattaaagcaaactaaaaatctatccacaacaataaaactgggtattcgtccatacctcaaacagaagaacaccaagggcataaatatttgatttttctccaatatcttctccatttatctcctctggacaagtataccattgctcttctagccatgtggacatagactgttttctcgacactgaagacacgcttaaattttttatgtagtcttgctgttgaagctcgcaactgtctggattacgtgcatcaaccatgtttaaatcaatcacagggcttttccttttgaaaggtcgcccggttgaagtggcctgaagttgattccctggagaattcaaatgcaagtccatttttcttttcttcgaatccctacctccactagatgattcctcaacaacaggcctcctcctattcaaatcttcgtcaacatctgattctagatcgttctttccaaaattaccaatatatctaagtttctttgatggaactaaagtgaaaagggatggtctcaagtctagcaagaataatctttttgaatgggctgagtcaaccagttccaccagctgcctaaatagacaaaggccatgtcttttttctcttttagcataacttgatctaagaaactccctcaaactgattccaatagaagatttactatgattcccatcaccatgtgataccataccatttcctttgggacttgattttagaggtaacacatcgtgaggagtaggcgacttgctaatatccaactttttttccttgcttcctaaatcttgatcagagacaaattcaggaggagtttcctggttctttcctactacccctttccctttcatagctcttttaagtaacaactgagaaaaattcgaagaactcaccggcgttttcatttggacaccttcactgatcaatgcaggagcattcataatactattctcaccagctgctcttagacgttcagaaaaagcttcaagattctgatcgctcctcctagacataaaaggtttcaagttttgcctctcagaaggagctccagcaagctgttgtctgattctggacaacatttgatccatatcacgaggttgagaatcaagatccccatctcctgccctaaaagcagaccctctagccaaacgataaagatgctcaaacttgccagccctaggactatccacattagtattattactcccttgaacaatcctgtagttccccaatgtcaactcttcaacagaaagcttagctcctgcggcttcctcaggaggcggcggcttagtcaaatcaacattcctgtgagctgagcttccaggacaatcactgtttgcagtttctgattgaatcaccatatcgttatgacgagcatcaagcttattacaaggaacatcatccactcgtgctttcaattgtatgttgttagtcgccacagtttcttcagctactctttccataacaggcatcaacactcattgcatcagcaccacacgtaataataataataatctacagcctccataccttaaatcatatacaatacaaaaacaaatcagaatcaaaccaacaaaatgaagaagaagaagaagaagaagaagaaagaagccctacctagtaaattcatgcatgtagagattctaaaactagttaaacatacaataatcactaatcccgaaacgtatcattagctgtaatctaaagtagctaatcaaaacagaagaagattatgtaaaatcgcagcaaactattaaaaccaatcatgaagattacgagaaacgagaaatacacaaaaatcaaatcgcttaccccgaagatcccagatatcgagagagatcacaatcagatcatacaccgaagcggtgtggagaagaaacctcttgaagaaagcaaattcaaaaacacacagaagaagaagaagaagaagaagaaaggtgaggctataaatttgtcatatactattgataattacatataatatctcttttgtattctgtgtatagtcgaagaaacacaaatgaatctctctttctctatagacttttgcacaattcgttcttcattccttattttctgattttttattttaatgattaatttaggctttgaagccacatatcaaattttctttattctggcggacaattttttgaacattattttatttaattttttcattactttatagcaaaaagagagaaagattttttattttggctgcccaattattatacttgttttgtttaagtaagaggtcaaaaggattatgacacgagattacgttcataatcttttgattagtgacatcagctttagagatggtcctgttttttggtcttatttacggattatgccactcaggtttttcctctctggttaaacgatatgtgtgagtataggggtaggatggtaaataaagaggaaaagcgtgggtattaagagtgttgcatgggggaagtaatctttagggatatttgttaagaggaggagattaaaacacgtcgacgtcgcttaatctattcgccattcgaggggggtcacgtgaaagatgtggagattattaagccacgctttttttgcgaataaactaatataccctcacctataacaacactttttgggctcagcccattttggaaacccatttgggaaactttgtacaacaaacacaatttaaactaatatactccacctatcagttattgggctcagcccattttaatacttttatgggctgcttcgcttataacttggacacaacttttgttttccataaacccattagttaagcatttattttaggatgtcaaaaaaacaatgaaaaggcattcattttagccattggccaattttatcaatggttaaatgtttggttgttctcaaaacgaaacatttgagataagaaaaataaaaataaaaattggtcgatcttgtgactaatgaatttaggaatcttatttctctaccatcgagtctttaagatggaaaatataccaataccactcaaaaaattgcaaattgatttaattagttactatgaatgaccacaagaaaaaaaaaagaagaagataaaaattttgtccaaaagacgggctaatttagggactaatagctcccaataattgtatcatttttgggtcttctttttgggtttatggattcgtctcgcgaagccaatcgtaaacatgatgcggaggagaaaagagaagacgagaaaacttctctgatggaggtaaatctcatggtggtgcttctctctcagctttctacgaagaaggaagatgagaatggtttggagaaagagagaagagaccatgttgcacacgaggctcgtgaatctagagcacgtgcaaacaagaggtttatgaaggatacaaagttgatggagaaaaggactcacgtgcttcagcccatggctaaagaattcaggcattacaggaaaatgtgaaggcgcatgactgacttgtgattgcccccagaacctgagttcaattatatttattggattcaaatttttttgttattgatcactatatataaagatgaacagatcttttcattattaattaactgtaaaagatgaaaatgaagagattttttggcgtaattaaatgtaagcaagtattcgctttgtaacgaagatgtatccaatcttgtatcaactatagaagagatgcaaattcaatgtttcaacctaaccagcaacatgttgtattattttctctgctctaattcggatttgtgatgcttagttaaatttgtgtggtatatcagatagaaacgtttcattcatcaatcttatcgtgttatgatcattgttcttaaacaatgaaccaaaagcagcattgacacgaccctagctcctccaccacaataacatgaaaatcctcctctctctatttcggattcgtaaatcatagggagattccttttagacgaaccacaacctaaaataataatatttaacatgattaacagctacttacctttacctaatctatcccttaatctaacattattttaataactagttgacatccacaacctaatccatatataatccctttagctttgttttgtttttgtattctctcaacatgtgaacttggaaataaaacccaaactgataatcagcataatctataaaattaaatttcgaataaaaatttgatttggtcggtcctatattccataatataccctgaattgtaaattcataatactacaatgatatatcatatttatatacaacacgtttaaatgtaatggtagagtttttggacgaagtgttattatgaaaaatttaatttgttgagatcagagtgttatatctttaaaaatttcggctagccgtcgaagggaaaagatgttcacacgagggctccggtcttcgttgagaagatgtgacttgaaaacaaacaaaagagtgataaaaaggaatgatataaaaagtggccggaaacggaattgggtagtaaatgaggggtcgttttcgcaaaacccaattttggtcactatgcaataagaggtttgggtttgtcactaatgaattatgacacgctctccattattatgacaatttcattaattttcatccatttgattattatcttatgttttagtttttctttgttattatattttggataaatgtacattgtgactgatttgtatattacaaacaataaaaccgccaaaacaataataaaattaaaatatgtctttcataagatgataccaaaataatttttaaaatatagagatgacatatgtataacttttttttacaacctaaactagtaaaacatgatactgaatagtaaaataatacatatatgttaaagggcaatattctttattatttaacagataattttaatacaacgaagagttacgcaataattatgaaattaaccactagaatatggtcgactgttaaaaatgtcaaatgtgattaaggttcaatcatttgatacgtgcgtgaatcttcattagctattatttcggctatataatattcattaaacttttccttctaagttctaaccctctttaccttttcattcaattatttgattggtttattgaatgcaaatagcaagttagcaaccattattctagtgaagacaaccctttttgtaacgatttgacgtggtcaacgaaatgggtaaaacgtcataaaagcaaagccatggattatagaggtacttataataaattattacactaattagtaattaccttcagatttaaaattcgttttgtaatatttcaacaagactacgctagaaaatgatcgctcatatggttattgtattttcatttttcccacgtatataatctgaaaattataaataaatataaataacattatgaacgttaaaaaattctcattacatgaagttacaagcaaactttaaatcatagattgacctagaaatttagacaaaaaaaaaagattgacctagactatttgttgatgattggaattatatatatagtaatgaggaagaaaatatctgataagtatttacataaatatttgtcaatgcattatgcaggtctgattttggatgttgcatgacacatcaatgtcattaattaacacaagcaattagattacatgtttggtccacaaacaagtatatatatatatatatatatatacataaatagttttataaagaattttaaaatgtttgttggcgtaaattgactgatcatttggtaggaaatgattattataggtgtcacactcaatattaaaaagtagtaagttatacatattttgctgaaatgtttgatacctaatgtgtaattccattggctaattgtgatttgtgaagctaaacaacatagaaagaagacgtctaagaatcgtgacaacacaacataacatcaatgggaccactatggtaaaacatattcgatgaactaatgaacaaatgtatagagccatcaacatgtatgattaattaaactaaataactatgcttattgcagaaattgtgtgtcgtttactttttcgtcttatcataatcacttgtatcaagttgtacgttagcccctatggaacgtgaggacgcttacgtattcataatactaaaaagataaacagtgtctagttcttttgtagccatttttttgggtacttaaacactataaattctttaaataatatatcactgttttcttttgataaacgaaataagaaaccaatgttgtacataagttctgtgttatggttgacgtgataggtaaatgttgtcaagctaatcgtaagtaattaaactatatgattaagttattaatgcgtcactgatatggaatatttttgtgatctgttgatggacctgactttaattctcgattcttaggaattaggaaatggccaagttgaccaacaaaaaatgtggcgggtgtagtggaacccactcaaaaaaatcaggcaactttcgtaatttaatgaaacatttgggggcgaaaataaggaaaacgtaaaggatgtgaccgacaaattatttagagccgagacgtaattgaattggacggcactgccacgtgtaagcacgaaactcacttgggtcacagtacatgcggatccagaggatcttttatactaatccaattagactcatccacgtgtcaaattagttaaatttaagttttttttagtccgaaattaaagttagaatattaaattaatttccacacacaatcgtttttcttagttattttacaactagctagtataaacgataaccaaaatggatgacatcaaaataattaattaggccaaaaataataatatcagcagtcaataataaaattgtgtatgcatgtgtcatggtaccattgtttcttaagctcaaaacatttatgatgagcatggaggaatatgtgatttatgttgacttgtcatgcatgtatacaatttatagcttcttcagtcaacaaaaaaaattgaaaatgttaacttctctaaaaggagcttttccacagatttcaatcagttcatgattttctcgatataaagtaggcatgaaattgacgaatgaaaatgtatgaattgaagaaactatataatgaaaaacaagaatcatcaataaaaatcaaatgtttcttacatagtttttttttcttcttcaaggaaatcaactatgttttgtttttttatacaatcagatcattagattaatcgtatgtttttgtaacttaacttatgttgatcagcttcattaaaatgagagtttattcttgtaaacaaaaaagttagttgtgatgactaatatgcgtttccgaaacgaaaccctaaaccctgcaatagaaaagggattgttgaacttaatttgttttgtgcacgagaagatggatgaaacagaattgttaaccaaaaatcttatgaacctaattccaaaaatcttatgaacctcacagactttgagaatcgtttaaatgactaatgtaaagatgtgcaagcaactgatatgaagaattgttaaccatatattgtgatatctcatatttgtatatatatttgatatatacaaatatgtttgttccaaattttgttacaaactacacagccaaatataagaagctatcaaatattatttctttagcaagtttgaattaatcaaacgcaggtcattataaattaaatcataacaggtggtataaaaacaacgtattttgttaaatttaagtgattgtagtcttagaattatatataggtcttttgttagagatgaatagttgatttctgatgtatttcctagtattacatcattaacgcaatgaccatatataatgatatagacaacgatgacagagaggtgactaagttaacatgttatgatcctcgtctgaataaactagaagactagccgcatgaaaattcttagttaacaaaaaatgatgttgtctatatgtatatctactactaatatcatgaacccaaattactcaagaattaaagaaataatattcctaacacaagttggcttttcgtaaactaaacttacggtattgttttatgcatcgatcataatgaatattttaaaacactaaaacatggttaaaaaaaaaagtaatccacatgcgattgttttggattggtccttttaaataaactaaagttttggcagagaggaaccaagtaaaaatgggcattatctaagaatggtcctaattccaagaagatattacactcttttacagattggacccaaacactcatgtgaagatgaaaaaataaactaagaatacaaaaagaagaaaataaaagaaaaaatcagagatcccgtcggagaaagaaaaagagaagatagagagatacaagtaacggcttccactaatctttcgccttctacatttttgctgctccgtccaatttttgtgtctataaaataagacagcttctttctcttgactttccaaattcactcaactttctctcactccttttttctctctctctctctatcctctacagagctcgcagcaactagcgcaggtactctctctttctcactccttaatctagatactaaagctgatcattttcatatctctcagtaatccgtttcgtctgatcgggtaaaacacacttccaattactccggttccgacctcgttgactttttcttcagatagattccaaaaaagttctcatctttacttgttcaatctcatagattccgatttgggtctgattgttacctctccacaactattgggttcctctcaaaacccttcgatttcttgatccatccttccttaattttcgattctcgaaaaccgttttcacaacttttttttataaaaaaaaaaatctgcaaaaagatctctctgataagaatttttaaaaactttccctttatggatgctctgaaacataaaagagcttttaagtttataccttcccttatattctctgttttcaaatctgtcagaatctgatcactcttttctttttatctacttcaggatgttggagaaggttgaaactttcgacatgaacagagtcattgatgaattcgatgaaatgactagaaacgctcatcaagtccagaaacaaactttgaaagagattcttctcaagaaccaatccgccatttacttacaaaactgtggtctcaatggaaacgctactgaccctgaagaagctttcaaatctatggttcctttagtcactgatgttgaattagagccttacatcaaaagaatggttgatggtgacacttcacctattctcactggtcaccctgttcctgccatttccttaaggtaacttcctctttttgctttatcattgatgattctgtttctcagtgtgtgtgtttttgatcatcagctctggaactagtcaaggccgtccaaagtttattcctttcactgatgaattaatggagaacacattgcaactgtttcgcactgcttttgccttcagaaacaggtatagtttaaatttgtgtttatgtttcccccacacacatttcacacttttctctgttccatccattgacatgaacagagaaactagtgatgttgttacttaccaccgactatgccttaacatgtgatgtttttcttcttgtacagagattttcccattgatgacaatggcaaagctttgcaatttatcttcagcagcaagcagtacatatcaacgggaggtgtcccggttggaaccgcaaccacaaacgtgtaccgcaaccctaacttcaaagctgggatgaaatctataacgtctccttcctgtagtcccgacgaagttatctttagtcctgatgtccatcaagccttgtattgccatctcttatccggaattctcttcagagatcaagttcaatacgtctttgccgtctttgctcacggtctagttcacgcttttagaacctttgaacaggtttgggaagagattgttaccgatatcaaagatggtgtcttaagcaaccgtattactgtcccatcggtccgtactgcaatgtcgaagctgctcacacctaaccctgagctagctgagacgatccgcaccaaatgtatgagtttgagcaactggtacggattgattcccgcgctcttccccaacgcaaagtatgtttacgggatcatgactggctccatggagccgtatgtgccaaagctgagacattacgcgggtgatctacctcttgtgagccatgactacggtagctcggaaggatggattgctgctaatgttaccccaaggttatctccagaggaagctacatttgctgtgattccgaatctcggttatttcgagtttctccctgtatctgaaacaggggaaggagaggagaaaccggttggtttaactcaagtcaagattggagaagagtatgaagttgtcatcacaaattacgcaggtattaccgttgttttaaggctggaattagcgtagtatcggtctcgtaatggatgcttataattctcatttgatccacattgcacagggttgtatcgataccggcttggagatgtggtaaaggtcattggtttctacaacaacactccccaactaaaattcatatgcaggagaaacctgattctctcgatcaacatcgacaagaacaccgaaagagaccttcagctttcagtagaatcggctgcaaagagactctcagaagaaaagatcgaggtcatagacttctctagctacatcgatgtctcgacagatccaggacattacgctatcttctgggagatttcaggagaaacaaacgaagacgttcttcaagattgctgcaactgtttagaccgagcattcatcgatgcgggttacgttagttcccggaaatgcaagactattggagccttggagctgagagttgtcgcaaaaggaactttccggaagattcaagaacattttctcgggcttggttcatcggctggacagtttaagatgccaagatgtgtgaagccaagtaatgctaaggttctccaaattctgtgtgagaatgtggtgagtagctacttcagcacagcgttttgactcactaaaattgtgtgaaatcaaagaaagtggtttttagttgtttatttccgtcgttgttgtctttatttgtcaatatagttttctttacgttatttaattgagcataaactttttttatctttatagaatttgtatcacagtggttttactttgctttttgtgcaattagtgtttgggaaataaatagatttctgatgtgacgttacctttattatacttggaacaaaaaaatcaagattcgaataattgattgtctgtatggagaataaaattcggataatctaatctatctcgatctgacctgaaccatattgtgaaaatattgttttatattacgatattcgaaacaataatgtacgtgttcgacaattgaattttggtgcttctctcaaaaacaagaagagatcataaacaattaaaaatttagagatcataaactctctaaatactttgccaaaacaaaaaaaaaactctctaaatatagatagtggtgtgattttgtgtgagaagctatacgtgactacgacattattagtgcgaccgatgtttatttagagagttctaattacgaaaaagtaatcatagatctacatatagtccactaattgaagtcattatcttatagtagaatttgataggatccatttgaatttccgagtaagtccactaattgtgtatacttcacgttataaaaaaaaaaaaaaaggaaatcactcaaacaaggttaaaaggaaagttaattccgtttacgtatgtgggctgcaaaaaaaatggaacctaatcataacggtaagagaatactaccgtttgtatatatattactgttacaacttacaacaataatatattctcttactgcgtaacaacaacatatgaagctaaattatttgagtgacttgacgttgtttagtctcattatactatagtttgttctcgagcagatccactaagtagtctgtagcgtaatctagtggttgttgtatggcttgtctcatgaaacatgaaatcaaggattatactacagtctcagggcaaattagaaagcaaataggaagtggaagttttttttttttcttctgcctattcaattttctgctttgtggatgacgacataattatggattaagtgccaaaggactgatgaagatgacgaaataattatggattaagggccaaagatatgtcttttgacttttgtgagacttgaaaagtaaaaatacaatcaatagacaaaatcgaaattgaaatatggcatgatgaaatattgctactttgaacaaattatagcaagaaaaaacagctggaaattattggtaacagtactgataagttgtcgtgaatttggtacaatatatctcgtgattttttactataatggtcacaatttatcgtttatactcactaacacacgcacacacacccacacccacacacacaattctatctatttggccctccctatataacaacaacaaacttcgatacataaacaaagcaaaacaaaaaacaccttaaaccacttgtagaaacaaaacttgaaattgtaagaaatcgactttgagagaaactctccagtccttgaataatgccaaacacaagactctgtggaagtagctcagaagagaagattagtgatggtcgtgatcctaaaatctgggactgtgatagtactctctatgattcctacgaactcgtctcctttgttcacatcatcgaacgtaaactaatgcctttctctcctctcgctcggcagcctggtttgactctacgagctttgatggataaagatagcgaccattgttcctgtgcgtcgactaagaggggaccttgtattcaccggaggaaatattggtggaatggaaagaagaaagacgaaatgaaggaacgaatcaataagaagaagatgtttgattttagtttttggtggaatttttgttgtaagaacttgttcttctaatatgtaagcaaatttctatgccgagttgtttatgtgatgaaagttgtgtgtaggagcttgtcttacttcaaaattaatcgaagaaagtgagttcactgtgctcccatatttgctataatttacaaagtgaattttgtgcctagtgggcttatggttaggcccatataggcccatctcttagggtccgacttgagtacgaaaaccttattgatctcttaacaacaataacataaaggaagctactactgtattctctagggtttctattctctatttgctttaccttttgtattttgtactttgtataaagtagatataggcaggtaaccttgggtcgaacgaccgtcttgtaatttttgtttgtagctttgtttctttctcaaatgaattggaataagtctgattccatatatttccctcgttcaatcttttgaaaattactaatgaacaaatatagcataaaaattcaaaatcagaacagttcaagttataaagaataaatgagaaatagacaactaaccactttcttccacaccctcatcaatttaatgtttcttttcttttattgttgtcccaaaaccagtttggcttttgaccttaaccttgacttttctccctctttgattgatgttttttttcagcgttaatttattccagtaatttcccttagttttaaacattacaacactaactactaaatgtaagtaaaaaagtaaaggtaaatctttaaattttattccttggctgaaaaagaaagaaagttacgagttacaaaaatgggcccactttgtagattggcccgcccaaaataaatcgatttgaaactcaattttgtatagtcagtctctctcttcttcatgtttggtttcagagaatgaaaggcttaacaagagcttcttcattgactccatcttctgcatctctttagagtttatagatctaataacagcaataaatctagcttcttaagtcttcttggtttttcttctttaattgaatgctgagtatctttcttgtcagctcagtgactattttcgtttgtttgtaatggctgagtcgtcaacgatcgaagcaaggctggttcgatgtcccaagtgcaagaatctcttacaagagcctaaagattgccccttttttcagtgtggtggttgtggaaccgttctttgcggttagttcccatttttcatccttctcttttgctgtaaagagttcaaccaaacaaaggatagtttcgagattacttcttcttttgatgtttcaaccactcatccagtttcagattctgtttttttttttaccatgacgtcgattaggtaatgggtaaaaaaattctgacccaaaagagtttttgtttgtttgttttgttattatgtatgtaaagccaagaacaaggaccgtgaagctgatttattgtcggttaagtccgttgaaaatagatccaaagaaattgaagttacctctggctcaagtgaagaagaatctgattcaaatgcttcattaagacaccaacaagatggtcaaactgagacttgggatgttcacaatgatcctagttcgaaaatgaatgttgttgattcgggtaataacgattctcaaccaggtttggatcagattaggaaaagaacaaccaagagatgcgatttagaaggtttcagattctccacttctaactattttacagattctctgtctactgatgaagcaattgagcaagacagagctggactggtgagaaaattggataagctaaaagaacagcttgttcaacctaaagaacagcagatcccgagttcgtcttcaggattccaaaaggctccattgcgggttttcagctccgggaggcgtattgcaggtccttcctactaccagtattattcagaacccgaacctccatgtctttataacaacaacagtgatgtttctctacatggtccgatgcataacccggctaatgttccagcatatggtgaccctcacgggttcccaatgcatgaaagaactctgcagccatctcatctgcacaactctagacagtatattggtaataatggtcatgatgtttttgatacacaccctcataatgggatgtttcatcaatcaacttgctcttgtacccattgctatgacccatatcatagagcttcaggctcagtgtttcctccctcagggttgcctgatgctctgcgtaatcccggtttttaccctcatgagagaagttttgggtttggtacttcattgcatagcccgagaacctttattcctcctggttctcaatctcctggaccacagctccgaggaagatgcacgagtggatttaaggatatgcgaatgaatgcagtttctcgtgttcacccctctaaacctgtatcatcttcaggtggttctcgcctaattcaacctgtggctggtggtgcaccatttataaactgtataaactgcttcaaacttctgaaattgccagagaaaatagattctgctacgagaaagaaacagagaatgcgctgcggagcatgctcttgtgtaatagattattcctttgttgataagaagctcattctctctacagatcctgcttcagcaagaaaaccagaaactcatagtaggctgcgttgggaaactactgctaacttctcttctgatgactatgataatgctgcttacgaattccatgcaatggatagaggatcagccgatgtatcaactgctctggttttgatctccaacacagctcaagaaatgcagattacggatgctacttctcctagcgtgtctgaagacgagttaagttcagacagttcaacagttaggaaagttaatcttgcttcacctcttcacaaacaatttgaatactcttcgatcaatgtaagggaccggtctgggccaaggagccaaagctctcgttcagaacaggacagggtcacactgagcaaaacagccatgagacagaactctatgaaagaagcttcagttgcaattgagatggacgttaatgactactctcacaacaatgaagtgtcacaagattctgcgaatgactgtacagatgatcagggaagaaccaagaagggtggatttgcgagtatcatgaagaatagcttcaaggatctgaagaaatccatacagaacgaaggcagaagtgatgtctcaataaatggtcatcctgtagctgaacgtctggtgaaaatggcagagaagcaggctggaccaatccgaccaggaaactactggtaccaggagatccttcaatctcataaattttcctcacctactagccctaatgattctcttctattctgttgcttgttaccaggtacgactacagagctggattctggggagtactgggaagtcactgccttggaatattaccggtaaacatcagctaacaaatcatatttgtcaatctcttttcgtttttttcagtatgtgtactaaaactggcgaaaggtgactccttcctttcttacagcctttcattgaagagctcaattacccaatgccagagaattgcgctggcggaaccacaagagtctttgtgaacggaagagagcttcaccagaaagacctgcgcttgctcactgccagaggtcttccacgggatagagatcgatcctacactgtttacatctcaggtagagtcatagacgaagataccggtgaagagctagatagtcttggtaaactcgccccaacgtaagctttcacatagcctataacacctctctttttcgccttacctttcaagttctcatgtatctgagtttggtctgtgatgctacatggttagggtcgataagctaaagcgtgggtttgggatgagagttccgaggagagctacatgaagaaatataaagagcctctccattgtgttgttgtattctctgaacatccgtgttagattatcctaacattactaggctaaacttttttctaactttacagagccttatgatcaatgtaaagaatgagaaagtggaaaatgaaatatcattattagtaacaagaatctaaaaacaccacaaagatctgtgtattcaaaagcttacaaaagcattattgagcttatacactgcaagaactaaattgtatcaaatcacatgatcaccacattttgtagcatctctccatttgtcttctcacttgtttgttgagacattcttcttctgctcccctttcgttacctgatcatcagacaccaaaagtcagactccaaatctaaatctttggatcaaagttaccaacaaaaaaagatgaaattggtttatgtattcaaacatataatctccagaagatcgagaaagaagcttagtcgcctgatacggatcaaattcataacctttatcaacacacaaataaaggcaatcctgatccatcaacgaagactatgaaagaacacaaattttcaattaaaggttgttcctttcgtgcctcaatgtttcaaaaggccaaattactaactcatcaagagtatttgtgatccgaataagatcaaaggaggagcgcaacacatgaaaaattgtgaagaaggagagaaaaagcagccaatgaagatatagatctaacgaccaaacaagagaaagagaaggagaatacgttttgcaagacgaatccgacggcgacggcagcaattaccgctccgccgaggataaccggtgggccggacagcaaactccactttcggtaaatcatcttttctccttcttcttcttcttcttcggaactttcgttttcgtcttctccgactatctgaaagattcttatgatgatgaaatcgacagagtctcttctcgaagctgggcttgatagtttttatctgggctcatggcccataatgacgatatgttcttttcttagacaaaaagttgtaaatgaaaaaattatattcttttgactggaattaatttttacactgcttgaaaatttgaaagatggaagagttttccactttttaatctgttcatcctaataattgcatcacttttacaaagcgttttcataagtcaatcatactaatgtgacatttgaaatgtctttctatcaatttaatcataagaattaacaactttaactcacaaataaaccttatataaaatcctttctttattaattgtcataaagtacaatccaacttcatagggaaatcataattcataaaccctgctgaaaaacaatgaaaaaggccaaaatcatgtaactttagtcctataagccaatttttatccatcggcaaaaataatttttactatactaataagtaataactaataacccttaaattaaactgaccatctataattactgccattaagagagagacattacattcaccaaatcaattattcaaagctacgaccacaaccaatcctgtccgaaatcgataatattgtccaaagacgagaaatacgaatctgcagtttcggaattctcaacagcagcaggtgcagataaaacctcgctggtaattgcagaccctgatgttgcaggagaaagatcttccacgaaatttcccaagaaaaggttacttttccacacaccgttctcaatctcatggttagagaaagaaaacgttctgaaaatgttcttcttgttctccagatcttcaaggcttatcatcacttcttcggacttggtcggtttcatgtcttccgattgctctgtaacatgtactctgtttccttcaaagatgttcgtgttcgtcaatgaaacagagaagttcgtcgtcgtcttcggggatgtgatgttgttacaagtgtggtttccgagatacttcacttcgaaaagggaaggatctgtgtctgatttctgaacttgcttcactgctaaacagtcttgtgtgaatcgatgcgtgcatctgtaatatgctctgtaaacaaaaacagagacataggatttagcaaatatagcaaaagaaaaattaaaactttgaaattcccagatgatgaatgaatgataatcacctaggatttttggatccatgaatctctttttgcccatattttctccagcagtgaccatcatcaatagagccattttcttgttctgttgcaacaaaaaccttaactttctctgtgttcttctccgatactttcctgaaaatcaccaaaaaaaaaaacagaggaatcagacacatgagcacagtttggaactgaaagagagacaaaaaaccaatcttttagctcaatttacctctttttgaagacgtttttagaatcttttccatcgatctcaaggcttcgcttaaggatgttcttgtcttggttgaagctcaacatgaaaatggcattctggtaaatacggaggatatcagagatcaaggttttgttggaatcgacagaagaagtgtgtttgagattgttcatcaatcggttagcaagctctttccctagttccaattcgttgatcacaagtttctcttccatcatcatctttgcattcacttcagaaaattaagaatcttttcttagattttcttttgagtgagattggtgggagatgtgagtttcgtctgtgagtatctagatgtatttatagacatgaatgatggagattctatgatggtactcgtccttgtgcttagacaataagtattaatttttatttttgtatttattattggtttcaatcttcgaccagaagttgtgtggaaaagagaaggatcttggagagaaattgacataaaggagactattagtgtttcactctttttttatattgctagaatatataaaatagtataaaactgctaaatttgtcttaaaatattacaaataaaattggaatgttttagtctaggggttactcgtttctgataaaaaaaaaatgtagttgctaattccatacctattaagcaactataattcttatcttattattttcggtctataatttttatatattagacagactaatgatcatatcaagttatctataaatcgtcaactaactccccaatcttaatagaacccatatatggtgagtctcactaagtcggttaagctaatcctattttatctacaaaaactaacaaataataattaaagttatagttattcagacgagtgaaccaataaacaatattcttcaaagacgtcctgccgcgttagattcggttgaaattgaatgtctttcttttgtttcgctgacgtgaagactcgtgatgtcataaattgcccaattattgcgttatttcgaattttaaattgtagttttaaggtagctaaattatgggttttatttacaacaaaagagttatttattttaaattaccaatatatagtcatttattgcatgtatttgcatatatatactctatactcgatttacatatattttatcaaccatttttttatataggatgttgattatgtagttagttatatttttagggggtcaaagatcgaaattaatcaaattttagtggccctaacaagcaaatcaagaatctatggatcaaatcaaaaaagtatcaaaccatgcaggtgtagttttgagaaaatataccaatgtgtctttttcattcacacaattgacagtgacgtattatcattaattattaatatgatttaaattcgtaatcactatgatccatcatccatatatgttgtagtattctattcaccaatgtatataggtttttaatagaatcgaacagaactacagaaggatacagaaaaaaacacagttagtactttaccaaaaattaaaaaaaaaaacaaaaacacagttaatatataatacggaataaatgcatttaataaaatttaaaacagtgattttataaagtaatactatattaagtcataattagtaaacaaaaaaaagaatttaaaggaatacaaactgttttattatttattaataatgatatactccgtatcataacgatttaccttaaaaatcgtaaaatgaaatttttaatcatggcgcttacatccatgattaatggcagagcatcgtggccattatgtattcaaattttgttcgtcgaacaaacaaattttgtgtgaatttagatgaaatctaaccttatgcatttgccatattcatcgtactgaattcttcagtttaaaaattgtgaatatcgtagataatatattgatatatccacgttactgtagtactatatcctatgtttctcagttatcaactttgtagctttctgactccaaattaatatattttagaggctgctgtgctgagtcgaacttaattaattccttaatactagtagaaaaataatataaattcttttgaagataaatatttattctacgacgcgtcgcttgtttaacgcgtctggtcaagggaataatttatgactaaaactaaattcagtaaaatgcccgagtggcgtatatacatgcacatgccttttgtgataaaaataatagctttaatcacacttagtaaataattattcaagcatgtatggactatctatgattaattagtgccataagggtttattatcttaatttgggctgctcttagcttgctttgaattgataacaactaacgattataaattgaacaatatgttttcaacttcttctcaaatcaaatgatgtcttatcatctgcttttgtttatgtaaagaacattcccttgttaatgcatgcattagtccaccgttaccagaatggtctttaacttatttacatcggctagatatcaacatcgaaatgataagatcatagcttgacgaaaaactcaagaaagacgattaacacttaacagaatgctgtcaaatgagagcagttgttattaccttcatgtccaaccataatttaataagattatcttgtattaacaggattgtggtgtaaatgctttagagcaaaatacaaaaaaaaaacatcaaaattataactccgtacatgttatggtatcgtaaggaaagaaaactttcaaacacaatatcttcttatcgatgggatggataaacgttattgaaacttttggaatatttaccaaaataaacctacaccgatgaaatattctttgaacaaaaataaaaatctacatttagttttggaaactgtctggtaatttccacgaaaggtctttggactttgggtgcgtgttgaaaaagatataactctccttatacagagacccacatgtcacttcatatgctgattaaatttaatttgtacaataaaattacttttgagactaataaaaactcttacgccttaatagaatttaattaagggtatttagtaagttacatctacatgtgaatttgttgaaattactggtcttgattgatattctctgtttcaatttaagcgtcatttcagaatttgaaatatgtttataaaaagtgtcattttaagctgtttaactgtcatttatgtttcaatgcatgtatttgataaaatttctattttttgtttttactgttttagtatgttggccaatgaaaattttatagaataaattcataaaataaaaataaaaatagaattattttcttaggttatgtgatgaaaaacactttaaataatactcaatttgacaagatagtagtgtctgggaccatacaggacagatagaaaacaatcatttttttgttaaatagatttttaagataagctaagtaccaaaaaacacattgaaaccaaacagcatatgagtttgaatttgtttggtactggaagagtttatatagaaattaagctcatatttcagccaaatgcaattgaaaaaaatcaaagtgttagtcacgccaagtgtgaacgcagaaagtcctgttagatgataagcacgtgtgaaaacatcttaacactttcattgtatttgtcttttagattaaagttgtcggatttctcagcgttgctatgcgcaagaaaaaaaaatcttggccacaaacttagttaatactgtagcatatggatatatgtagtttgcaattgcatgtgtaacgggggagataaaatgataataaacaatgagagatcagggaatttttggaactaatcgtaaattttaccacgtcattaatcgtatagttttgaatctttatattcaatccaaagaattaaaaaggatgggcacaaagggtagatatatatgcttccttgattgaataaaaggaaactttgcattttatatattcgatgacgctactgaatctttattttctttagtgaatacaagagaatgaaacaatgttacaacagaggaacaacaattaatatcatatgggatgatccctaattccgcttcattaccaacaaatttttttagcattgggatggataattcgtaatgatcgtggtattttttttggcaggtaacagaagctattcaaaaataagcaagcaaaacaaaaaataataacagttgcatacacttgcattaggccacacatacagtgaaacggtatgattgttttaaaccaaatatctaaacggcatgcatgtgtctctactgttgtaaaatcgttgaccgtggaaacattttatcttaaaagtctcaacttaataatgggctttctttatggcccatataaatgagctacctcgttgacccatatcgtaggccacttacagattctcatttccgatcacgaaaaaataaaccatcttgggttcagtttaagcattcccctatgcagaagaaataagagagacctttcacctttgtttgtttgtatgaaagaacaacagtaatttttttttggataaaatagcgaacatagttaaatttaaaatttacagtcgatcttaggaaaacagactttagaaaagtgtgatttatctcattaaatcacagctactaatactatacttctatagagggatatatcatgtgtcgatggaggctggtaaaaatttgaaattcctaagcaattttttcttcttatatatatagataattatacattccaaaatagtaattcaaggacaggtacatttcctttttttcttgtcttgtgaattaaggagaggaaaattttcttttaatccaaacaaaaaaaatcatttcctaaaaaagtctcttcgtctgttggcaaaaacgacgccgtgtttcataagccaatatctctctatctcctccggcgtccgtcccgggatccttccggcgatcaactcccacctacgcgccacgtaggataggctaacagtcagtgttgaggaacttacacttaaccaaataccttttattccgataaaaaccgcataaagtttgtaattcggttaaaattctatggaaccgaaccaaaatcgtaatttacactttgacttcatacaaacatgctgtaatcaaaattgaaccaaactagccaaagtgagttctgacataaattaagaatatgttttgctaaagaatcatatataaaaaaagaaactgaaaacgaaatcttgattaggttttgctatttgaacaactaaaacaaaaaacagagaataataacaagatcaaaaatcaggctgaacacagtcattgacagctcggtaagttagacccaataatataatagaaaaaccaagaaaatgcataaataaacgaccgactttgagatcaaaatctaagcagattcgacaaaacatgaaagaccaaaaaaaagagaaagcaacaagatggatcgagagagaaagagtctctaacctgtcgccaacgagtttatacatccgagaaatgagatcttcttcttcttctgacatcttcacagcttcccattcgatactactcacctctgcgaaacaaacatacaaaatcagactcaaaccgatcaaaaagatatagagagaaacaaagagaaatcagaccttcggaacaagaagccttggctttgctctgtctccgtcgtcgtttatccattttttccgccttgtctgaacgaaacatcgaactaatctgaagacacgaaacacacagagaaagagagagagaaagagaataaatctcgagaaacaagaagaaatgatttcctcacgaggggaaggattaatagtagctttttttttgttgggttctcggaaaagaaaagagtgagagagagaggggctcgaaaaggaaaagaaaatcaaactgattattatataactgcgcatgtctgattaatcctagaataattatttatttaatacttatcatcatcctccattatttaaatattgactgattaagaaataatataattcgattgagctaaagaaaacgaatctgtaaactgtagtgtttcactgtgtgtgtgtgtgtgttgcttccaacggcctttagttcatagagaaagaagaacgacagatacaaccataactacttattttaaatcctttgacttgcggttgtaaaaattcctcgtttacagacagttggagaaatagtagcttctcctctggctttgactttcgaaatgaccagtatgtcccttatatgtgttcttgtttctagtttatttgctattctacattaaatatacattctgtcaaagctacttatttaaaaatataactattcaacaataacaaaaaaattcatttgttgcaagagaaaacaaataaggactgtgatataaagttcaggaattcgatttgaaagtttgatataagaggaaagtttggtagaagagaacagcaaaacgggaaaataatattataatcagaagagggtaaaaaaagaaatagttagttcgagaacatatctctctctatgtatctttcatatattcctttggtctgatggtaatgtcgtcaaaagtgggcacaacacccgtatggttgtgtgcctctactggtccgatgtggtccgaaaacgtacttgtttttcttcattaattatatatttttgattacaaatatgctttaaccacatctcgagaccggtttcattacatatttcaaggtttcatctattcatttttatatcacaaatggaatttttgactaaatggagtgagacgaaagagcaaagaagcacatttgttgtatacaaagctttgactcgcaaaaaaaaaggcatgaatcagacaagtatctaacaacaattatttatgacatgtggtggttaaagctatttaataacccaaaaagacttcgaagaatatatgagattagccccccttttttcattttcttaaaaagatttgtataagatctgcagtgcgaaggtgagatacgtctatatattctataagatgaatagctgctctagctactttttttgtgtggtacatgttatgataaattgaaaacgtttaatctatgcatttttaagtacatgatctaacagtttatagagataagttgcatgttttcgtacattatatgctaatgaaaacagttatgttgaatgttagttgctgcatgttgttgtatgggttttttcatgacgaagtggttaaagcgttatatgttgccctaataagccatgggcctattcaaaaacaatatgggcttattgattattttaaattgctatcggccagcttgagcagttacttgaaaaggcccatgaatgtttacggagagtacaacacgttgacacgcacaacaacagaaaaagaaaacacaaaagcttatcaatcaatcaaatctttaattatattatttggtcggtttaagaagtgtttacgtggttatcaacattaacttttgaattgaattatacgaaacggcaaaaagattatcaaaagtgttgacttgtgagctaccgtttttgccccttaaaagtctcaaattccaaggcgataaatggtcaagcaccctccacgctcctcctgtcttttattgccacgtgtctaccaccgttcccgtctgaatttgtcagcatctgtatgccacgcggcggccagtttccccgacgttaatttctccggtaattatcacacgtgtcgtgtagtcaatggatattaacttcgagcttattttatggagtttttaattgttttcaattagcgtttttttctcattggtgggtccacagattaatggaactaacgaaatataattggtgaatgaaaatgtctgtttcattgaattcatgcgtttctattaaagaagtcacagtttttaaaatgggttcacgtggtcgagtacttagctcgtgagccggcttcagtgtccatagtgtattactcagctttgtaacaacattattagagagaataattcactttcattgtataaatgacaaaaacaattaataccaacttgttttgataattacaaagtaacaaaatagaagcattcagagttttgaagttatatattcatttgaaatgtcttgaaaaaagttatatgtctttctttgacaaaacaaaattcagtaaatttcaatcaattatatatttttaaaagtactatacgcacacaattctttatacaacgacaaaaagaaattttacatctaaaaatttcgtatatagataaattaacacgtttgtaaaatattgaataaatattattttgtcactatatacacagtaatcacatgtaataaattaaaatcaatcgatatgtttcgttagatctctcaatagataattattgatataaactagtacgaaaataacataacatacacagttacacatacataaacatataatatttgtaccaaaattattaagaaaaagaaatttaaagctctcaatcaagagattttgtatgatatgaaatattcttctgatttttgaaccattttgcattagagaaaagtaaataaaactaaagtggtcctggaaacataaaaaaataaaataaaaatagagaaagaaagagatgctattcctggagactgagagtacagtggaggtccatgacatctcgtaacacccaacaacactcaacaacttgccaaattagctttcactagctgttgttatacattcatttcttaatttaaattggaatatcataaataacaccttataacattataaccaaagcataaactacatgcatatattcttagaagacattaactttttaattaatttccgattatagtgtgattacgctccttgcaaatactctacaagctatgaaagtaaaaaggtattggctactttcaccgccgctactatatctcgtgagtcgtgagtgaagccaagccaggctattattaagttgtgtactactcattccgtaaaaaccaaactgaaacagaactattccttttatagttaaacaccgaatttaattctaaactcaatcgtattaaatgagaaacgtaccattactttaaaactcaaactgaaactaaactaaaaatccggtaaaagttcttttactcatatcattggaaatagtttttgaagcaaagtaaaaaacactagaatagtgtaactagaaggaactactaatataaattttggttgctggtgagattctttttcctccttccccagcggacgtctccgtctcttcttctgcttctaacttgctccaaattttcatttcaatttttttgataggacttaaaaattccaagctcgcttatgagagtaatggcgtagcaaaatctttatctaactcttggctcttgtctttttttgtttgtttctcaacctacgccggatcttgcttcttcgaacttctccgacgcatcttcttcagattccgcagaagtttgcgtcgttttcttgaatccactcaaaattttattggaagtttgtgttgtttttactagctctgaatctttagagggctcaaaaattcgtcgagaaaaccagtctttggaagtgtagcattttggattcgcttgtgacttgaatcttgaatattaggtgaaaccgccttggatcttctcgttgatctttgtcgtggacatttttttttgtaaagcttagtagattctctaatatttaattagagagtatctgttcgtgttattctttattgttagataatgattaatcactgcacacaatcttattgaattttcctgttgcttttctcggcttgaattctgaagaagtagttagagagatggctttgctatatactcttgctagatctgtttgatttcttagattcctgatttaacgatttccttctaatttgattatccaaaatctagaaatggtaaaagtttcttgagttaaggttcatttattttacatttgactgtagtttttttgtgtgatttagatgcagacaggaccatgttgtgttttggattacttgagagatttactatctcaatagttcatttcatcgtacataatttttttttgtgaacttgtttaataggaatgatgatgaactattcttgttttgtgtgtatagtttgaagatggtaactttatgaattaattatttattacttattagattctgcagttgcgtcttcttgattcctaataaacaatgttaaagaacacacttttcatgcttcctatcattagaagtgtcaaagatgctgctcttttttaatcatttttcttcttacctgctgtattaacaatttacgtatatccaggtttctatttggtcaacaacatcagaaacatgtgtgctcagatgttgagctctttagattcaattgttgtgaacattgtcaaggagaatagtgattattgaaggatgcaagatttttatattcagctctaatgaagaacggacaggtttgtccctaacacatcctcaccaactttttccttattgttataatcttgctttcgtatacttagataagaagttgagccatgatagaaacttcattattaagaatacgtgatcctttagttattggtatgcttgattggaaagaaagttgtagctactttagcattgatatacttagatttaccaagaagtgaagaagtaaaagagagtttgtataacaggagttgcagtcttctacccaagtttcacatgagtcccaaggtgaacagaaagttaatttatcagtagaagctccaatacaagattctggttctgtatctgcctcaagtaatgacggtaggaaagtgtcaagacaagatattgaacttgtaagaacactttgccaccttcctatctttatagactttcttgtaagtttccaatcatctgataaaaaaacatattctaaatgactgatgcaggtccaaaatttgatagaaagatgtctccagttgtacatgagcagagatgaggtcgtaaagacactcttgacccgtgcaaggattgaccctggttttacaacattaggtacaatcacttttgtttatttccatatcaaagtaacattgtgttagtaacttaccctttatgataacgttcttttgaattttagtatggcaaaaactggaagaagaaaacgcagagtttttcagggcatattacatcagactgaaactgaagaagcaaatagttgtattcaatcatttgcttgagcatcagtatcacctcacgaagtataatgtacattcaaaagttcctctggtcccaatgcagaacggtattcatcctatggcatctggtaagtctgactccttatatcacttgttggtgtagatggttcaatgatttgtttgtggtttcactattattataacactaaatgtttgcagcgcagtgaacaacatgcccatgggatacccagtactacaacatcctcagatgcatgctcaaggtcatccccatcttgatcctatgagctgtggaatgtcaagctgccatgtggttaatggagtccctgcacctgctaatttccaaccaatgaggatcaactcagggaatgagtaagaactaacttggattgagttttgtttttgcatttttggtgctttagacttaagaactaattcctactgttgtttccggtgcttggtgtagtatggtaatagatacaaccatggctgaaccaactccaatgattccaccaaatagtggtatgtcggatatgccagtaagtccagcttctgtggcgtcaagcggacactttccatttgctgcttcagacatgtcagggatgggaatggacacgtcagctcttgactctgctttcacatctgatgtcggaacttcagtagggttacaacttggatcagatggaggagctggaaattctagagaccctctcaggccatttgatcagataccttggaactttagtctctctgacctcactgcagatttgtcaaatcttggaggtaagctctttttatcaaatgccattgcgagtttagctcgaaaaactttataacatacgttggtagatgctccatgtacaggtgtactccatagaatgttgcatatcaatgatcttttactttgcagatttaggggctttaggaaactatcccggttctccttttctgccatctgattcagagattttacttgactctcccgaacaagaggacataggtaaacattagctctcactctccatctaaaaggtgcaatcttataagaatggtttgaacatggatgttatagatttaaaagtttcatgtcctatgatcactaaccaatatcttcgtttctgtatcccgtagatgaattctttgtggattcgattccaggacctccatgttctcagtcagaagaagacaagtcttaatcaagcttatgatatttgatcaatagaaacagtcttattatctagcaagcaagcattgtttgtgccgtttctctatattagagaaaacctcccaaaaggatttaaaatcttcttcttttttcctcttctaagggtaatgatcgatcatagattcatagacttagattaattgctcagttgtttgtttattgtacacctttattttgggactttgctaagcattgtataatatctcccaataatctattttcttgttggatagttcatcaatatgcatgggaatatctcatttttttccttctaataaatactccctattatagaaatctataaaagtgttcataattataactcgtggaaattaatttgagctttaaggaatgattgatatctttttgtgaaacaaaaaatcacaaaaagaaaatcattgatttttttttttttggttggaaaatgattgattcttttgtttttttgggtaggaaaatgattgattatttttgtagaggagaaaatgacgtactctaaaattcagaaaaaagaaatgacgtacgccaaaaaaagtatgaaagtctcttcaagactaaccactaaacaccaaacaagatataattttcttttttttttttgtatgtggagtagaaaaatcattgatttcgtatataggtagactaatcaacgtttgtggattcagaatttcaaatacaagtgtccgtgaattaaatccaagaccgtgaatgcataaaaaaaactaggtctataaagtgaaaaaaaatacaaatattaagggagtaactgagtcatcataactatgaaaaatatgattgtttgttatacataaaaaaattatgaccatacatatatattttctttttaaaaataatgaacatattgaggtaaataaataaacaacagattaaaatattatatatcatggtaagaaccacaacatatatatataagttgaattagtaaattaaaaatgttggatggaatttgctcattcactagaaaaattattttcatatttcgtctcaagaaaaaccaaattggaattgtaatttttttgggttgactgactcagtcttcgtcaaaagtcaactcaactttattccctttccaaaatttattattattgaaaacttgtctttttcatgtgtgttccaggctcgtttcttcttcacttagtttcaattcaaagttgtactaaatcactacttcgccaaaattagaacatcattatcttcgagggtctcttctctcttcatactacttcaagaaataattaaacctttttttcccttttaatctttcctgtcgggaagacttttaagtaccatttcttttccgggaaacaaattctcgaataatcacagaaaaataccttggttcactttttttactgtatagatcgtccattgaaatcaaggttttattctttaaaactttggtctttatttcacaacttctttgaacttcaaatagtttaaaatttactctgtttcatcaaattactctgtttcgtcaaattactctgttttgtcagcttgctcttttctaaaacgtggaagtaaataaaattttgacataagtatattttctcccacaggttcaagaatctgtggaagaaaacaatcagcgatgatgaatccccaaagaaacaaattcgtaaggtttgtatcaattcttccttttgatttaataattacgatgttatgaagtgatcttgatcttgatttattgatccaggtttaatggaaatgatgatgagttttcgaccaaaactactagaccatcagtatcttcagttatgaaaaccgttagacgaagcttcgaaaaggggtcagagaaaatcagaacctttaagcggcccttaagcgttcattcaaataagaataaagaaaataataagaagaagaagatactaagagtgatgaatccgaacgattcatatcttcaaagctggaacaagattttcttgcttctctctgttgtggctttagcctttgatcctctgtttttctatatcccctatgtgaagcccgagcgattttgtcttaatctagacaagaaactccagacaatcgcttgcgttttccgcactttcatcgacgctttctatgtggttcacatgctgtttcagtttcataccggtttcatcactccttcttctagtggtttcggcagaggagagcttaatgagaaacataaagatatcgctttaagatacctcggctcatactttctaatcgatcttctttcgattctccctattcctcaggtaacaatgttttctcaaatctgctttgcaagatcttggttgcatatctaatgaatatgaaatactatttttctttgcaatgacaggtagttgttctagctattgttccaaggatgagacgacccgcgtcgctagtagcaaaagagctactgaaatgggtaatcttttgccaatatgttccgaggatagcgagaatctatccgcttttcaaggaagtaacaagaacttctggtttggtaactgaaactgcttgggctggtgctgctttaaacctattcctctacatgttagctagccatgtaagaaaagattattttatttgattctttgctccacttgattaggttatgtttgggcaaagataacggttttaaccattgcgaaaaatggacaggtttttgggtctttttggtacttgatttcgatagaaaggaaagatagatgttggcgtgaggcgtgtgctaagatacagaattgcactcatgcatacttatactgttcaccaacaggggaagacaataggttatttttaaacggttcttgtccgttgatcgatcccgaagaaatcacaaactcgacggttttcaactttggtatattcgctgatgcattgcagtctggagttgtggagtctagagatttccctaagaagtttttctactgtttctggtggggtctccgcaatcttaggtttgtaacatctaaaactcttacttattacggttcggttactttttgttatctaatcgatgaaatcttatctttctgtgtgtagtgctttgggccaaaacttgaagacgagtgcctttgaaggagagatcatttttgcaatagtcatttgtatttctggactagtcttgtttgctctcctcattggaaatatgcaggtaatcatttctcttctcctttgagctcttaaaacaaggaatatccatatatatagtcttaaagagttctgtgatttgtagaaatatttgcaatcaactactgtaagagttgaggaaatgagagtgaaaaggagagatgcagagcaatggatgtctcatcggatgttgccagacgatctgagaaaacgtatccgtaaatacgaacagtataaatggcaagaaaccaaaggagttgaggaagaagctcttctctctagtcttccaaaagatctcagaaaggacattaaacgccatctttgtctcaagttgctcaaaaaggtaaccttttattttgtcccatcataacttcttgaattcactgttttgttttgtttcaggtgccttggttccaagctatggatgatcggttactagatgctctatgtgctcgtctcaaaacggttctttatacagagaagagttacattgtgcgtgaaggtgaaccagtggaggatatgttgtttataatgagaggaaatttaatcagcaccactacttatggtggcagaactggtttcttcaattctgttgacttagttgctggtgatttctgtggagatcttctcacttgggcattagatcctctcagttcccaattccctatctctagtagaaccgttcaagctttgacagaagtcgaaggctttcttctctcagctgatgatctcaagtttgtcgctactcagtatcgtcgcctccatagcaagcaactccgacacatgttcaggtaatactttcaattgaaaaaatgcatgttgagttaattataaaagttaacatattggataatgaggacatatcgtatacctatctcgtttctcaagtttccttcaacataataaccctaaatctttttattacctaccttgtatcttgtttctcaagttacctttaatattataacctaaacaactttttgtctccaggttttattcagtgcaatggcagacatgggcagcatgttttatacaagcagcatggaagagacattgtagaaggaagctctcaaaggctttacgtgaagaagaaggcaaactacataacactcttcagaacgatgattcaggaggcaataaacttaacttaggtgctgcgatttatgcgtcgaggtttgcttctcatgctctgaggaatctaagagcaaatgcagcagcccgaaattctagattcccgcacatgttaactttgttgcctcagaaaccagccgatcctgagtttcctatggatgaaacctagttgtgtatatagttgttgactctatctctatgtaatgtgatcgctagtattttttgcaaatgattatgtaaccagtaaagagctttatgtgaaataatcaataggaaaaattcttatagagtttagttaaaaaataataattaatggagacattaattttagcgagaatctcaccaccacaaccactgtaaatgttttgctatccaaaaacactttctaagtcctaagctttaaaagcatctctcattaaacaatttttccacatagttaggagagtttactagctagagacggtagacttatctctctattggtggtccagcttggcttcactctctcgaattgacgagtttagtcttattacgacgactttcaattgggtctgtattgactaaaagatggccaactaaaataatgatttaagtatatatttgaagatggtacgaaatgggcatgttgtgaaaagaagacaggtagagaaattggattttgtgaatattattgtaagttgtagggcaaagagagtgagactgcagagcccccaccgtagacgactttactgtctcttcaagtccatttagcttaccactctgcatccacatacatgagtctgtgttaaagctggagaacatcgatttgcccaccatttctcactgccaaagccatacccatatttattctctctcggtctctcttctcggtctctcttctcagtctctcactcccacagcctttagttcgagaagaccgaaggggacttcattttcttgtacgggaattaaaatattgaagattgacagataaaaacatgaatcttcagaggagaaaatttgttaggtagcttcttggaatttttatgaacaagtttaacatagcttcaatctagtatttttatatttacttttggcagtagtgatcatatcttgttgatacaggcttgatagtacgggagttgatggaaaattgaaaagtgttagaggacgcttgaagaaggtttacgggaagatgaaaacactcgaaaactggaggaagaccgtcttgttagcttgcgtggttgctttggctattgatcctttgtttctgtttatccctttgattgattctcagagattttgcttcactttcgacaagacacttgtagcagtagtttgtgtcattcgtacttttattgacacgttctatgtgattcacatcatttattatcttataaccgagaccattgctcctcgttctcaagcatctttgagaggcgagattgtcgtgcattctaaggctacactgaaaacacgtctcctctttcacttcattgttgacattatctctgttctccccattcctcaggtattgttcccttcgtttgtgtgtgcatgacatctacttttccatgctttttattagagatgtacatgcgtaattataggtggtggttctcactctcataccactgtctgcgtcgctggtgtcagagagaatactgaaatggattatacttagtcaatatgtaccaagaatcattcgtatgtatccgctttataaagaagtgacaagagcctttggtacggtagcagaatcaaagcgggtcggagctgctttaaacttcttcctttacatgctgcacagttatgtaagtctttgctcttgatcccacttcccacccactgttggtgttgttgttgttgcaactgtgcatgatggatggctactatatgtatataggtgtgtggggctttttggtatttgagttcaatagaaaggaaaagcacatgttggcgtgccgcgtgtgctaggacatccgactgcaatctcacggtcacggatctgctttgtaaacgagctggtagtgacaacattcgttttctcaacacctcatgcccattaatcgaccctgcccaaatcacaaactccacagacttcgactttggtatgtatattgatgcgttgaagtcaggggtcctagaggtgaaaccaaaggattttcccaggaaattcgtctattgcttttggtggggtctccgtaatattaggtactaaattgtattatgctaaactctctgccgtgagacatatatcaatccacttgatagattaatccgctctacagtgctttgggccaaaacctggagacaagcaactctgcaggggagattttctttgctatcatcatatgtgtctctggtttactcttgtttgctgtgctcattggaaacgttcaggtaatgttcataccttagaactagagtttgatctcataaagctgattcttaatagatgtttgtttttggtgatcgcagaagtacttgcaatcatctacgactagagtagatgaaatggaagagaaaaagagagacacagaaaaatggatgtcctatcgggagataccagagtatttgaaggaacgcattaggagatttgaagattacaaatggagaagaaccaaaggcaccgaagaggaagctcttcttcgtagtcttccaaaagacctcagactcgaaaccaaacgctatctttttctcaagttgctcaaaaaggtaaccttttattttgtcccatcataacttaaccaactcctcttgaattcactgttttgttttgtttcaggtgcctttgctccaagctatggatgatcagttactagatgctctatgtgctcgtctcaaaacggttcattatacagagaagagttacattgtgcgtgaaggtgaaccagtggaggatatgttgtttataatgagaggaaatttaatcagcaccactacttatggtggcagaactggtttcttcaattctgttgacttaattgctggtgattcctgtggagatcttctcacttgggcattatattctcttagttcccagttccctatctctagtagaaccgttcaagcgttgacagaagtcgaaggctttgttatctcagctgatgatctcaagtttgtcgctactcagtatcgtcgcctccatagcaagcaactccaacacatgttcaggtaatattttcaattgaaaaaatgcatgttgagttaatcatattggataatgatgacatatcgtatacctatctcgtttctcaagttaccttcaacataataacccaaaatctttttatcacctaccttgtatcttgtttctcaagttacctttaatattataatctaaacaactttttgtctccaggttttattcattgcaatggcagacatgggcagcatgttttatacaagcagcatggaagagacattgtagaaggaagctctcaaaggctttacgtgaagaagaaggcaaactacataacactcttcagaacgatgattcaggaggcaataaacttaacttaggtgctgcgatttatgcgtagaggtttgcttctcatgctctgaggaatctaagagcaaatgcagcagcccgaaattctagattcccacacatgttaattttgttgcctcagaaaccagccgatccttagtttcctatggatgaaacctagttttgtatagttgttgactctatctctctgtaatgtgatcgctagtgatttcttgcaaataacttttgtgtaaaccagtaaagatatttttatgtgaaataataatcaataggaaaatttcttatagagtttagtaaaaaaacaattttaatggagacgttttagcgaatactcaccacctcaaccactgtaaatgttttgttatccaaaaacttctaattcctaagcttttaacttttaaagcatctctcgttaaacaatttgtatttttttgcaaaacaaaaataaaacgctgtatttttaaattagaatccttaaggttgggtatttttaagtgaatcaaaaattccaaccaaagtaatggaactaaataactgttttttattagaaaactgaatacgtacatataccaaagtacataataaaactagttctattattgatatatataaattaaacacagatttagattatatttaaacacatagctaagattgtttactagagagacttaattaggtctctctattggtggtctagcttggcttcactctcgaattgaagaggaacaacgtgtttgtttagtctttttaggacttacaattacgtctctgttgtttagtaacgatggcaaataaaaataatgatttagtatatttgaacatggtcccaaatgggcaagttgtaaaaagaagacaagtagagaaaattcaaaattggatttcgtggatattattgtaagttgcagggaaaaaagagtgagactgccccaccgtagactaaaatgatttagcttaccactctcactctgcatccacagtttaataattacccctttaatattttaatcattattttagtagaccaaaactgtttagtgttgaaacttgtgcatccacatgagtgttggttaaaggttgagaacatcgatttgccaaccatatctcacagccacagccatttttattctctctcggtctctcttctcagtctctcactaccacagccttaagttcgagaagaccgaagtggacttcattttcttgtacgggaattaaaatattgcagattgacgacatatactaacatgaatcatcggaggagtaaatttgccaggtacttcttcgaagttttgattaactactatttcatatttggttgtgatagtgatcattgttgatacaggatagatagtatgggagttgatggaaaattgaaaagtgttagaggacgcttgaagaaggtttacgggaagatgaaaacactcgaaaactggaggaagaccgtcttgttagcttgcgtggttgctttggctattgatcctttgtttctgtttatccctttgattgattctcagagattttgcttcactttcgacaagacacttgtagcagtagtttgtgtcattcgtacttttattgacacgttctatgtgattcacatcatttattatcttataaccgagaccattgctcctcgttctcaagcatctttgagaggcgagattgtcgtgcattctaaggctacactgaaaacacgtctcctctttcacttcattgttgacattatctctgttctccccattcctcaggtattgttcccttcgtttgtgtgtgcatgacatctacttttccatgctttttattagagatgtacatgcgtaattataggtggtggttctcactctcataccactgtctgcgtcgctggtgtcagagagaatactgaaatggattatacttagtcaatatgtaccaagaatcattcgtatgtatccgctttataaagaagtgacaagagcctttggtacggtagcagaatcaaagtgggctggagctgctttaaacttattcctttacatgctgcacagttatgtaagtctttgctcttgatcccacttcccacccactgttgttgttgttgatggatggctactatgtatataggtgtttggggctttttggtacttgagttcaatagaaaggaaaagcaaatgttggcgtgccgcgtgtgctaggacatccgactgcaatctcacggtcacggatctgctttgtaaacgagctggcagtgacaacattcgattcctcaacacttcatgcccattaatcgaccctgcccaaatcacaaactccacagacttcgactttggtatgtatattgatgcattgaagtcaggggtgctagaggtgaaaccaaaggattttcccaggaaattcgtctattgcttttggtggggtctccgtaatattaggtaataaattgtattatgctaaactctctgccgtgagatctgacgactgacccatagtaagacatatatcaatccatttgttagattaatccactctacagtgctttgggccaaaacctggagacaagcaactctgcaggggagattttctttgctatcatcatatgtgtctctggtttactcttgtttgctgtgctcattggaaacgttcaggtaatgttcataccttagaactagagtttgatctcataaagctgattcttaatagatgtttgtttttggtgatcacagaagtacttgcaatcatctactactagagtagatgaaatggaggagaaaaggagagacacagaaaaatggatgtcctaccgggtgataccagagtatttgaaggaacgcattaggagatttgaagattacaaatggcgagaaaccaagggaaccgaagaggaagctcttcttcgtagtcttccaaaagacctcagactcgaaaccaaacgctatctttacttggatatgttaaagcgtgtaagctagctcccttttcgtcatttatccgtgtatcgcaagaaatataatagttgtcaacttatagctttttcacctctcaggttccatggcttaacatcatggatgatggttggctactagaagctgtgtgcgaccgggtgaagtctgtgttctatttagcgaacagcttcatagtgagagaggggcacccagttgaggagatgctgattgtaacgagaggcaagctgaaaagtacaaccggatctcatgaaatgggtgtccgcaacaattgttgtgacctccaagatggtgacatatgtggagaacttctcttcaatggttctcgccttcctacctcaaccagaaccgtaatgactttgactgaagttgaaggtttcattctcttgcctgatgatatcaagtttatagcttctcatttaaatgtctttcaaagacaaaaactccaacgaacattcaggcaagcttcgaaaccaaagtagcagctgagatttttttactaccttaaacaagctgcaatgcaagacttaaacaaaccattttttcaggttatactcacagcaatggcgctcatgggcagcattcttcattcaagcggcatggaggaaacattgcaaaaggaagctttctaagacaagagacaacgagaatattccacaaggcacgcaactcaatcttgcatcaacgctctacgtgtccagatttgtgtccaaagctttgcaaaatcgacgaaaagatacagcagattgttccagctctcctgatatgtcacctccggtacctcataaaccagccgatctcgagtttgcaaaggctgaagcatagtgtgtctttgaaggaaaatgactctctacacaaacaaggtagtgaagactccatgtaagctcaaaacatgccctacaacgtaactttccagttattgtcaaataattgactcatcaccacgtcctagatataaaaaaaaacagtaagaaaacaagatcattccaaaaaaccaagtgaggcacttgatgagctctaaatatataaatatgtagtaccgatgtttttgtttggcgccgcatgcaagtaattccagtcctaaactcgacttgttcatgagtctcaagtaggaccaagtttgcgaggtaaggagatataacaaaaatgtcttgagagaggctttggagtttgttctcttctttttacagaatttttatgaactctcaaggactttcgataggtttcttctcccttcttgcatggtgcaagtaacgcttgttgttgaatttggatatcaatgggaggcttaatccttgttgagtcaggttcagtttccatttttttttaataaataagttagggtaatttgacgaaaatagaaaaactaacaagaagttgtacatgaaacagagtattcttttgacaaaaagaaacagagtattcaagtcaaatttgattcaaagacaaaaacagagagactaataaagcaaaagaagattcacttcttgtctttcttcttcaccacgtcaataaattctctcatcagacttatcaatctcgctatgatcctttgctgctcagagaccgttgttactgtaatatctggccaccccaggatgcttctcaactttactatctgattggacctcaacactatttgagtggaaaaaagtgttttagattgaacgagagagagacataaaaaaagaaggaagatatattgtgagtttatctacagagagagagatagagggacttactcaggtataatgtggatacatagattctagatgtgatcatgtaaaagtacattgcctgcagaaacagaaaactgagacatatcactactagattcaagacaatgtttaagatcaaagctcaaaaaaaaggtccagctttaccggttcaaatttaaaggtagcttggagcacaacaaagataatgggaaatatagcaagtctcttcatgctcgataaaagatttgcccgctgattgtggacctatcataaattgaaattaaaaaaaatatcaaatttagtttggattatgtatcaaacaacatttctgtttttttttttttactctgaacactatattaaagaaatctttagacctctgatgagaaccagaaagtgaagcctgccagtataggcaagatgtataggctgtctggagttaaaagttcagggattttcttagccatggtcgttatctgtttccaacgtagacaaggagtcaataagcaagagtcaaaacagtagagccaaagaaacattatcttttagttttaccccactcatgaagctgatgtagacgaatgcatcaggaacaagtagagcaaagtaatgcaagcaaccgtcttcgaatctggtgtgataattaatccatagagaataagttaaagcaagtcagagagagacatgatattgtgtaagaaaactcgccttttcgtcaactccgcttcccattttctgtatttagctagagtttcacgattacctgaaatcacgagactgtgctcagctatgtttgacgagatttcaaaagagctaataaggactatgtacctttttaattctcttcacgttctccatggacctaatcagactctagtatacaaaatgtagaattatgtaaaagttcaaaaagcaacaagatttaggaacaaaaggataaacctgcaaaagaaactaacttgtagctccagagctagattctgaacccgcatagagactggtgacatcagtacagtaacaagaaaagctgtaagaacaattgacatccacctataatacatacaagattagaaactaatcactgaacaaaaaccttaagaaaccatcaagcaataacaaacacaaagtccaaccaatataatcaatgttaccaattgaagccagtgagctcgtggattccattaatcacatactgcacgaatccctcaggggaaaaaacactctcagttatagcagtacactcatctatagtggcgacattagtgacaattgcttccacagattcttcaacaacatttccaaaagcatcaatctttgaacacaattcttctggtttagaagacatctgtctacatagcgatatccagaaaaccccactaattgaacaaaagacattttccttgtatcttcaaagaaaacatgcctgtgaaagctacgaatcagaagacttgaatctgggaaagtgggttcagtaaaatctttgatatgatgatgaagaacaacaggtcttgaggtcatgtagcataacaaatttgggtaaagacttctccttgataagctacgaagacaggccatttctagaggtgagcaaagaagtaacgctgagctaaaaaagaagaaagattgcaacttgggatcgcgagtgggtgatttcttacacgaatctagacaaagagacacatcttaaccagagattttccccaaatttcaaaatgaaacagaaaccctaagtttccacaggataaagagatacacagtggttcccccatttgaagcagaaaaagcacgcaaaagtaatgatttttcacaatttcgtaactcttcgtactctgctttccgccatttttctgcactaatttccacttttgggtagcttaaattgagctagtgaagcccaatatttaatgggtattaaggcccattaaagttagatagacgaattcttcgttttagtttgttatatgaaacaatgcgtttggttgcgatggtcaggtatagagattagagagagagatagagagagcatgaaactaaatctggtcgtctaaatttttttaagctcaattctttattaggtatcagtggtttaaaattcttttcagagaatttttttttatataataaacaagagaaatttagttttatataataaatgttctccaattagattaaaagacttgtacggagaagaagaaatcaaaacctcgatgaagaaactagaaagagattaaatatgtgatttttttgtttgcagagaagagagattaaaaatttatatatgggttggacaagaccaccccacggctggaagaagtgtaactatgatggatcgtacaatcgggagatgccaagtaaggctggatggataattcgagatgagtcgggccaatttgtaagtgcaggtcaagcgacagggaaccacacttctaatgctctagaaagcgagtttcaagctcttcttatcacaatgcaaagctgttggagccacggtcatagaaaaatctggtttgaaggagataacagggaggtgatggaaatcctcaataggagaaaatcacgttttgatatctttaattggataagagatgttcaagcttggaagcaacgatttcaggaatgcagattcacatggatcaaccgaaaacagaacaaaccggcggatattcttgccaagagtcacttaccccagaatgaacaatttaaattttatgattacattccgattgtaatttcttcagccttacagctggaaaactcttgatcataataacaatggaaaataagatgttaaaaaaaaaaaaaaatttatatataggttttaaagcacgttttagttttgttgtgataacgaaataagtctctctttttttaccgttaggcctatagaaagttttaggcctgatgcccaagtcttctcgagttggcggctaatttaaattgacttgttttgtttttctttgtcctgcaagcttaattaactgggttttaaggcccattaaggttagatagacgaaacgccgcgttttgtctttcgttttcgtttgtcagatgaaacggtgcgttttttgttgcgatggtcgtcgtcaggtagagagagacgcgaagtcctgatcgctctctcaggtcttagccctaagactacgagtcgactcagccgaactgtgaatgcagttttgatttcaatcccttaggtaattttgaaactttcggtttctcactcttctcgttgtgctctctcaagaaaatgttgtgaagcttgaaatgaatccttatctgtacaagtaaaagcagaaattgatgatctttgaggaacttattagactggttttgattcgaattttatctcttgtgtatttgttgttgctataagaactctctttttgttagcaggatcttagttatggctacttgcttgcgtggaatcacgaagagagttaatcttctacagagacgagtttatccatcgtgtggtcatctaattcgtgatgatagagatgaaactaaatctggttcttcggatacaatgattcgtgaagtcttagcacgtaatgggactaataagcttagctctatgtttgcggataggcattatcagtcgtttgctactggtccgttgggtcttggattgtcttcgtgtcggcatatgagttctacaccaccagaatggtctgataaagttgatggtatcgactttgtggctacggaggttgttcccgatgaaatcattgaagctgtgaccaccacaagccaagctgttgttcctgctataaacgaggttgctattgctgctgccgattctgcttttcctgttgctgctttgcagcatttgattgatgctgtgcattcctttactggcctgaactggtattatatgtaaactgtttttaaactcattttatttggctatgtttttttgtatgtatcagtggtaaatttcttttcatttttttttggcaggtgggcttcaatagccttgacaactgttcttatccgtggagttacaatacctattcttttgaatcaactaaaggctacttacaaactcaatgtcagtttttagatttttgttctctgattgcttttttcagtcactaggatttgcctcttttccatttgtgatttatctatcatgttcttgcaggttctgaggccacaactggaggagttaagacaagagatgagcactaaggtacaatctgtttctgcgccttctcttacttcatctttgtgtgcagaagagcgtttgtgagtttgacactgttcaaggccgtgaaaatgccttctggataaatataaagataaactcagtttgtcatagttagtaattggatgattccttcagggttttctaactatcacttgtgaactataatcttgattgagtagctttctcgagttttctgtttggttaggaattgtcgataaagttccaactagcgtttctagagtgtcgtggttaagaccttttgcatgtgttataatattttttaggctcaggatcctgaagccatggcagaaggtcaaagacggatgcaattattgtttaaagagtaagtccacttttatggatgactggtggagatgatttatctcttcaaattaaacgtactactagttcctcatccactgatatgcttctattgtttcgtggattggcttagacatggagtaactccatttacccccctcaaaggacttattattcaaggtcccatcttcatcagctttttctttgcggtaagatgtttatacgtatatactcaagtcttttactgtttctgattattattgtctatgtgttcactgatgtttgtctacagatcaggaatatggccgagaaagtcccatcatttaaaaccgggggaactctttggtttactgatctgaccaccacagataccacttatatcttgccactcctcactgcagtgactttcttgattatggtagaggtaagagcttatactttcttgttggcctattcatgactaacttttggtagttggttatatttcatgactaatttatctaacccaagtcttgtttctcttttcacatagtcaaacatgcaggaaggtcttgaaggcaatccagtagctggaactatgaagaaattctcaagaatcattgccttcctttctattccagttttgattggcattgaaaaggtaaagcctaatgttcctctattgactttttgatgttcataagcattggaaacgtaagaaaaatgacattttgcttaccacaaacgaatgattttttgtctgcaggcattgttttgttactggcttacttccaacctatttactcttgtgtatggattaagtaagtcccctgaacattgttcttactctttgagacgtgagttttgcaaatcctgaagagttttttttatttgtatcttttgcttgtgtatatatgcagcattaagacgtcctgatgtgaggaagctcttgaatctcccagatgttgtcaactcttctactaggcagccatcaccgtcttcgcctttgccattttcctttgccgagccaaaagaccaaagtgttgttgctcaagaaaaacctcctatgtcctccgagtcatcttcaagtgttccagatagaagaatctcacggagttcagttctgaatcagagaatcagaactctggagagacaactcaaggaccgaaagatcaagaagtgagagattcttttatgtcagtgtttttttgctaaaactagccgatactgaaaaagaaccaagtatcctcgggaaattaagattttgagttaataggaaaaatttcagttgaacctttgcattgaaatgaattagcttaattttaacttgaagatgaatgataaaagtaaattttcccatgatggtcgttttagattttatactaatacagaaaaaagaatactatatatttatataccaaagaaaaaaaatagatgtatatttgtatacctttttcttttgacgatcagatatttgtttacttagaaacgtatatatatcgataacagaacttttgggcaaaactaaaaacagagtaaaaccctaaccagatatacaagttatgacagagctagaaaaacaaacaagttgatgaattcgttgaatttggatgtattggaaattatactagcgaggttaccgataaagagcatcacaacttgcaacttggtttgcaaggaatggaaatcaatcgtagaatctgagtttctccgggagcttttcctttctcatcatcaaaactctcattcttcgtggtcgctcatatgcgccgaatatcaaaactatccaagtggttgtatcacatgatttctatgctgaatctgatctatgccaagtcttagattttcccgacttggataacaaagcggatttcagaagaccttgcacaagttctcaagggtttcttatgtatatgaacataagtctagagcataagttaagtatatggaggctagagagcgcggaatggaaattagtagctcaaatatctccaatgaccgctttcgattacattccgctggcagtaaacccttctgattctaatacagtatacgtgcagaggaagatgcacccctgtttggcctctgctaacttgcacaatggcaagtttggggaccatagcagcgacaatggcactctgagttttgctggcgagtgggactccgcggttaaacgtttatatgaatattctacctttgctctcccgcgttggctctatcggatcccttcgccactttcttgagcaagtttagtttttgttttggatgttgtttgatctatttttagtatttttgtataagaacataagtttagagcatattttaagtattttgattgcttgatggattgttaacgatacaattaaagaacacagcacattcatttcttcatctaaatcaactttgcggctaatcttctgtagaagtacttaaagcagtaactgaagttttttctgtgattctgttgtaatcaggaacctgttcgataactacaagatcgtgtacacacataaatgtgaaggcaaccttatatttcatatggatcactttgaagtatttattatatacatgaatcagtacttacatgtaatgtgttatgtatgtacgtaagtaacctaagaaggctagagtcgtcttattcactcaaacagcctgcaagtaaagatgtaaggatggtcaaaattggtgtacttcgtccaatatggctgatacttgcttatccccatctctgtccatggtttcatgtgtccattgtaatgtataacagctgatctttcaatcttcttgacatcgattcctttatcataacccagtccaagtaagtgccattttctctgaagtggttgtgtcagattgtagaacgttatgagccctggtggcaatgttcctagtttccatagagtccggttttcgttctgcaaaaacaggggaataacatatcactctcaacttaaatctacaacagttttagattaaagataagccaagaagaagagctgaccaggttttgccaaaagtgataagtttctgtaatgttgttcttcttccattctttcaggtcgaagatgttcatcccataagcccatccgcagaacttgggatcaaagttttctgaaatgtgtttatcactgaagtttaagtaagtatcaaggcgatggaaggtaacaccacaggtttctactgcaccattcactttccctttaagatcaatggaccataggggagttaaatccttctgaacaaccacatcatcgtcaacaaacaagattttctccaactttgggaagatcctagggatgtagaacctcaggtggttaagcattgacatgtatttcgggtaccggtacttgaggttttctgagcctgattcaactgattcagacctcgctgtcttgaagtagaacttcttcatagctgctgactcgagctgactcaaaactggagagtaagatgagttgagccaagtaaaatcttcaaacctttggacatggatggtcgcttctccaggagggttcaacagaaaccacatactcattgctccaaagttgagcttatcagtcacaaggtggaaaacatgccttgaaggatcctgccaaataaacccagtaggccttgtaagtttaaagcacttattcttgcaacaattactagggattgatcattacctgtgcattcatgactgtggagttgacaacaactgatgcagccagtacattatcagagaagagagcgtagtggtaaagttttggattctccaaattctccctccttggaaaatttctcatcggtaaaggcaggagatgatactctagattcaagcgcatggtcaagcagtggatagcatctggtagtgccttggaagctagctgagtcaagaacgttatataagtctgctcgttttcgagttcatcttcaactgtttgtagcattgctctcaacttatttgtcaccaacttgcattcatatagctgctcgtgtgctctagccagtatttgtcccatgtctcttatactgtcaagtactctgccacaacaacaaaaggattaaactttttaagagtttatcttaagaacaatatgtactgccgatgatacctctgctcctgatcaatatcagtagattcttcctcccaagctagtttcattagttgtgtttctatctcttggtgcaaggcgagattgtttgtaaactttgcaagtccactgtaaactcgtgccatgatgatttgatcttgcatcaaacgtaacatatcttcaaaactcttgcccctccggtattcatttttccaaatggtgtagtttcctagtggtgcagaatcgacagatctggaacgtgccatggctgccgtctcaagcttttgcagactatcatcattcatcagctcattagccctttccaatcttttttcctgtctcagactctgagaaaaacacaacagaacatatcaaatcagataaaagccatcatgtaaccaatgtgaagagagtaaagaaagattaaaagttaccctttcatgcaacatctctggtgtatcattaaatgcttttcctatccaggttccatgaccaaaacgaggaaccattttgtcctcgtttcccttcaaacaacaagcatcagtcatttcgtacaggtcaagaaagtagagaagaaccataagtatctatctacctcagaagaagtttgaactgagttagccactgaatgattcttcctgagtgaatcaaggctcaaaggattgtcactggaggtggtggaattgagaacatcaaggacctgtttcaaacgctagtaagttacttgtaccaacaaaggatcggaagaacgtaagcagcaaaacaaagaacaccaaggacctcttttgtgaaaagagatggaattgattccagagcttcacgttctctccagttaagatcctgaataaacaaccattcaacaacacgtttcaaaatttctttcaaatctttcagtacaatgtgatgatcgtaagttgattaccttgttgatgaagttattcctgatgttgtatttctctgaaatgatttacagaaataagtacatcttccaagaactaaagaaaaagaatccattaatggttggtaaagaacgaaccaaacagtgaacgcttgtgaagtctgtagctgatcatgagggtggagtaaacgagaaataagagaaaccccaaaaccactgatgtcacacattgtcgatagaggtctctgcacctagatcttctttggattctcctcgccatcagaaacttcaaaccctaatcgaatctaagagacgatcgccaaattcagtagctctctctctctctctccaagacgctttttctttgctcttctctgatctgtatagctaaagtagctaacgaataacagactattatttcaaatcggttttatatatgcagcggaaaacattaacgtcgtcttttgggatccaattatttaaagaccctaacggcgtcgtttatcccgatggcttagagggtgatccaacgcatcgtttaaataattgccagttgtcaactaacgccgtcggattatgccttattgggcttgttaaacataaagcccagagctatttacgcaaaaatatctggcattaaatagttaaatcgagtttaccgaaagattcagatccttattcttctccaccggatctcgaaatcggagaattagccaaacgatggccgccgacggaatattccgcagcatcttcgagggttgtatctccggccttgattccgccatcgaacggcgtccttaccacaaaaactgcggatgtgctcttcacgataaatcaagtggcgctgggaaaaatcaaaatcagcgacggccgccgtcttgtcgccgccacggaagctcagagagcatctcgttcccgatccgaaggtcttggagcgaaggcaacatcatggctatgaatctcttctcctcatcgtcgtcttcttctaatctccaatcgctttcttcgtcttcttcgctctcaaatctggcatcagatttaccggtggataatgctgcgacggaggaaccgagcagatctaataaacagctacgatggacgattgatgaaggtgaagatgattgatgatgatgatgatcaattccaggttgttaacttttgctaatctctgtttaattaaacttctcaatcattgtatttgagaaccaaataatgtcagtcattgtatttttatttttttgtaaaagaaacgaaaatgtttgtttacgattgaaactttgaatgattagcatataaacttgtggagattaatttagcaactttagcaaaagtaattaaggaattaatctgtggcaattaagcatctctcgtccctgtaattatcataacaaattcatcgtgggcatgaaactatgaatctgtttgattaaagtgaataatatcattaatctctaatcaataacataaatcatcactccagaaaaagcatttatctaaaacgttcaatagcatttccttcacgcacatgagttccgacaaagaggacatgaaccatgaatcttgagccacacatcaatacattccacatggaagcaatggtcacattccggtatgaaacgtacggtctctttgctcgcatactctgataaacaaatgggacacacaataccattagtacccgaaagccttctgctttctcccaactccattttcttgaacgtttctattgtagattggtcaagacccctcctggccataacctctctcggctgctgcattacggttgcggctgcgatagctgaatcgaatctttcggagtcgtaaaggcggatagcgatacaagtaggaaagacaaagacggtgactgctgacaagcttataactagtactagtactccactacttaaattacctgtcaaaatatttccaaagtcagcttaaaatctaattaaaccatcaaaatgtaatcgctctatgtgtggaatcggtttatcaattaaaaaaaaacaagtttacttagatcaaatgccacgctagtaatgtggaatgagagattgagaatacttccgtagttgatgtaaaatattggatttgttaaaagacagttatcaatcaatagctatatcgtagtgtcaaatttaaatcctactatgatttttctatacttgccttatgcgtgaataattacttcagaaaccttaaacctaattaagaatataacttgaggttgaagatttccaccaaatcagatagtctcttcttcatccttaccattaatgaaaagttctcttgaatcgtaaagaaaagaaaaagaacaagagaaaatgtttgagttatatattgtaccagtttttttagtagcccctaagcatttggctctgcaatcaggcaaggcccactccagcaggaggctttgattgttgaggtcactcgagaatcttgtttccccaaatggcgaagtagccggaacatgtaatctcttcacgatttgacaagaaggaagcatagactgtgcaagagaataattagacgtggcgaagaaggatgaagtagaattgcttaggcaaggaatcgacggataccaagacggcaacacgacctcattaggacaagacaagaacgtgtataagatatcgaagtgaggagagaaaggagatcctgaaatgttgaaggttaaaagccgtttagccaaacagttttaagggtcgttgatatagattttttgccttctgtagtcgatatctcggacaagaaatgttccggacataggaagttctaggacagtcttattgagatcggtgcagtggagattgaatctcgcatggttacagaaagggaaacgaatggggacttctaagggtccacatctgagtggtcttgatgaagaagatgaacagttattagggtttgaggcgtgtcggagagagacgaggaagagaaggaagaaaacgaaaggaaaaagctgttttgagaatgtcataatgttattcgatactattgaaaatgttattacatgtagtattaaactaaaaaatgtatttaagagtttaattaaccattctcatacgtagttaagtactaagaagaaagtcagaaaagtcaaaagaagtagtgtatggtccattaatggaatgtgtcgtttgattgtatataacaactatatttcataaactcaacgataggaatttataacaaaactgatattttatcaccaacaagttttttgaaaatgatgaataatatataatttcatgtatgctacataaaccaatggttgataattatttaaactttcaaacgattttttataagaaagatgacataaaatcttagtccatctattaatatcctcttttgtcactttttctttgtatagatatataaatttattttgatatatatataaaaaaatagctaaatatacttcttttgttatgcttctttcacatggttcatttcacaatacataaacaaattgaacaaacaatatcattaatctttaatcaagaaaataatgagtcttcactccctaaaaatattcatctatgtttttccaaaatacacattaattaaaacgttgaatacttcaaacatttcagcatttccttcacgcacgtgagttccgacaaagaggacatgaaccatgaatcttgagccacacatctatacatttcgcgtggaagcaatggtcacattcaggtataaaccgtacggtctctttgctcacatactctgataaacaaatgggacatacaataccattagtcccgggaggccttctactttctcccaactccattgtcttgtatttttctattgtagattggtcaagacccctcgtggccataacctctcttggttgctgcattacggttgcggctgccgctggtactgcccaatgtcgtcgtctcggtgtgttgtgaatccggatagcgatacaagtaacaaagaggatgactgctcctattatggacaaacatataagtactgctactactgccctgcttaaatgacctgccaagccaattaatgtttgaggagtcagtttaaccacttaaaaacaaagtatgtaattcgccattttgattatagcgtgtggaatgagatattgagaatacttccttatatagttgaggggaaatattggatttgatattttcttaaaacgcaattaaataatcaatggtcaaatttagttccttccaactatgattttccgattcttgcttaatgggtaaaatagtacttggaacacgtaaaacctaaagatttcttggagttgaagctttccacgaaaacagacagcatcttcttcatccttacccattattggagttatcttgggtcacaaggaatgaagaacaagataagaaaaaaaaagttgagttcgtaccggattttttagcaccgaagcattttacttcgggggaggctttgttcttgaatccacatctcaagtaatctatctcacaacctctgcaattaggcgagttccactccaacaagaggctttgattgaggtagctcgagaatcttgtttctgcaaacggcgaatcagccggaacatatattctcttcacgatctgacaagaaggaagcatagactctgcgagagcaaaattagacgtggcgaagaaggaggaggtggaattacttaggcaaggaatggacggataccaagacggcaacacgagctcattaggacaagtcaggaacgtgtataaggtatcaaagcgaggagagaaaggggatcctgaaatgttgaaggttaaaagccttttagccaaacagttttcaggatcgttgatataaatctgttgctttctgtagtcgatatactggacaaaaaatgttccggacataggaagttgtaggactgtattattgagattggtgcagaggagattgaataacggatggtcgcagaaagggaaacggatggggacttctaagggtccacatctgtgtggtctcgaattagaagaagaacatttactagggtttgaggcgtgtcggagagggaagatgaagaagaggaggaaaaataaaaggaaaagttgttttgagattatcattgttcgatagtactaaggaaaatggtattactagttgatattaaacgaaaaattctgttaaaagagtttaaccattctcataattaaagtactactaaggagaaagtcagaaaagtctacattttgtacaagaaaagtcaaggatatgttccataaatggaatgcgtcgtttgatatggatataaataactacatatcgtaaacccaacaaaactagtatatatatcttaccaccaacaaatttttgaaaatgaacaaattaccattcttaacattttctaaaaaaaatcataaatggtttatgtttataagtcttaacatcttagacagcttgacgagccggagaaggagaattccgacaaagaggacacgaaccatgaatcttaagccacacatctatacattcactgtggaagcaatgatcacattctggtatgcaccgcacggtctctttgctagcatactccgataaacaaatagggcaaacaatatcatcattatttcccggtaatcttctactctctcctaattccgttttcttatatgattctattatagattcatcaagacccgtcgtgactataacctcgtttggctgcaaggcggcgatagccacgttgcgttgtatcagggaagcgaatctttcggaggtgcaaactccgactgcaatacaagtagcaaagatcgtgagcggtccaattatgctcaggagtataatcttaagcacttgtggttccgtgttgtagcctgccaaaatcatgtttcgaaagatcaatttacttaagccaccatgtacgtattattttttctttgttgaatctgatgataacacaatcactaaacaacaagtcatgttaccactattcttttaaaattcgtattataagggattatctacggagtacaacagtctatgacatattgaaaagagtggagatttgatctttttaaaaaatgtggttaaacaatatttaactaatcaatatatagtcaacggctcaatgtcaaatgtaatggcctactagattttttgtctagttgtttaatcattggataattatttgaaaaccccaaataatcaaagattcctccaatttgaactttttttatgaagactaactcattcgtcgttaattcataactattaattaatgtaagttataagaactaagaagagaaagaattggagtaatttgtaccggaattttcaaaagggaagcatttgacttggagagaagtgttgcttctgaatccacatctcaaaaaatccctctcacaatcgctacaacttggagaatcccatttcagccaaaggtctttatcgttgacatcagtcgagaatcttgatttcttggcaataactcgccgagaaaccggaacatctaatgtcttgacgatctgacaagaaggcagcatagatttcgcgagatccaaactagttgtagccaagaacgaggtcgttgaattgcctagacatgggatggagtcaaacctggacgactttgcaacctcattaggacagctcaagaacgtgtagctgacaaggtagagagcagagaaaggagatcttgatatgtcgaaggtcaaaagctttcttgccaagcaattttcagggtcatagagacgaatctgctggcttaaatagtcgatctctcggacaagaaatgttccggaattaggaagcttgagagctgtcttgggactagctgtgcattggagattaaatccggcatggccacagagctcaggctgttttgagagtaaccagaaagggaaacggacatggacatcatcacgaccgcatgaggaggaagagcattgttgtgggtgtgaagcgtgtaggagagggaagaggaagaagaggtaaaggaagagttgttttgagaaagtcatttggtggttttttgtactaagggagggacaagaagacttgttattatttcacttaatatatatatagttcaaacttaagagatctctatctttcgtctttaaataaaaataacaatattcattttgttggttagatgaggaataatagaatattgtagtctgatgaatctatggaaaggtcgtacttgttctctttagtcaagatacatttttaagaaattgaatggagacatgttataattcaaatcatgagaaccctaagcacacactttctttaagataacaatatttattttgttggttagactaagaacattatagtcggaggatctatagaaagattgtatttgttctctttagatgatgctcgctaacaaacaaaccttgttaatatttaaacgaaaaccttggcccctgcgatggtcttgcgttttgaacgtggtaagcacaactgaaaggcttggtgaagctttggattctgtcatggaagctgtaccgggtctttggaatcgcctgcgatgcaaagcatggcttatgtgtatcttttcgaataggaagaggatgatcggaccttggtaccttaaggaattcaaagcgaagctcaatgacatgaaagacttgagaaaacagagacatcaaaaagagctacaggaagagcagattcaatacgaaagtaacgattgtgaattgcttctgctcatctttgagtttcgttctcatcgatttgccttttgaagttcctgtaagattttgacagttttggagtttcacagtagatttgacgtcattcattgcttattaacagagagacatgtatatcgtagagaagagctaaatcttacaaagagagaaaactattgtaaacacttaaattgtcattaccatgaaatatgtctgagtgaagttaacaaaacaccttgaacatgtccaaagaatgacagaaatgaaaaagttttaaaaatacaaaagccaacaggtttataaaaagcaaaccaaagagtatataccagagttttgaattaaacaagaaccatttttagtgttcctgagagtgatcgagatggtaatccatcacatcggatagggcttcgaggaatgcagcttcgctcgtccctggaagcacagcttcttgagcttcctctaccatttcctccaccagagacttcttgctaagtgtttctctgcacattatggttccaatctcaaatgctgttagtcctctttccactcctttcttcagtagcatcgttgagattctgagcgtttgagccgtctctgccggcattttccatccatgaaactttagtagatcaatatcttcctctgcgtccagtgatcttatgtactcttgggtctctgcagagtacggtttccgggcttgtggccaatatagccactcaaacgtgcaatcttcaaactgatgacgaaaacaaaagttagtttcatgacaatgaacactataggcaaaactgaatccaagaaagaatagaaaaagagtaagagcacttacgctttcaggcaagcagtatccatggtctataggaaccaaaacgagcttcccgctttcgtccttggtcatcaaaatgttcccaccatgtctgtctgcgttggccagtctaatatccaacacagaaatcttatgaacttcttctactggaaatgaaagtggacccatatcttcacagctgccatcgttctcagtaaacatctgaagtgatccaatcttggttttgattcctttgggatggttaaaccctggatgcaaacattcaatcatagctgtgggaggtacaccagcaaaacctatctcttcaccaaacatagatttgtttccacttttgggatgatccaaaatgtatgcagcgacttcccttaatgcaccttctccaacctttgttcctttcttcaaaccttcaccgtttggcgaaagtggtaaaccctgaggattgttctcagccattggttcctcatctattggcttaaacacacccacaaatttgttgccagatggaccctgcatgaaataagctcctcccgtaccttcgcttgacctgaccggagaattcccacttttaagtccatcagaagcagactgaatcatatctttaaccaccagaggtactttagccttggagttaacaactaccggctccaaagaaagcttttttggtggcacaatgctcttagcttcacgacccttcttatcttttgcttgtggggcaacaatagacaactcaaagttcttctccaccggcttaactcgaactttagcagatctccgcacaagcagatgcaaaaccgagtcatcgtttctacaaatgtcattaataagactctggtcttccaacttctcaccttcgtaaagaatctcctgttcatcaggatcaacaaagtctccacgctttttcgaaatctgcttcttcacatacccaatgtttctccctctctcgacatgaaacctgcagtgtttcccacaggtagtcttaacatcaagaacctgaagatcagagagcttaagaaccaagtggagaatgttgccttcactaacaccataatcacgcatattagaattgcttctagctagctctcgaccaccgaaaacaagcttctgattcctcacaacaaagccgcggtaagactgaatccgaagcttaacagactcaatggaatcagactcaagcactcgcattggtatcaccgatccaggaagtgtaaggtaaatcatgatggtgtcgtcaggataagaatcaagacaagaattggcacgaaccagaggcataatcaatggctcgctacgaaccggacttaacgcaacaccagctgatgacatcttctttcacttggagaaatctaagaactttcttacggaaaaaaacaggattcgatgttcttcacaacacaaaatccctcagcttctatatatatatatacaacaaaccgcaataatccctaaaatcccaataccatcgcttcttcttctttttcgagaaacaacaataacaagccctaggaaaaaacagaggagatcaaacctaaacagatcagggattgattgatagctacaggtgaatcaaatcgagccaattgatgtcgccgatgacgtaccatatgaagaaaaaagaaagagagaaagagagcggattcttaccagaaggaaagaaccaaagaggaaattgggacaaggcgtggagctttaacgatgatgatccaatccaataatagagtttttagggttcaatctaatggcgtacaaaacagctcgcgaaacaagggtcaaaagagtttagaggaaagagagagaggtttttcaaaaggaaagtggtaggaaggacacgtgtctccacctcgttcgcgtaggtgacgcgtacaatgaagcttcttcttcttcttctttaatgtacacttttcctttgtttattgtcaacggtgtacggcagtttcgttgattttgttttgtattttacccttggagtggaaaccaagccagagactttggggttttaatcgtcattatttcaccgttttggattaggatgcttttaaaacttcggataaggagagagttagtatttgaatcaatgaaccagtacaatcgtaattcgtatgggcctacagataaaaagatgggccttttaattcgcttctttaactcgtttcatatccctttgttctattcaacctttcaggctttctgctatggaacatgaatattgttggtccagttgcatcttaaccaggttcatgaacatctaactaagattcaatttgatagctttatatcttcaaaatctcatgtttgatctaagtaaacataacatcgacaattctctgtttgtgacttcttgagagtctccatcacctttataatgatcacaccaaatccaaaaccagaaaatctcttcaaaagttgtatataatcaaaccatctacttggtaaaaaccacaacttttctactgcaaaactcacgtaagtctctcgtgcttctgattacagtaaagctaaattcgaaatgcaaacgtagtgattaaatgatcctcaaagctgagaaaagttgtcattattcaatcaaaagattaacaggcttagaattccattttaagccttacagaatcaaatacacgaaaccagaaactgaaacaacacacaacaaaagcttgaaggtaaaaatgcaacattgcatcaagttcttattcataaaacaaagaagataaaaggaaagaccttttttttagcccacactattcattcattaacaggtgatgatgatcgagagtgttccttagatcccaaaagatgtttacttggtttcagagaagaaacaagataatatctttaagaacgataatctggaacaatcccaaagacatcacaatcaaattccttgtcatttcttggtgaacataatccgccaaaatctcttccattccttcatgtatgtgaaagactacagggattttgcgtaagaaagagccattagtgtaacctcgagaagacgattgacgcgagaatttggctgccttgttgagttcagattgcccaattgaagacgaaatcgagcgatcggtgacgagattggttgaatctggtttcagtttctgggcttgtgcgaaggggattgaagagaggtctcttcccagtgggtttctcacggcggcggtggcggatgcggaggagatgtgactcatcgagaaaggtagagactttgagagagtggctctctgggtttgacggtggagatcgaggatagtgcggcggagagacatcgtggccgaggagataatctgacggagaaggattgaaattggatctgatcggagaaacaaaccctatgtgaaatgaatcggaagcacaattctcgtcgtagaggtgaagatgcattaatggagttgggctttatactgggcttttcagaactaccagaagcccaaaccaaaaccaaaatagattattatgtgctgcattgcataaaataatggaccaatggaaaaaaaataattgattctcatttttaagtaatttttagctcagtctcttgaaatgtcaatatatcatattcatgaccaatatataagatttggtcacttcaaaattcaaatgtacatgaacattctacaagataattaatcaaatatttacctgaataacattgattggataatattaacttgttataactattgctttatttgaaaaaaaaaaagaatggatcccaaattgtaactgaataaagcatccataacaaagaaagagaagtcaaatatctttcatactttatttgattttctaaagtataggaaatattttcccaagatacaaatatgtgaatcaatggtctaaataaagttaatgaatatacttaaaccggattcctttcactataagaaagagaaaagaaaaaaggattttatctatttctagttgaacctgaaagttatctatactgaaacaagaatagacaaaagcttcaccatcatgtgaaacttatatatcaccagagacctgtgaactagaagaaggcaatggcggttgcgtcgagctggtctcggggtaaaacgctgctataagcttctctttcgtcaatggatccgacccgttgttagactttatcacaaaagtgtgaaacattgtgtcttcagctaatgataacttagcctccattagactaacatttgagtttctcattgcttgtatgattcttgaagctggatgtgaatccaaaggcgagattactcttacaacaacctcttcattcatagcttgaatgtcaacttctggactttcttctactgttattgtgtttgattctgataagctcttatctgttcctactctttcatcttccattatcttgactttctcttgaagctctttgatgtaagaaattgcgtctccaagtagagaagccttgtccattttagaaatgtttggaacaactgatcgtaaagcgtagaatctttggttaagcttctcgcgtctctgcctctcagcttccacatggttcaatggctcttctcttccgtttgcaggctttctccctctctttctcggtctcttctcatcaacaacagaaactattcctgctcctgctaacaagctcactggtcttttctctgtacaagattctgatttttcttgctgagtgtttgtagatggattcgaagaagcagcaactgatgatcccgcaaactcaatctgcgtcttgtaattgttattatctacaaccatattcacattctctagcactttcacatcatccctctgaggtgtgtaaccaaatgttggacctttattgttattatagccttcccaactttgaggagtgaatctctcatccaagtttcttctcacttcgagcttcttaggatacgcgtgagctccactcaaatcctgcccgaaaagcttgtgaatccctccagtcatgttagtgtttgaagtcaccattactggttgcgtaactctcctcatgaacaaagcttgaacagacttaaccaagccaatgttttcaggcaaagaccaaacagaaccaagctcaagaacaccagcatcagtaggaaccataacgatcgttctgattcccgcagatttcgccataaaagacctgaaacaatagtcagactcagagttaactgcatcagagagccacacatgtttccctgaagaataacacctcccaggaccgccttcaccgtgattgaagaagaaatacatggaagctaagaagaaaatctcagtagcagtaactttctctaagctcaaagcataattgtcttcatcagatccaccaaacaacctatgaagcttctgcaacactctcttcctcatatcttgccatgtctcttcctctgcccccatgttgttaaaattataagacctaacaacttttgattcctcttcctcattaggctctcgacaacacccatctccccaacctaagacttgttgtccggatctagacatggtttgttgccagaaaatagcgtagttccagctgaaattctccgagtttggccaatcaacgagactagagagcttcttattcagagtatcatcagttcccataacaagaaagagattctgattcgaattagagtttgctcgaagaaaatcagaagctaaatgccctaaaacagcactaaccaccgatttatcttcatcatcccaacctaaatcactcatattcatctttctttatctcccagattacaccaaatcctaccaaacccaaaaccacttaaacggagaagaaaaccaaacctttcttctacacaactcaatgattgactcaacgatgcttgaaaccatataaactcgagtctctccagcttcaagattccagtaatcagattctaaggaagaaaaggtcggagctttgaacaatttgaagaatacccaccaggaaaaaatgcaaacccagtgatgaatcacgctcaagagaagcttgcgccggtgaagaaatatctcgccgaagaaagattccaaaaagctttgatttttacagagaaattgaacaattgaatgagagttgcaactagaaaagtctgaaggttgaagaagaagaagaagatacagttagagagggagagagagagagaaggagacaagacttgctggggtaattgaagtttgtatgaaagctctttttaaaaacccaaccatggttacttatgcacgttaattactttggttattcaacttaaccatggttaataattactctgattattaactctgtttcctgattttaagttcacttactttgattgtttctctccgaataaagatagaaaatctaaaatctcttttcaaatctattttgcaaatggattatctcacccctaaatctggctagtctttgaatttgtctccaaatccgattaatttcgtaaaagtaatacatacttgatggtgattttagtgaaacaacgatatttgcacttggtaaattttagagaaaatagtgttttgtgtacacacgtgtgtatgtacctacgtgagagattcaaattatagtaatgtacttaagaagtatagatcacatggtcgaaatattttaaaatttattatgtactaaatagtactaaattaattatttgtttttatttttttctctaccaataaaaataactcacatgcataaagaaacaaagaaatattgtctgaattgtctggtggggttttggttatttcagacatcgttattaacgtgggtccatttaattaatagtatagtctgagtatattattcttatcaatagtatatatatagtccttaacttcgatataaaaaatggtacgttctttctttatttagatttttatggaaagaaaattatttgtcgcataggatttgcgtgaatctcatgcccaacagtaacgttcaacaaaaagggtctcgttctgtgagagagcaccatgtgatggacttttaacctacttttctatcatcatgtgtttgtagttttctaattgttttctccccattaattaaaaactttttttataattacatgattatattcataacctattttaaagtattatcgcatgagataagcctcaccatgttttgtatggggatattttcttataataatttaaaatgacatcattaaaatttgcatataaataaagaaagagattcgataaacctaattcaaacttagggatagatagtacaatgaaaactcgtacattgaaatgtatacgttgatatactaaagctttgtaaaaaaacgtgatgataatgtacaatattgtgacgtgacatgcaaaatttgacctcttgttttgtagattaggatgataacgcgatgattggtgtcttttgagtaattcggagtcgcaccaacttataaattctttatcttcttaagttctaatagaacaaaaaaactcatatctcatattttaattagtactaaaaactataacctaatactgaacgtgttttgcgtaggcttgtttaatactatttttttttgtctataataattaatactctttcgttagaagagaatagattagatacattgcttcaaaaaaaagaaaaaagaagctaataatagttacaaaacaaaattggctttatcattatgaatttcacttatttatctttttaagatatgtagagaacctaatttaaatttgaatttgtagattgaatttcggtaattttatataaaataaaacaaaatagttttaacaaaattcaaacgagtgttatatatacattagtgagattatgcaacgagaataaaaaaacaataacggataagagtagggctcaataatcgaatggcagagagcgaatgatagggaaaatgtggggtcaagtggagacactcgtgactacggtggtctttattgcagacaataacttctcctgtctcatatgccttttgaaaacgtaaattgcaaaaatgatttgtcgtgtttcacttcttttgtcctcgcaatttcgcattctctttctctattctaacgaaaaacgcgtctaaccatttcgtagatgaaaagttgtagaagatttgagcagcttatcaatttcgcattctttttctcaattataaacgcgtctatccatttataagttgagaagtgtaaaggatatataacttgaatgattatcaacaaaatgtagggaaaataagccaaaaataaaaacgagttaacaaaaccgactctattgtgaattcataatataggtactaaaatttatattgtatcactatttcttattaaaaaaagtgttaccgttcatttatatacctctatattttctcgaaaactatactttaaaaactacatagaaaaacatgcataaaatcttaaaacaagtttgtttttctaaaacatatttgtataaaggaaccgtgggagtatatatatgttaatatgtactatatattttgtcattcaacgtatgttttcttcgaaagctaccaatatgtgtaaaactaatgttgcaaagtggtgttacttgggaaaattcggttaggaacaaaggggctaaataagtcgctttgtttacgcaactcatcttctattcttctttatatatcacgcgtttttcgtgggcttcaatgggccacatgaggtcgacatttttaacctttatattcaaaagtacggcaaaaatacatcatgcgccacgtggctttctttgtttatcataatctcacacgtctcacgtgtgacaaatgctaacgctaacttaactagtgggtttggttagccaaaataccaaatgatacaataagaaaacaagctgagttacttggcaacaaaatttagttcgaggtgagaaattcatgtgcaattgaatattagtatgactcgtctggctttaacatcaaaatcaagcacaaaacagaaaaatacgtcatcaaagcaataactatttgactaattaagaaactcattttcttgtttgcaaacccttttttatatatttgtagttttgtagacaaacgaacgtgatgcgtttggaccagcgtcacagacgttgacggctttgggacacgtttgaagaaagaatacgtcgacatttcttatttcagacttgctctctttttaggttcactacacgaattttcacgtacacaacttcacaacacgttttagttacgagattctgtttttttgttcgataatttattttagtaacacgtaaatagatgatttatatggttggtataattataaatgcaccgacagacttgaaactagaaattctaccgacagaaattcttgctcggaaaccatagactacctaccctattaatgtcaatgctatttgattaaaaacaaaagcattaattgatcttagagttatgggtttatattttataggaaagagtaaaagctcattatatttatgggcttatagaaaagagcaatagcccatttaaccgacttactctatcgggtataaccaaaaacccgataacccggctcgttcatcggggaattttccgttttctaaaagtaaatctctttgaaataaaaaagcttctccgtttccctcttttgaaaaaatcagaaaccctaaaatcgccactctctcgtctctcttcgcggtccattctgcttcatctctcccggcgaaaccttaatcgaacagctcggattcgatcctattctctgttgttttctaagaaagatggagtggaatcgggagactctagtgttcctttcgcaatgttttcttaacacgctctctccgataccggagcctcgtcgaacggctgagagagcactctcggatgctgctgatcaggctaactacggcctagccgttctccgtttggtggctgagccagcaatcgatgaacagacgcgtcacgccgctgctgtcaactttaagaaccatctccgttcgcgatggcatcctgctggtgattctggtatctcaccgatcgtagattctgagaaggagcagatcaagacactcatcgtctctcttatgctctctgcttctcctcgtatccagagccagttgagtgaagccctaaccgtcattggtaagcacgatttccccaaagcttggcctgctttgcttcctgagcttatcgccaaccttcaaaacgctgctctcgctggcgattatgtgtccgtcaatggtattcttgggaccgctagttcgattttcaaaaagtttagttatgagtatagaaccgatgctctgtttgttgatttgaagtattgcctggataattttgctgctcctttgactgaaatattcctgaaaacgtcttcgttgattgattctgctgcgagctctggtggttcacctccgatcctgaagcctctcttcgagtcccaaaggctgtgctgtacaatattttactctttgaactttcaggacttaccggagtttttcgaggatcatatgaaggagtggatgggagagtttaagaagtatctatcttcaaattatcccgccttggaaagcacagaggaggggttaacacttgttgatgatcttcgcgctgctatttgcgagaatatcaatcattatattgagaaaaacgaagaagagtttcaaggctttttgaatgagtttgcatcagttgtctggacattgctccgggatgtgtcaaagtctcctagcagagatcaactagctactacagcaatcaagttcttgacctctgtgagcacaagtgttcaccatgctttgtttgcgggggacaatgttatcaaggaaatttgccaaagtattgtgattcctaatgtttctttgagggtggaagatgaagaaattttcgagatgaactatattgagtttatccgtagagatatggaaggaagtgatgtggacactagaaggagaatagcttgtgagctactcaaaggccttgccacaaactacaaaacacaagtgacagaagtagtttctcttgagatacagaggctcttgagttcattttcagcaaacccgtcggcaaactggaaagataaggattgtgcaatttacttggttgtctctctatctactaagaaggcagggggtgcatctgtgtctacagatctcattgatgttcaaaacttctttgcaaacattattctcccggagctgcaaagccgcgatgtcaacagctttccaatgctaaaggcagggtccttgaagttcttaactatgtttcgtagtcatataccaaagccctttgcaatgcagttgttcccagagttggtccgtttccttaaagcagagtcgaacgtggtccactcttatgctgctagctgcatagagaagctcttgctagtgaaggaggaaggcgcaaggggtaataggtatgctgctggtgatttaagtccctttttgctgcagttgatgacaaacctgtttgatgcgctgaaattcccagaatcagaggagaatcaatatctgatgaagtgtataatgcgggtccttggtgttgctgatatcagtgctgaggttgctggaccttgcatcgggggattgacctctattctcagtgaagtttgcaaaaatcctaaaaatcctatatttaaccactatctctttgagtctgtggctgtacttgttcgacgggcatgtgaacgtgatatttctcttatatctgcatttgaaacgagtcttttcccaagcctccagatgattttggcgaatgatatcacagagttcttgccttatgggtttcagttgctggctcagcttgttgagttaaatagaccaactctctcaccaaactacatgcagatcttcttgctgctcctctcgcctgagtcatggaagagaagtggcaatgttccagctcttgtgcgcctgcttcaagcttttctgcagaaagcacctcatgaggttactcaagagaatcggttgagtcaagttctggggatatttgaaaagctggttgcatctcctagcacggatgagcaaggcttttatatccttaacacgattattgagaatctggactacagtgtgattgcaccttacatgaaaggtgtatggagtgctctattcacacgcgttcaaaacaaaaagacagtcaagttccagaagtcgctagtaatattcatgtcgcttttcttggtgaagcatggacaggcttatctagtggagactatgaatactgttcagccaaacatcatcactgctatcgtggagcatttctggattccgaacctgaaactgatcatggggagtatggaggtcaagttaacggcagttgctgcaactagactcatatgtgagactccggctctcctggatccatcagctgctaaactctgggggaagatgcttgatagcatagtgacgcttgtttccaggcctgagcaagaaagggtacttgatgaacctgaaatgccagaaatctcagagaatgttggatacacagctgcatttgtgaaactccacaatgctgggaaaaaagaagaggatcctctgaaagacatcaaggacccaaaacagttcttggtcgcttctgtttcgaggctttcttctgcttctcctggtaggtacccacagataattggtgagaatcttgaacaagcaaaccaaacagctttgatccagctctgcaatgcttacaactgtggaattgcttgaaggtaaagtgtttgtattgacttgaagaatggtttcagattcgtattcaggaatcaatcttgatggtgattataaactgtttttggcaggagaaaaaaggggaaagaagaagggaaacacaacatcactggattgcattgcgtctgcgaagaacaagtggtcaagtcataaatgcatatttttgtcctaaaatcgggagtttcatagcatgtgcaagttagattagagaagagcatccatcatcttccaccaaaacttggatttcttatttttgattttcgcatttaaatggggggtttgtcttgatttccctttaaaagcaaagcatgttgttcatctctgtatggtggtactatgtgtttatgtgcattttgtcgtaatgtctgttggtcatggattcatcatggttttggttgttattaaagatggagaaagccaagcatgtttcataaacttctcgatttggagaactagtttcgacgtgggcctgtaatcgaagtttgacccatatatctaatcaagtcaatttttcattatcattttttttggggccaacatctcttccttgattaagaaatttgtttttatttaactccgtgctttaaattttaatttaatctttcaagttgagaagtggagtgtactgtcgatacaaaattgtgaaagagagagagagagagagagagagagagagagagagagagagagagagagagagagagagagagagagagagagagagagagagagagagaagaaatggggaacaagaggttaggaggtgattgttggtgctaatcatatggacctatgaccactaaactcttgcctaattcttaattaacaatatcgtcattgacaacacatgaataaaggagggagaaaatggtagtttttttgtttgtcttaggccaccagttatacaaatcgcactttttttttatttttcacttcctagcaatcattattgtaggaaaacatttgatgtcgacaaaagtcttgtaagtaatctatatttcatactcaccactcttacgttttttaactttatactattcataaaatctttataacaaaacattataaattcggctggtatattgtctagtgaccatctaatatggccctcgcacgttggcgatatcaatgattgtcatgttttcgtcttcatattttgtatccatttttatttatcttatttatctgtatgatatagattgtatatgagagacatgttatgggtaaggggaaataatggagatggggagagatagagattgagacccatcatggtcctggcattgagagaaagagagagagagatggtgtcatatgatatgatcatgtgatttatcatatggtcccctcgttttataatataagaaaatgaaattatagtggaccaaccattgttaatatatcgtaactttcttgtttcgactctttttgaactttggtataaatttatgtttatgtatgtgtggatttggcttaaagtagattcaaactcagtgaacccactcaaacacagttgtcaataattagagacctagttagagtgtacttttcttttttcttttttatataagatggtaaacgttttcgatagcagaattcagtttctccaaaattatacttcatatgtatcataagtcatctgtttcgagttgaacgatttgttagaatcagattcatcttgttagcgagtctactcacgttagattattaagacattacgatgtacgactaccatatcacacattagaaagaacaaacaaaaatggagtgctttcttctttgattagttttaaatgttttcccccaagtattttatgaaaacttgaccaatcctttgtcaaacatgtgaggtgcctttatttgaataaaattggaaaaaggtaataaataaacacaaacaagtactaggaatcctttccttatttaacaaaataattatacatccaccacttcctacaaatatatgttaatttcacaaaagagagcaatcatggaatgagaaaataaaacaaaattatattttcatttttcccgataataatgaattatatatatgacccgttgaattggtaaattatataggtaggaaaatggtacgaactatttttattcggtagaatggatctcaaacagattctccaagatgtataacacgtatcgctggagttgtacggacgagtttgatacgaaattcccattcaatgatacactttaatttagaggatttaaatgttgtttttataatgggatttgaatggatctaattgatattggaacacatgtttactatgcaatcagatttcaaatgttagatgattaataaaaatgaaacaggataaaatatattttttaattgtttatgtgaaattttcttctagtgatgtatcatcatttgtttatgtgaaatttgatattccatatgttttagtatatccataagaaactcatatctaaaactgatgtatcattatccattaatattaatttgttgtacaagtgaatgatagttaatatcgcttatatacgtgatttcttgccgcatgtacgtgagatcacacttcatgtgcatccaaaaatttgcattttatttctagaaattaagcgacaaggaagacagagctagagagtactgtctttactctttagacgtgcatatgtctcctcgtactaattactcttttaaaatccttgcatttcattattttctgcgacaacatatttggtcggaacttgccaaatgatgtagctattgtccacgtgatgttttagtttgctataatatgttttaagtggatccttactcaacattaacaccaccctataataataaaaaaaatttaaccattcattattcaagtttgataaccaatatatatccgttgctcaaaaaaaaaaaaaaaaagataaccaatatatatcttattgctgtatttatctttatatagttttattttaatagtttttgaaaactgaaaccataacaagaaagcgtgaatccaaacgcattcctatgaattgtaaattgacaagtagcattttagaatagatggaatctaatctctaaatcgtaaccgaataaatggattggatccgttgcacagatggtttacaaagataatcatattataactaatccgaatttcaatcttgttttgatctatcttttaatagcaaagtccatgagtttagtgtttttgagattcctggaccaaagggtcatttttcgcatattaaaatgaatgagataattacgacaaaaaaatgaatgagataatttgggaaaattaaatatatacaaaaccattattatatgaatgtactaaattatttttaaatttttatatttcacctatacctaatacagaatacagtgtcattgctttgactccctccaccaacaagtgaaaaacctaataaaattttactaatagaaaacgaatagtggaagaaaccatgtaatgtccaatcaaccagtaaatcggtttaaaatatataaaaagtcagtattcttaagtagaaagataataaatttgtgcaatagtaatcaagatagtagatacgccgttggaatcaaatcttcttttcttgaatgtgttgttaacttaagccaaccatttgattctctttactgcagctatattaattattaaacaccaatgcaataaccatacatttcttcgttttatttagtctgtatattcgatcatgacatcattctcccacacttccaaaaaaaaaaaaacaattcgatgacgatatctatattagttgagacatgcatatctacaatacgaatattcgttattctcatttactgatgtggcgattatgatttatgactaaacgagtgattaactatatacaaaaagtaacaattaaaacaaaagtaatagaaaaatattgtgaaatgaaaattccagtgtatcactaatgaagcaattaagaatagaaaactaatactataatgtttatattcccatccgtgcgtttccattcactttaagaaatgatcatattcgcaaccaacaatttgaagcaaacggtcctctactttttattgttcgttttctctttaccgaattttaaaatcacgttaattatctgtataactacctttttgcgttgaagtatttacaacttgagtaaaatgtagattcgtatcaggatacaaacacacaataatactattcagagttcttagtaaattagtttccttttgcagcgatttatttccgtcaagtgtataatatagttaaccaacataacttaagttaaaatttcccaagtatagatataacagaagatcaaatatcgactcgaaactgagttataattaaattaacacgtgaaaataaatagaaaaacaagaaaatatctcgcacgctttccaaagccctagaacaataacgttcgatggattggaaaaatctctgctggtacattcacgagccaacacgtttgcctgccacgttccagacacaagctagaaagtaacggcatcgtcaaatctaacgagactcatcaaggaacaatttataaacatcaatttctttttggtttcacacgccttattatggtaagaaactatttttgcctattgaatgaaaaaaattgataagacatatgaaggatgagacctaactatagtcttaagtacataacatttactactactcaaaaccgttgtctttaattttaacggtccacattcgttctcacaataattgaccatacgtttgtttaaatacttcaaaggaaaggaaaaacagcaagacgtttgtgaggtaatggacaaacgacacgtagtttgaaagatgagaaggaagacaaaaaggcatagagaggaggaagagaaggagcggtttcgtaactgaaactgaaaaagctttaagagaaaacccggaaaaaaaaaaagagaaatattttaatcaattcttctttatcacaaagagtgcctttgtattaatgaattttgatgttgtgtaatgaatacagacataaccgtcgtgtctcgtcgttaaagaaacgagagtttttcagctctttacttaccttttcttcttacccttctttcatgactcttcttctttgatgggttaataatgctttgagcttgatgatttcgattttagtttcctgttagtgtttgttttcttctgtaaagcttggattttttttggtttcttcgatggcgaatgtggaagctgatttcagaacatcaggtgagttcaaattttgacttcaattttctcaagttttgaattttctttttctcttgggaaaaagtcaacatttttaactctaatcatgagccaaacaagcttagagccacttataatttctattataaagcttcaaattttgcaactttggttgaaattgatagctgttggttggaatttagggtctaatgatgatgaattgtacacggagctatggaaagcttgtgcagggccacttgtggaagttcctcgttatggtgaaagagttttctacttccctcaaggtcacatggaacaagtaaagaatccaaactcttaagattattccttgttttgtctttctcaagttttaagatttgaatgtttgtcttttggcagttggttgcttcgactaatcaaggagttgttgatcaagagataccagtgtttaatcttcctccaaagatactttgtcgtgttcttagtgttacgttaaaagcagaacatgagaccgatgaggtttacgctcagatcacattacaaccagaagaagatgtaagtttaaagaatcttgaattaatgtgataaattcagtgaatttgatttagattttgtgtgtattttattatgcagcaaagtgaaccaacaagtcttgacccacctttagtagaaccagctaaaccaacggttgattcttttgtgaagattctaacagcttcagatacaagcacacatggtggattctctgttcttcgtaaacacgccactgagtgtttaccttcacttgtaaatgcttttatctttccatcttcattttacagagtttgggcctttcttagctgaatttgtcactttatgttttgatttttgattttcaatacttaggatatgacacaacctacaccgactcaagaacttgtagctagagatcttcacggctatgaatggaggtttaagcatatatttagaggtaacagaatctttaagagagtctctgaaagcttcttttaagagtctattaagttttgtcttatttggatagggcaaccgaggaggcatttacttacaaccggttggagtacatttgtaacctcgaaaagacttgtagctggagatgcatttgtgttcttgaggtagctaaagatcttgtgtctttactttcgggttttacttcatggggtggttaacaagtaatcttctcatgttgtttttaaggggtgaaaccggggatttacgggttggtgtgaggcgtttagctaagcagcaaagcacgatgcccgcatccgttatttcgagtcagagtatgcgtttgggagttcttgctacagcttctcatgctgttaccacaacaactatatttgttgtcttctataaaccaaggttaagttttaaactttctccatcttgtataggttgctagtggaagggctttaagcttgacattgtctgttttttgttcaggataagccagtttataattagtgtgaacaagtatatgatggcgatgaagaacgggttttctctcggtatgcggtataggatgagattcgaaggagaagagtctcctgagagaatgtagtttctcattttttgctttgttcacttgttgattttttttttatgagtcctctcttgaatgttgttgtctgaaattttagaatggtttcttcttcagatttacaggtaccattattggcagtggagatctatcttctcaatggccagcttccaaatggaggtcattgcaggtttagtgaattggaatcattttctagagatgatatatatcatatcattcttgttgcatactttctgtaaaatctcttcttcatatgtttagatccaatgggacgagccatcttctatacagagaccaaacaaggtctcaccgtgggagatcgagcctttctcaccatccgcgcttacaccaacccctactcaacaacaatcaaagtccaaacggtccagaccaatctcaggtatcttcaaaaacaatcaactcttttagtaattactgaaaccggttctaagagttaactaagtttgatgtattgcaagcaagatctctgatacttgattcaagattatctctctaatgaatcattctctagagatgatatatcatatcattcttctgtcctgccttgcagaaatcacagggagtcctgtagcttctagtttcttgagtagtttctcgcagagccacgagtctaatccatcggtcaaactgttgtttcaagatccagcaaccgagagaaactcaaacaaatcagtgttttcaagtggattacaatgcaagataaccgaggctccggtcacaagtagttgtaggttattcggattcgatctcacgagcaagcctgcttctgctacaattcctcatgacaagcagctaataagtgtggattcaaatatatctgattctaccaccaagtgtcaagatcctaactcttcaaactcaccaaaagagcagaaacaacaaacatccacaagaagccgaatcaaggtaaaacaaaccattactctttttactagagaaactcaataacttacaaatttttgttatttctcaaattcaccactttgtttctgtttgttccttttaaggtgcaaatgcaaggaacagcggttggacgcgcggttgatttaacattgttgagatcatacgatgaactaataaaagagctagagaaaatgtttgagattgaaggagaacttagtcctaaagacaaatgggctatcgtgtttacagacgatgaaggagataggatgcttgtaggagatgatccatggaagtaagtttctctcaatctctttcttcagcttaaagctctctctcgagttcttaacaattgtgttttgttgacaaactctcttgaatgttgcagtgagttctgtaaaatggcaaagaagttattcatatatccgagtgatgaggtcaagaaaatgaggtcgaagtcgttgttgggtgataaaggtacgatcgtaaatcttgaatcagatcagaggacagttcacgtttaactatcaagttgttgatttcttactttcttggagactctctcaagtctcaccaagtccgagagttaggtggtttttttttttttggttttttttttggcgttaggtgggtttgttatttacttgtttaacataaagactataaaatatacagttattatatacgagtatatcgtattaggtttcaaacgacgtcgtttatgtaaagtgtttgcttttccgacgtggctttcgtcgtcatgactaatgaatgatgtgttagcaataacttaaaaaaggtcatatttttctaatgttaagattttgtgtgggcctaataagatcgacgattaacatggtagtagtaggcccaaatactgaggccataacatttttactgtataaaatttcttctaaccttcttatttatagtcagttgactaattaacccaataaaagacctataaaagaaaaagtgtcaatgcaatacacatgtttaataaagttgatcaaataatattagtatgataatatacttgttaaatgaataattaatatgtaagaagacaaatggagttaacctgctccctttttattttgttttgtcacaactcacaaaagaacctgctcccttaatcttgtgtttcgcgtaacaaaagacccacctccctttttttgattattattatggacgtcttattgaacattttgacttttttattattgcaaaaaccctcacctaagaccactttcatcatattttaataatttttcctaaactaaattaatcatcattataatcttaagacttgcgagaacacactaagcttgagaagaaatcataagctcggtgtcggtgggaatgttttactgatcaaactacattttggttttgggtccactttgagctttctttaaaatcgttaatcataataaagtcatttgtcggcagataattttcacgtcagcttcataattccttaattttaattcgtataatttgatgagatcacaagaatttcttcaatgtagtagagtatatcagttgcatgaatacaaaatgatttaatgttaatcacatacataccattgattagaaaaaaaaatggttaagaagaccaaatagaaaaagagatggttcaaataacagtctctcacgcgcctcttttctcaagtttacaaagcgcaaaatccttcagccattttaagttcacgtgcctcacgtggtttaggtgcgcgtggctatgtcacgtgttgcttctgcttgtactactattacattacctcttgagcagttgggtgatatttatttattttcacctctatagtaaatagtgaagctttaaaatgtaaaaataccatcccttatagaataacactgtttgaactttagtgacaatgtattctttgaatagtaagaacaaataataacagtttagttggtgaatgattctattatttggtgacgtggtcagtcaaatttcctctaataacaaaagagtattgacttttatgaatggttgtctatctagtcaacagtaaaaaaccaccgttggatcattaataatcacaaatgatttgagatatatttaatgcattgtcttttttttcttcactctcccactacctaaaaagaaactgcctaagactaagctgaagaagaagaaagaaagaaacagagaagacataaaaatgagaggagacaaggaagaagagaaggcgaagcttgcacttgtgttagctgcaaagtcaagatcgttgttgtacacttcatcgcctgcgagtccacgtgtgtttgcttctccgattcacactcttgcctctgttccgttttgttgggaagaccaaccaggcaagcccaagcaccctcttcgtcctctttcttaccccaagtgtcttgatttgccacctcgtttgctccttcctggtgagttcacgcaaatgcccttgcccgagaggaaacatgggctcttgaggttcttgaggaggaaagggagaggggatgttgttgtgaggggtaattatgtctttctgtcggagaatcagagagcaggagataatatcaacgagaacaacatgaagatcatgaagtttaacagatcagggagttaccatggtggtggttctgttaaaggatctcacttttgggtaaagtatttgtgtttctccgctccttcttcataacttcttcatcttcccaagtcttgtctttcgctgaaacgggtttggttggggaaatgcagggaagtttatgcaagggattgaagctagcaatgccatggaagaacaagaagatgagaagtggaagtgtttaagcctgttttcaatatgcattatctatctatctattgagggatcaagatgatgaaaaagagctattaagagtgtatgtaagattagcaattttactgtaatttaatatctgtgtgatatgcatatataatgttgttaagactcatgagccatggcaagaaaagtttcaagcttttttcatttgttgttaagaaatgaatacatctgatcaagtgatgaacaaaagtgagtgtacacacatgcctttatattaagtttcataacaaacaaatgagtctggcttattcattgtgaatagagagagtaaaagacaaaaaaggaatagggatcatctgaatgtaagaaaacaggggaagtcattgcttgttttaactctgtttcttccctgtgacaccagcaatcacctgcaaaagcaaattggatctgagttaatacttgacgcctttgtttgcctgtaaagagtatataggaaagcgttggataactaagcaatgtgataactaactagtctcttttatgcccaatccatttttggcagtaacaaaatgtgatcatgacactcgtccaatgatgaaaagcatagatttttaaggcatggatgaaccaaagatggaactctcaaatcacaagaagacgcaggaggaacaaaacatcgagatgatgtataggctacatcacatagcaaaaaaaagaaacgtccaaacattcgcctacacggatactaagaacaactatcatgcagagttcccacatcagagacatttcattagataggaaatagatgacgattttagcagcaaaaggaatttccacagagataaatatattctaatacatacatcggtaagtggaggagctttaacttgtttggaagcctcgagagagtctagaataggcctcacaaccgcaggcaaaaatagtcctacaagatgaagagaatccatcagcaaatgtatattaacacaattgccttttgctaatgttcaagaaagacataatcttttgctacttatacatggagataatggaagacatggttccaaattaagcttaatttcaactccttaaaatacactctctttgacaacccaaagaaatgacgattccgaatagagagatttggatcaggcatttctctatattctcaaattacaatcgagcaaactagctctatagattcaaagaggaattc

SEQ ID NO: 383 - DNA, 84825 bp, Arabidopsis thaliana
gaattcgttgaatttggatgtattggaaattatactagcgaggttaccgataaagagcatcacaacttgcaacttggtttgcaaggaatggaaatcaatcgtagaatctgagtttctccgggagcttttcctttctcatcatcaaaactctcattcttcgtggtcgctcatatgcgccgaatatcaaaactatccaagtggttgtatcacatgatttctatgctgaatctgatctatgccaagtcttagattttcccgacttggataacaaagcggatttcagaagaccttgcacaagttctcaagggtttcttatgtatatgaacataagtctagagcataagttaagtatatggaggctagagagcgcggaatggaaattagtagctcaaatatctccaatgaccgctttcgattacattccgctggcagtaaacccttctgattctaatacagtatacgtgcagaggaagatgcacccctgtttggcctctgctaacttgcacaatggcaagtttggggaccatagcagcgacaatggcactctgagttttgctggcgagtgggactccgcggttaaacgtttatatgaatattctacctttgctctcccgcgttggctctatcggatcccttcgccactttcttgagcaagtttagtttttgttttggatgttgtttgatctatttttagtatttttgtataagaacataagtttagagcatattttaagtattttgattgcttgatggattgttaacgatacaattaaagaacacagcacattcatttcttcatctaaatcaactttgcggctaatcttctgtagaagtacttaaagcagtaactgaagttttttctgtgattctgttgtaatcaggaacctgttcgataactacaagatcgtgtacacacataaatgtgaaggcaaccttatatttcatatggatcactttgaagtatttattatatacatgaatcagtacttacatgtaatgtgttatgtatgtacgtaagtaacctaagaaggctagagtcgtcttattcactcaaacagcctgcaagtaaagatgtaaggatggtcaaaattggtgtacttcgtccaatatggctgatacttgcttatccccatctctgtccatggtttcatgtgtccattgtaatgtataacagctgatctttcaatcttcttgacatcgattcctttatcataacccagtccaagtaagtgccattttctctgaagtggttgtgtcagattgtagaacgttatgagccctggtggcaatgttcctagtttccatagagtccggttttcgttctgcaaaaacaggggaataacatatcactctcaacttaaatctacaacagttttagattaaagataagccaagaagaagagctgaccaggttttgccaaaagtgataagtttctgtaatgttgttcttcttccattctttcaggtcgaagatgttcatcccataagcccatccgcagaacttgggatcaaagttttctgaaatgtgtttatcactgaaagtttaagtaagtatcaaggcgatggaaggtaacaccacaggtttctactgcaccattcactttccctttaagatcaatggaccataggggagttaaatccttctgaacaaccacatcatcgtcaacaaacaagattttctccaactttgggaagatcctagggatgtagaacctcaggtggttaagcattgacatgtatttcgggtaccggtacttgaggttttctgagcctgattcaactgattcagacctcgctgtcttgaagtagaacttcttcatagctgctgactcgagctgactcaaaactggagagtaagatgagttgagccaagtaaaatcttcaaacctttggacatggatggtcgcttctccaggagggttcaacagaaaccacatactcattgctccaaagttgagcttatcagtcacaaggtggaaaacatgccttgaaggatcctgccaaataaacccagtaggccttgtaagtttaaagcacttattcttgcaacaattactagggattgatcattacctgtgcattcatgactgtggagttgacaacaactgatgcagccagtacattatcagagaagagagcgtagtggtaaagttttggattctccaaattctccctccttggaaaatttctcatcggtaaaggcaggagatgatactctagattcaagcgcatggtcaagcagtggatagcatctggtagtgccttggaagctagctgagtcaagaacgttatataagtctgctcgttttcgagttcatcttcaactgtttgtagcattgctctcaacttatttgtcaccaacttgcattcatatagctgctcgtgtgctctagccagtatttgtcccatgtctcttatactgtcaagtactctgccacaacaacaaaaggattaaactttttaagagtttatcttaagaacaatatgtactgccgatgatacctctgctcctgatcaatatcagtagattcttcctcccaagctagtttcattagttgtgtttctatctcttggtgcaaggcgagattgtttgtaaactttgcaagtccactgtaaactcgtgccatgatgatttgatcttgcatcaaacgtaacatatcttcaaaactcttgcccctccggtattcatttttccaaatggtgtagtttcctagtggtgcagaatcgacagatctggaacgtgccatggctgccgtctcaagcttttgcagactatcatcattcatcagctcattagccctttccaatcttttttcctgtctcagactctgagaaaaacacaacagaacatatcaaatcagataaaagccatcatgtaaccaatgtgaagagagtaaagaaagattaaaagttaccctttcatgcaacatctctggtgtatcattaaatgcttttcctatccaggttccatgaccaaaacgaggaaccattttgtcctcgtttcccttcaaacaacaagcatcagtcatttcgtacaggtcaagaaagtagagaagaaccataagtatctatctacctcagaagaagtttgaactgagttagccactgaatgattcttcctgagtgaatcaaggctcaaaggattgtcactggaggtggtggaattgagaacatcaaggacctgtttcaaacgctagtaagttacttgtaccaacaaaggatcggaagaacgtaagcagcaaaacaaagaacaccaaggacctcttttgtgaaaagagatggaattgattccagagcttcacgttctctccagttaagatcctgaataaacaaccattcaacaacacgtttcaaaatttctttcaaatctttcagtacaatgtgatgatcgtaagttgattaccttgttgatgaagttattcctgatgttgtatttctctgaaatgatttacagaaataagtacatcttccaagaactaaagaaaaagaatccattaatggttggtaaagaacgaaccaaacagtgaacgcttgtgaagtctgtagctgatcatgagggtggagtaaacgagaaataagagaaaccccaaaaccactgatgtcacacattgtcgatagaggtctctgcacctagatcttctttggattctcctcgccatcagaaacttcaaaccctaatcgaatctaagagacgatcgccaaattcagtagctctctctctctctctccaagacgctttttctttgctcttctctgatctgtatagctaaagtagctaacgaataacagactattatttcaaatcggttttatatatgcagcggaaaacattaacgtcgtcttttgggatccaattatttaaagaccctaacggcgtcgtttatcccgatggcttagagggtgatccaacgcatcgtttaaataattgccagttgtcaactaacgccgtcggattatgccttattgggcttgttaaacataaagcccagagctatttacgcaaaaatatctggcattaaatagttaaatcgagtttaccgaaagattcagatccttattcttctccaccggatctcgaaatcggagaattagccaaacgatggccgccgacggaatattccgcagcatcttcgagggttgtatctccggccttgattccgccatcgaacggcgtccttaccacaaaaactgcggatgtgctcttcacgataaatcaagtggcgctgggaaaaatcaaaatcagcgacggccgccgtcttgtcgccgccacggaagctcagagagcatctcgttcccgatccgaaggtcttggagcgaaggcaacatcatggctatgaatctcttctcctcatcgtcgtcttcttctaatctccaatcgctttcttcgtcttcttcgctctcaaatctggcatcagatttaccggtggataatgctgcgacggaggaaccgagcagatctaataaacagctacgatggacgattgatgaaggtgaagatgattgatgatgatgatgatcaattccaggttgttaacttttgctaatctctgtttaattaaacttctcaatcattgtatttgagaaccaaataatgtcagtcattgtatttttatttttttgtaaaagaaacgaaaatgtttgtttacgattgaaactttgaatgattagcatataaacttgtggagattaatttagcaactttagcaaaagtaattaaggaattaatctgtggcaattaagcatctctcgtccctgtaattatcataacaaattcatcgtgggcatgaaactatgaatctgtttgattaaagtgaataatatcattaatctctaatcaataacataaatcatcactccagaaaaagcatttatctaaaacgttcaatagcatttccttcacgcacatgagttccgacaaagaggacatgaaccatgaatcttgagccacacatcaatacattccacatggaagcaatggtcacattccggtatgaaacgtacggtctctttgctcgcatactctgataaacaaatgggacacacaataccattagtacccgaaagccttctgctttctcccaactccattttcttgaacgtttctattgtagattggtcaagacccctcctggccataacctctctcggctgctgcattacggttgcggctgcgatagctgaatcgaatctttcggagtcgtaaaggcggatagcgatacaagtaggaaagacaaagacggtgactgctgacaagcttataactagtactagtactccactacttaaattacctgtcaaaatatttccaaagtcagcttaaaatctaattaaaccatcaaaatgtaatcgctctatgtgtggaatcggtttatcaattaaaaaaaaacaagtttacttagatcaaatgccacgctagtaatgtggaatgagagattgagaatacttccgtagttgatgtaaaatattggatttgttaaaagacagttatcaatcaatagctatatcgtagtgtcaaatttaaatcctactatgatttttctatacttgccttatgcgtgaataattacttcagaaaccttaaacctaattaagaatataacttgaggttgaagatttccaccaaatcagatagtctcttcttcatccttaccattaatgaaaagttctcttgaatcgtaaagaaaagaaaaagaacaagagaaaatgtttgagttatatattgtaccagtttttttagtagcccctaagcatttggctctgcaatcaggcaaggcccactccagcaggaggctttgattgttgaggtcactcgagaatcttgtttccccaaatggcgaagtagccggaacatgtaatctcttcacgatttgacaagaaggaagcatagactgtgcaagagaataattagacgtggcgaagaaggatgaagtagaattgcttaggcaaggaatcgacggataccaagacggcaacacgacctcattaggacaagacaagaacgtgtataagatatcgaagtgaggagagaaaggagatcctgaaatgttgaaggttaaaagccgtttagccaaacagttttaagggtcgttgatatagattttttgccttctgtagtcgatatctcggacaagaaatgttccggacataggaagttctaggacagtcttattgagatcggtgcagtggagattgaatctcgcatggttacagaaagggaaacgaatggggacttctaagggtccacatctgagtggtcttgatgaagaagatgaacagttattagggtttgaggcgtgtcggagagagacgaggaagagaaggaagaaaacgaaaggaaaaagctgttttgagaatgtcataatgttattcgatactattgaaaatgttattacatgtagtattaaactaaaaaatgtatttaagagtttaattaaccattctcatacgtagttaagtactaagaagaaagtcagaaaagtcaaaagaagtagtgtatggtccattaatggaatgtgtcgtttgattgtatataacaactatatttcataaactcaacgataggaatttataacaaaactgatattttatcaccaacaagttttttgaaaatgatgaataatatataatttcatgtatgctacataaaccaatggttgataattatttaaactttcaaacgattttttataagaaagatgacataaaatcttagtccatctattaatatcctcttttgtcactttttctttgtatagatatataaatttattttgatatatatataaaaaaatagctaaatatacttcttttgttatgcttctttcacatggttcatttcacaatacataaacaaattgaacaaacaatatcattaatctttaatcaagaaaataatgagtcttcactccctaaaaatattcatctatgtttttccaaaatacacattaattaaaacgttgaatacttcaaacatttcagcatttccttcacgcacgtgagttccgacaaagaggacatgaaccatgaatcttgagccacacatctatacatttcgcgtggaagcaatggtcacattcaggtataaaccgtacggtctctttgctcacatactctgataaacaaatgggacatacaataccattagtcccgggaggccttctactttctcccaactccattgtcttgtatttttctattgtagattggtcaagacccctcgtggccataacctctcttggttgctgcattacggttgcggctgccgctggtactgcccaatgtcgtcgtctcggtgtgttgtgaatccggatagcgatacaagtaacaaagaggatgactgctcctattatggacaaacatataagtactgctactactgccctgcttaaatgacctgccaagccaattaatgtttgaggagtcagtttaaccacttaaaaacaaagtatgtaattcgccattttgattatagcgtgtggaatgagatattgagaatacttccttatatagttgaggggaaatattggatttgatattttcttaaaacgcaattaaataatcaatggtcaaatttagttccttccaactatgattttccgattcttgcttaatgggtaaaatagtacttggaacacgtaaaacctaaagatttcttggagttgaagctttccacgaaaacagacagcatcttcttcatccttacccattattggagttatcttgggtcacaaggaatgaagaacaagataagaaaaaaaaagttgagttcgtaccggattttttagcaccgaagcattttacttcgggggaggctttgttcttgaatccacatctcaagtaatctatctcacaacctctgcaattaggcgagttccactccaacaagaggctttgattgaggtagctcgagaatcttgtttctgcaaacggcgaatcagccggaacatatattctcttcacgatctgacaagaaggaagcatagactctgcgagagcaaaattagacgtggcgaagaaggaggaggtggaattacttaggcaaggaatggacggataccaagacggcaacacgagctcattaggacaagtcaggaacgtgtataaggtatcaaagcgaggagagaaaggggatcctgaaatgttgaaggttaaaagccttttagccaaacagttttcaggatcgttgatataaatctgttgctttctgtagtcgatatactggacaaaaaatgttccggacataggaagttgtaggactgtattattgagattggtgcagaggagattgaataacggatggtcgcagaaagggaaacggatggggacttctaagggtccacatctgtgtggtctcgaattagaagaagaacatttactagggtttgaggcgtgtcggagagggaagatgaagaagaggaggaaaaataaaaggaaaagttgttttgagattatcattgttcgatagtactaaggaaaatggtattactagttgatattaaacgaaaaattctgttaaaagagtttaaccattctcataattaaagtactactaaggagaaagtcagaaaagtctacattttgtacaagaaaagtcaaggatatgttccataaatggaatgcgtcgtttgatatggatataaataactacatatcgtaaacccaacaaaactagtatatatatcttaccaccaacaaatttttgaaaatgaacaaattaccattcttaacattttctaaaaaaaatcataaatggtttatgtttataagtcttaacatcttagacagcttgacgagccggagaaggagaattccgacaaagaggacacgaaccatgaatcttaagccacacatctatacattcactgtggaagcaatgatcacattctggtatgcaccgcacggtctctttgctagcatactccgataaacaaatagggcaaacaatatcatcattatttcccggtaatcttctactctctcctaattccgttttcttatatgattctattatagattcatcaagacccgtcgtgactataacctcgtttggctgcaaggcggcgatagccacgttgcgttgtatcagggaagcgaatctttcggaggtgcaaactccgactgcaatacaagtagcaaagatcgtgagcggtccaattatgctcaggagtataatcttaagcacttgtggttccgtgttgtagcctgccaaaatcatgtttcgaaagatcaatttacttaagccaccatgtacgtattattttttctttgttgaatctgatgataacacaatcactaaacaacaagtcatgttaccactattcttttaaaattcgtattataagggattatctacggagtacaacagtctatgacatattgaaaagagtggagatttgatctttttaaaaaatgtggttaaacaatatttaactaatcaatatatagtcaacggctcaatgtcaaatgtaatggcctactagattttttgtctagttgtttaatcattggataattatttgaaaaccccaaataatcaaagattcctccaatttgaactttttttatgaagactaactcattcgtcgttaattcataactattaattaatgtaagttataagaactaagaagagaaagaattggagtaatttgtaccggaattttcaaaagggaagcatttgacttggagagaagtgttgcttctgaatccacatctcaaaaaatccctctcacaatcgctacaacttggagaatcccatttcagccaaaggtctttatcgttgacatcagtcgagaatcttgatttcttggcaataactcgccgagaaaccggaacatctaatgtcttgacgatctgacaagaaggcagcatagatttcgcgagatccaaactagttgtagccaagaacgaggtcgttgaattgcctagacatgggatggagtcaaacctggacgactttgcaacctcattaggacagctcaagaacgtgtagctgacaaggtagagagcagagaaaggagatcttgatatgtcgaaggtcaaaagctttcttgccaagcaattttcagggtcatagagacgaatctgctggcttaaatagtcgatctctcggacaagaaatgttccggaattaggaagcttgagagctgtcttgggactagctgtgcattggagattaaatccggcatggccacagagctcaggctgttttgagagtaaccagaaagggaaacggacatggacatcatcacgaccgcatgaggaggaagagcattgttgtgggtgtgaagcgtgtaggagagggaagaggaagaagaggtaaaggaagagttgttttgagaaagtcatttggtggttttttgtactaagggagggacaagaagacttgttattatttcacttaatatatatatagttcaaacttaagagatctctatctttcgtctttaaataaaaataacaatattcattttgttggttagatgaggaataatagaatattgtagtctgatgaatctatggaaaggtcgtacttgttctctttagtcaagatacatttttaagaaattgaatggagacatgttataattcaaatcatgagaaccctaagcacacactttctttaagataacaatatttattttgttggttagactaagaacattatagtcggaggatctatagaaagattgtatttgttctctttagatgatgctcgctaacaaacaaaccttgttaatatttaaacgaaaaccttggcccctgcgatggtcttgcgttttgaacgtggtaagcacaactgaaaggcttggtgaagctttggattctgtcatggaagctgtaccgggtctttggaatcgcctgcgatgcaaagcatggcttatgtgtatcttttcgaataggaagaggatgatcggaccttggtaccttaaggaattcaaagcgaagctcaatgacatgaaagacttgagaaaacagagacatcaaaaagagctacaggaagagcagattcaatacgaaagtaacgattgtgaattgcttctgctcatctttgagtttcgttctcatcgatttgccttttgaagttcctgtaagattttgacagttttggagtttcacagtagatttgacgtcattcattgcttattaacagagagacatgtatatcgtagagaagagctaaatcttacaaagagagaaaactattgtaaacacttaaattgtcattaccatgaaatatgtctgagtgaagttaacaaaacaccttgaacatgtccaaagaatgacagaaatgaaaaagttttaaaaatacaaaagccaacaggtttataaaaagcaaaccaaagagtatataccagagttttgaattaaacaagaaccatttttagtgttcctgagagtgatcgagatggtaatccatcacatcggatagggcttcgaggaatgcagcttcgctcgtccctggaagcacagcttcttgagcttcctctaccatttcctccaccagagacttcttgctaagtgtttctctgcacattatggttccaatctcaaatgctgttagtcctctttccactcctttcttcagtagcatcgttgagattctgagcgtttgagccgtctctgccggcattttccatccatgaaactttagtagatcaatatcttcctctgcgtccagtgatcttatgtactcttgggtctctgcagagtacggtttccgggcttgtggccaatatagccactcaaacgtgcaatcttcaaactgatgacgaaaacaaaagttagtttcatgacaatgaacactataggcaaaactgaatccaagaaagaatagaaaaagagtaagagcacttacgctttcaggcaagcagtatccatggtctataggaaccaaaacgagcttcccgctttcgtccttggtcatcaaaatgttcccaccatgtctgtctgcgttggccagtctaatatccaacacagaaatcttatgaacttcttctactggaaatgaaagtggacccatatcttcacagctgccatcgttctcagtaaacatctgaagtgatccaatcttggttttgattcctttgggatggttaaaccctggatgcaaacattcaatcatagctgtgggaggtacaccagcaaaacctatctcttcaccaaacatagatttgtttccacttttgggatgatccaaaatgtatgcagcgacttcccttaatgcaccttctccaacctttgttcctttcttcaaaccttcaccgtttggcgaaagtggtaaaccctgaggattgttctcagccattggttcctcatctattggcttaaacacacccacaaatttgttgccagatggaccctgcatgaaataagctcctcccgtaccttcgcttgacctgaccggagaattcccacttttaagtccatcagaagcagactgaatcatatctttaaccaccagaggtactttagccttggagttaacaactaccggctccaaagaaagcttttttggtggcacaatgctcttagcttcacgacccttcttatcttttgcttgtggggcaacaatagacaactcaaagttcttctccaccggcttaactcgaactttagcagatctccgcacaagcagatgcaaaaccgagtcatcgtttctacaaatgtcattaataagactctggtcttccaacttctcaccttcgtaaagaatctcctgttcatcaggatcaacaaagtctccacgctttttcgaaatctgcttcttcacatacccaatgtttctccctctctcgacatgaaacctgcagtgtttcccacaggtagtcttaacatcaagaacctgaagatcagagagcttaagaaccaagtggagaatgttgccttcactaacaccataatcacgcatattagaattgcttctagctagctctcgaccaccgaaaacaagcttctgattcctcacaacaaagccgcggtaagactgaatccgaagcttaacagactcaatggaatcagactcaagcactcgcattggtatcaccgatccaggaagtgtaaggtaaatcatgatggtgtcgtcaggataagaatcaagacaagaattggcacgaaccagaggcataatcaatggctcgctacgaaccggacttaacgcaacaccagctgatgacatcttctttcacttggagaaatctaagaactttcttacggaaaaaaacaggattcgatgttcttcacaacacaaaatccctcagcttctatatatatatatacaacaaaccgcaataatccctaaaatcccaataccatcgcttcttcttctttttcgagaaacaacaataacaagccctaggaaaaaacagaggagatcaaacctaaacagatcagggattgattgatagctacaggtgaatcaaatcgagccaattgatgtcgccgatgacgtaccatatgaagaaaaaagaaagagagaaagagagcggattcttaccagaaggaaagaaccaaagaggaaattgggacaaggcgtggagctttaacgatgatgatccaatccaataatagagtttttagggttcaatctaatggcgtacaaaacagctcgcgaaacaagggtcaaaagagtttagaggaaagagagagaggtttttcaaaaggaaagtggtaggaaggacacgtgtctccacctcgttcgcgtaggtgacgcgtacaatgaagcttcttcttcttcttctttaatgtacacttttcctttgtttattgtcaacggtgtacggcagtttcgttgattttgttttgtattttacccttggagtggaaaccaagccagagactttggggttttaatcgtcattatttcaccgttttggattaggatgcttttaaaacttcggataaggagagagttagtatttgaatcaatgaaccagtacaatcgtaattcgtatgggcctacagataaaaagatgggccttttaattcgcttctttaactcgtttcatatccctttgttctattcaacctttcaggctttctgctatggaacatgaatattgttggtccagttgcatcttaaccaggttcatgaacatctaactaagattcaatttgatagctttatatcttcaaaatctcatgtttgatctaagtaaacataacatcgacaattctctgtttgtgacttcttgagagtctccatcacctttataatgatcacaccaaatccaaaaccagaaaatctcttcaaaagttgtatataatcaaaccatctacttggtaaaaaccacaacttttctactgcaaaactcacgtaagtctctcgtgcttctgattacagtaaagctaaattcgaaatgcaaacgtagtgattaaatgatcctcaaagctgagaaaagttgtcattattcaatcaaaagattaacaggcttagaattccattttaagccttacagaatcaaatacacgaaaccagaaactgaaacaacacacaacaaaagcttgaaggtaaaaatgcaacattgcatcaagttcttattcataaaacaaagaagataaaaggaaagaccttttttttagcccacactattcattcattaacaggtgatgatgatcgagagtgttccttagatcccaaaagatgtttacttggtttcagagaagaaacaagataatatctttaagaacgataatctggaacaatcccaaagacatcacaatcaaattccttgtcatttcttggtgaacataatccgccaaaatctcttccattccttcatgtatgtgaaagactacagggattttgcgtaagaaagagccattagtgtaacctcgagaagacgattgacgcgagaatttggctgccttgttgagttcagattgcccaattgaagacgaaatcgagcgatcggtgacgagattggttgaatctggtttcagtttctgggcttgtgcgaaggggattgaagagaggtctcttcccagtgggtttctcacggcggcggtggcggatgcggaggagatgtgactcatcgagaaaggtagagactttgagagagtggctctctgggtttgacggtggagatcgaggatagtgcggcggagagacatcgtggccgaggagataatctgacggagaaggattgaaattggatctgatcggagaaacaaaccctatgtgaaatgaatcggaagcacaattctcgtcgtagaggtgaagatgcattaatggagttgggctttatactgggcttttcagaactaccagaagcccaaaccaaaaccaaaatagattattatgtgctgcattgcataaaataatggaccaatggaaaaaaaataattgattctcatttttaagtaatttttagctcagtctcttgaaatgtcaatatatcatattcatgaccaatatataagatttggtcacttcaaaattcaaatgtacatgaacattctacaagataattaatcaaatatttacctgaataacattgattggataatattaacttgttataactattgctttatttgaaaaaaaaaaagaatggatcccaaattgtaactgaataaagcatccataacaaagaaagagaagtcaaatatctttcatactttatttgattttctaaagtataggaaatattttcccaagatacaaatatgtgaatcaatggtctaaataaagttaatgaatatacttaaaccggattcctttcactataagaaagagaaaagaaaaaaggattttatctatttctagttgaacctgaaagttatctatactgaaacaagaatagacaaaagcttcaccatcatgtgaaacttatatatcaccagagacctgtgaactagaagaaggcaatggcggttgcgtcgagctggtctcggggtaaaacgctgctataagcttctctttcgtcaatggatccgacccgttgttagactttatcacaaaagtgtgaaacattgtgtcttcagctaatgataacttagcctccattagactaacatttgagtttctcattgcttgtatgattcttgaagctggatgtgaatccaaaggcgagattactcttacaacaacctcttcattcatagcttgaatgtcaacttctggactttcttctactgttattgtgtttgattctgataagctcttatctgttcctactctttcatcttccattatcttgactttctcttgaagctctttgatgtaagaaattgcgtctccaagtagagaagccttgtccattttagaaatgtttggaacaactgatcgtaaagcgtagaatctttggttaagcttctcgcgtctctgcctctcagcttccacatggttcaatggctcttctcttccgtttgcaggctttctccctctctttctcggtctcttctcatcaacaacagaaactattcctgctcctgctaacaagctcactggtcttttctctgtacaagattctgatttttcttgctgagtgtttgtagatggattcgaagaagcagcaactgatgatcccgcaaactcaatctgcgtcttgtaattgttattatctacaaccatattcacattctctagcactttcacatcatccctctgaggtgtgtaaccaaatgttggacctttattgttattatagccttcccaactttgaggagtgaatctctcatccaagtttcttctcacttcgagcttcttaggatacgcgtgagctccactcaaatcctgcccgaaaagcttgtgaatccctccagtcatgttagtgtttgaagtcaccattactggttgcgtaactctcctcatgaacaaagcttgaacagacttaaccaagccaatgttttcaggcaaagaccaaacagaaccaagctcaagaacaccagcatcagtaggaaccataacgatcgttctgattcccgcagatttcgccataaaagacctgaaacaatagtcagactcagagttaactgcatcagagagccacacatgtttccctgaagaataacacctcccaggaccgccttcaccgtgattgaagaagaaatacatggaagctaagaagaaaatctcagtagcagtaactttctctaagctcaaagcataattgtcttcatcagatccaccaaacaacctatgaagcttctgcaacactctcttcctcatatcttgccatgtctcttcctctgcccccatgttgttaaaattataagacctaacaacttttgattcctcttcctcattaggctctcgacaacacccatctccccaacctaagacttgttgtccggatctagacatggtttgttgccagaaaatagcgtagttccagctgaaattctccgagtttggccaatcaacgagactagagagcttcttattcagagtatcatcagttcccataacaagaaagagattctgattcgaattagagtttgctcgaagaaaatcagaagctaaatgccctaaaacagcactaaccaccgatttatcttcatcatcccaacctaaatcactcatattcatctttctttatctcccagattacaccaaatcctaccaaacccaaaaccacttaaacggagaagaaaaccaaacctttcttctacacaactcaatgattgactcaacgatgcttgaaaccatataaactcgagtctctccagcttcaagattccagtaatcagattctaaggaagaaaaggtcggagctttgaacaatttgaagaatacccaccaggaaaaaatgcaaacccagtgatgaatcacgctcaagagaagcttgcgccggtgaagaaatatctcgccgaagaaagattccaaaaagctttgatttttacagagaaattgaacaattgaatgagagttgcaactagaaaagtctgaaggttgaagaagaagaagaagatacagttagagagggagagagagagagaaggagacaagacttgctggggtaattgaagtttgtatgaaagctctttttaaaaacccaaccatggttacttatgcacgttaattactttggttattcaacttaaccatggttaataattactctgattattaactctgtttcctgattttaagttcacttactttgattgtttctctccgaataaagatagaaaatctaaaatctcttttcaaatctattttgcaaatggattatctcacccctaaatctggctagtctttgaatttgtctccaaatccgattaatttcgtaaaagtaatacatacttgatggtgattttagtgaaacaacgatatttgcacttggtaaattttagagaaaatagtgttttgtgtacacacgtgtgtatgtacctacgtgagagattcaaattatagtaatgtacttaagaagtatagatcacatggtcgaaatattttaaaatttattatgtactaaatagtactaaattaattatttgtttttatttttttctctaccaataaaaataactcacatgcataaagaaacaaagaaatattgtctgaattgtctggtggggttttggttatttcagacatcgttattaacgtgggtccatttaattaatagtatagtctgagtatattattcttatcaatagtatatatatagtccttaacttcgatataaaaaatggtacgttctttctttatttagatttttatggaaagaaaattatttgtcgcataggatttgcgtgaatctcatgcccaacagtaacgttcaacaaaaagggtctcgttctgtgagagagcaccatgtgatggacttttaacctacttttctatcatcatgtgtttgtagttttctaattgttttctccccattaattaaaaactttttttataattacatgattatattcataacctattttaaagtattatcgcatgagataagcctcaccatgttttgtatggggatattttcttataataatttaaaatgacatcattaaaatttgcatataaataaagaaagagattcgataaacctaattcaaacttagggatagatagtacaatgaaaactcgtacattgaaatgtatacgttgatatactaaagctttgtaaaaaaacgtgatgataatgtacaatattgtgacgtgacatgcaaaatttgacctcttgttttgtagattaggatgataacgcgatgattggtgtcttttgagtaattcggagtcgcaccaacttataaattctttatcttcttaagttctaatagaacaaaaaaactcatatctcatattttaattagtactaaaaactataacctaatactgaacgtgttttgcgtaggcttgtttaatactatttttttttgtctataataattaatactctttcgttagaagagaatagattagatacattgcttcaaaaaaaagaaaaaagaagctaataatagttacaaaacaaaattggctttatcattatgaatttcacttatttatctttttaagatatgtagagaacctaatttaaatttgaatttgtagattgaatttcggtaattttatataaaataaaacaaaatagttttaacaaaattcaaacgagtgttatatatacattagtgagattatgcaacgagaataaaaaaacaataacggataagagtagggctcaataatcgaatggcagagagcgaatgatagggaaaatgtggggtcaagtggagacactcgtgactacggtggtctttattgcagacaataacttctcctgtctcatatgccttttgaaaacgtaaattgcaaaaatgatttgtcgtgtttcacttcttttgtcctcgcaatttcgcattctctttctctattctaacgaaaaacgcgtctaaccatttcgtagatgaaaagttgtagaagatttgagcagcttatcaatttcgcattctttttctcaattataaacgcgtctatccatttataagttgagaagtgtaaaggatatataacttgaatgattatcaacaaaatgtagggaaaataagccaaaaataaaaacgagttaacaaaaccgactctattgtgaattcataatataggtactaaaatttatattgtatcactatttcttattaaaaaaagtgttaccgttcatttatatacctctatattttctcgaaaactatactttaaaaactacatagaaaaacatgcataaaatcttaaaacaagtttgtttttctaaaacatatttgtataaaggaaccgtgggagtatatatatgttaatatgtactatatattttgtcattcaacgtatgttttcttcgaaagctaccaatatgtgtaaaactaatgttgcaaagtggtgttacttgggaaaattcggttaggaacaaaggggctaaataagtcgctttgtttacgcaactcatcttctattcttctttatatatcacgcgtttttcgtgggcttcaatgggccacatgaggtcgacatttttaacctttatattcaaaagtacggcaaaaatacatcatgcgccacgtggctttctttgtttatcataatctcacacgtctcacgtgtgacaaatgctaacgctaacttaactagtgggtttggttagccaaaataccaaatgatacaataagaaaacaagctgagttacttggcaacaaaatttagttcgaggtgagaaattcatgtgcaattgaatattagtatgactcgtctggctttaacatcaaaatcaagcacaaaacagaaaaatacgtcatcaaagcaataactatttgactaattaagaaactcattttcttgtttgcaaacccttttttatatatttgtagttttgtagacaaacgaacgtgatgcgtttggaccagcgtcacagacgttgacggctttgggacacgtttgaagaaagaatacgtcgacatttcttatttcagacttgctctctttttaggttcactacacgaattttcacgtacacaacttcacaacacgttttagttacgagattctgtttttttgttcgataatttattttagtaacacgtaaatagatgatttatatggttggtataattataaatgcaccgacagacttgaaactagaaattctaccgacagaaattcttgctcggaaaccatagactacctaccctattaatgtcaatgctatttgattaaaaacaaaagcattaattgatcttagagttatgggtttatattttataggaaagagtaaaagctcattatatttatgggcttatagaaaagagcaatagcccatttaaccgacttactctatcgggtataaccaaaaacccgataacccggctcgttcatcggggaattttccgttttctaaaagtaaatctctttgaaataaaaaagcttctccgtttccctcttttgaaaaaatcagaaaccctaaaatcgccactctctcgtctctcttcgcggtccattctgcttcatctctcccggcgaaaccttaatcgaacagctcggattcgatcctattctctgttgttttctaagaaagatggagtggaatcgggagactctagtgttcctttcgcaatgttttcttaacacgctctctccgataccggagcctcgtcgaacggctgagagagcactctcggatgctgctgatcaggctaactacggcctagccgttctccgtttggtggctgagccagcaatcgatgaacagacgcgtcacgccgctgctgtcaactttaagaaccatctccgttcgcgatggcatcctgctggtgattctggtatctcaccgatcgtagattctgagaaggagcagatcaagacactcatcgtctctcttatgctctctgcttctcctcgtatccagagccagttgagtgaagccctaaccgtcattggtaagcacgatttccccaaagcttggcctgctttgcttcctgagcttatcgccaaccttcaaaacgctgctctcgctggcgattatgtgtccgtcaatggtattcttgggaccgctagttcgattttcaaaaagtttagttatgagtatagaaccgatgctctgtttgttgatttgaagtattgcctggataattttgctgctcctttgactgaaatattcctgaaaacgtcttcgttgattgattctgctgcgagctctggtggttcacctccgatcctgaagcctctcttcgagtcccaaaggctgtgctgtacaatattttactctttgaactttcaggacttaccggagtttttcgaggatcatatgaaggagtggatgggagagtttaagaagtatctatcttcaaattatcccgccttggaaagcacagaggaggggttaacacttgttgatgatcttcgcgctgctatttgcgagaatatcaatcattatattgagaaaaacgaagaagagtttcaaggctttttgaatgagtttgcatcagttgtctggacattgctccgggatgtgtcaaagtctcctagcagagatcaactagctactacagcaatcaagttcttgacctctgtgagcacaagtgttcaccatgctttgtttgcgggggacaatgttatcaaggaaatttgccaaagtattgtgattcctaatgtttctttgagggtggaagatgaagaaattttcgagatgaactatattgagtttatccgtagagatatggaaggaagtgatgtggacactagaaggagaatagcttgtgagctactcaaaggccttgccacaaactacaaaacacaagtgacagaagtagtttctcttgagatacagaggctcttgagttcattttcagcaaacccgtcggcaaactggaaagataaggattgtgcaatttacttggttgtctctctatctactaagaaggcagggggtgcatctgtgtctacagatctcattgatgttcaaaacttctttgcaaacattattctcccggagctgcaaagccgcgatgtcaacagctttccaatgctaaaggcagggtccttgaagttcttaactatgtttcgtagtcatataccaaagccctttgcaatgcagttgttcccagagttggtccgtttccttaaagcagagtcgaacgtggtccactcttatgctgctagctgcatagagaagctcttgctagtgaaggaggaaggcgcaaggggtaataggtatgctgctggtgatttaagtccctttttgctgcagttgatgacaaacctgtttgatgcgctgaaattcccagaatcagaggagaatcaatatctgatgaagtgtataatgcgggtccttggtgttgctgatatcagtgctgaggttgctggaccttgcatcgggggattgacctctattctcagtgaagtttgcaaaaatcctaaaaatcctatatttaaccactatctctttgagtctgtggctgtacttgttcgacgggcatgtgaacgtgatatttctcttatatctgcatttgaaacgagtcttttcccaagcctccagatgattttggcgaatgatatcacagagttcttgccttatgggtttcagttgctggctcagcttgttgagttaaatagaccaactctctcaccaaactacatgcagatcttcttgctgctcctctcgcctgagtcatggaagagaagtggcaatgttccagctcttgtgcgcctgcttcaagcttttctgcagaaagcacctcatgaggttactcaagagaatcggttgagtcaagttctggggatatttgaaaagctggttgcatctcctagcacggatgagcaaggcttttatatccttaacacgattattgagaatctggactacagtgtgattgcaccttacatgaaaggtgtatggagtgctctattcacacgcgttcaaaacaaaaagacagtcaagttccagaagtcgctagtaatattcatgtcgcttttcttggtgaagcatggacaggcttatctagtggagactatgaatactgttcagccaaacatcatcactgctatcgtggagcatttctggattccgaacctgaaactgatcatggggagtatggaggtcaagttaacggcagttgctgcaactagactcatatgtgagactccggctctcctggatccatcagctgctaaactctgggggaagatgcttgatagcatagtgacgcttgtttccaggcctgagcaagaaagggtacttgatgaacctgaaatgccagaaatctcagagaatgttggatacacagctgcatttgtgaaactccacaatgctgggaaaaaagaagaggatcctctgaaagacatcaaggacccaaaacagttcttggtcgcttctgtttcgaggctttcttctgcttctcctggtaggtacccacagataattggtgagaatcttgaacaagcaaaccaaacagctttgatccagctctgcaatgcttacaactgtggaattgcttgaaggtaaagtgtttgtattgacttgaagaatggtttcagattcgtattcaggaatcaatcttgatggtgattataaactgtttttggcaggagaaaaaaggggaaagaagaagggaaacacaacatcactggattgcattgcgtctgcgaagaacaagtggtcaagtcataaatgcatatttttgtcctaaaatcgggagtttcatagcatgtgcaagttagattagagaagagcatccatcatcttccaccaaaacttggatttcttatttttgattttcgcatttaaatggggggtttgtcttgatttccctttaaaagcaaagcatgttgttcatctctgtatggtggtactatgtgtttatgtgcattttgtcgtaatgtctgttggtcatggattcatcatggttttggttgttattaaagatggagaaagccaagcatgtttcataaacttctcgatttggagaactagtttcgacgtgggcctgtaatcgaagtttgacccatatatctaatcaagtcaatttttcattatcattttttttggggccaacatctcttccttgattaagaaatttgtttttatttaactccgtgctttaaattttaatttaatctttcaagttgagaagtggagtgtactgtcgatacaaaattgtgaaagagagagagagagagagagagagagagagagagagagagagagagagagagagagagagagagagagagagagagagagagagagagagaagaaatggggaacaagaggttaggaggtgattgttggtgctaatcatatggacctatgaccactaaactcttgcctaattcttaattaacaatatcgtcattgacaacacatgaataaaggagggagaaaatggtagtttttttgtttgtcttaggccaccagttatacaaatcgcactttttttttatttttcacttcctagcaatcattattgtaggaaaacatttgatgtcgacaaaagtcttgtaagtaatctatatttcatactcaccactcttacgttttttaactttatactattcataaaatctttataacaaaacattataaattcggctggtatattgtctagtgaccatctaatatggccctcgcacgttggcgatatcaatgattgtcatgttttcgtcttcatattttgtatccatttttatttatcttatttatctgtatgatatagattgtatatgagagacatgttatgggtaaggggaaataatggagatggggagagatagagattgagacccatcatggtcctggcattgagagaaagagagagagagatggtgtcatatgatatgatcatgtgatttatcatatggtcccctcgttttataatataagaaaatgaaattatagtggaccaaccattgttaatatatcgtaactttcttgtttcgactctttttgaactttggtataaatttatgtttatgtatgtgtggatttggcttaaagtagattcaaactcagtgaacccactcaaacacagttgtcaataattagagacctagttagagtgtacttttcttttttcttttttatataagatggtaaacgttttcgatagcagaattcagtttctccaaaattatacttcatatgtatcataagtcatctgtttcgagttgaacgatttgttagaatcagattcatcttgttagcgagtctactcacgttagattattaagacattacgatgtacgactaccatatcacacattagaaagaacaaacaaaaatggagtgctttcttctttgattagttttaaatgttttcccccaagtattttatgaaaacttgaccaatcctttgtcaaacatgtgaggtgcctttatttgaataaaattggaaaaaggtaataaataaacacaaacaagtactaggaatcctttccttatttaacaaaataattatacatccaccacttcctacaaatatatgttaatttcacaaaagagagcaatcatggaatgagaaaataaaacaaaattatattttcatttttcccgataataatgaattatatatatgacccgttgaattggtaaattatataggtaggaaaatggtacgaactatttttattcggtagaatggatctcaaacagattctccaagatgtataacacgtatcgctggagttgtacggacgagtttgatacgaaattcccattcaatgatacactttaatttagaggatttaaatgttgtttttataatgggatttgaatggatgctaattgatattggaacacatgtttactatgcaatcagatttcaaatgttagatgattaataaaaatgaaacaggataaaatatattttttaattgtttatgtgaaattttcttctagtgatgtatcatcatttgtttatgtgaaatttgatattccatatgttttagtatatccataagaaactcatatctaaaactgatgtatcattatccattaatattaatttgttgtacaagtgaatgatagttaatatcgcttatatacgtgatttcttgccgcatgtacgtgagatcacacttcatgtgcatccaaaaatttgcattttatttctagaaattaagcgacaaggaagacagagctagagagtactgtctttactctttagacgtgcatatgtctcctcgtactaattactcttttaaaatccttgcatttcattattttctgcgacaacatatttggtcggaacttgccaaatgatgtagctattgtccacgtgatgttttagtttgctataatatgttttaagtggatccttactcaacattaacaccaccctataataataaaaaaaatttaaccattcattattcaagtttgataaccaatatatatccgttgctcaaaaaaaaaaaaaaaaagataaccaatatatatcttattgctgtatttatctttatatagttttattttaatagtttttgaaaactgaaaccataacaagaaagcgtgaatccaaacgcattcctatgaattgtaaattgacaagtagcattttagaatagatggaatctaatctctaaatcgtaaccgaataaatggattggatccgttgcacagatggtttacaaagataatcatattataactaatccgaatttcaatcttgttttgatctatcttttaatagcaaagtccatgagtttagtgtttttgagattcctggaccaaagggtcatttttcgcatattaaaatgaatgagataattacgacaaaaaaatgaatgagataatttgggaaaattaaatatatacaaaaccattattatatgaatgtactaaattatttttaaatttttatatttcacctatacctaatacagaatacagtgtcattgctttgactccctccaccaacaagtgaaaaacctaataaaattttactaatagaaaacgaatagtggaagaaaccatgtaatgtccaatcaaccagtaaatcggtttaaaatatataaaaagtcagtattcttaagtagaaagataataaatttgtgcaatagtaatcaagatagtagatacgccgttggaatcaaatcttcttttcttgaatgtgttgttaacttaagccaaccatttgattctctttactgcagctatattaattattaaacaccaatgcaataaccatacatttcttcgttttatttagtctgtatattcgatcatgacatcattctcccacacttccaaaaaaaaaaaaacaattcgatgacgatatctatattagttgagacatgcatatctacaatacgaatattcgttattctcatttactgatgtggcgattatgatttatgactaaacgagtgattaactatatacaaaaagtaacaattaaaacaaaagtaatagaaaaatattgtgaaatgaaaattccagtgtatcactaatgaagcaattaagaatagaaaactaatactataatgtttatattcccatccgtgcgtttccattcactttaagaaatgatcatattcgcaaccaacaatttgaagcaaacggtcctctactttttattgttcgttttctctttaccgaattttaaaatcacgttaattatctgtataactacctttttgcgttgaagtatttacaacttgagtaaaatgtagattcgtatcaggatacaaacacacaataatactattcagagttcttagtaaattagtttccttttgcagcgatttatttccgtcaagtgtataatatagttaaccaacataacttaagttaaaatttcccaagtatagatataacagaagatcaaatatcgactcgaaactgagttataattaaattaacacgtgaaaataaatagaaaaacaagaaaatatctcgcacgctttccaaagccctagaacaataacgttcgatggattggaaaaatctctgctggtacattcacgagccaacacgtttgcctgccacgttccagacacaagctagaaagtaacggcatcgtcaaatctaacgagactcatcaaggaacaatttataaacatcaatttctttttggtttcacacgccttattatggtaagaaactatttttgcctattgaatgaaaaaaattgataagacatatgaaggatgagacctaactatagtcttaagtacataacatttactactactcaaaaccgttgtctttaattttaacggtccacattcgttctcacaataattgaccatacgtttgtttaaatacttcaaaggaaaggaaaaacagcaagacgtttgtgaggtaatggacaaacgacacgtagtttgaaagatgagaaggaagacaaaaaggcatagagaggaggaagagaaggagcggtttcgtaactgaaactgaaaaagctttaagagaaaacccggaaaaaaaaaaagagaaatattttaatcaattcttctttatcacaaagagtgcctttgtattaatgaattttgatgttgtgtaatgaatacagacataaccgtcgtgtctcgtcgttaaagaaacgagagtttttcagctctttacttaccttttcttcttacccttctttcatgactcttcttctttgatgggttaataatgctttgagcttgatgatttcgattttagtttcctgttagtgtttgttttcttctgtaaagcttggattttttttggtttcttcgatggcgaatgtggaagctgatttcagaacatcaggtgagttcaaattttgacttcaattttctcaagttttgaattttctttttctcttgggaaaaagtcaacatttttaactctaatcatgagccaaacaagcttagagccacttataatttctattataaagcttcaaattttgcaactttggttgaaattgatagctgttggttggaatttagggtctaatgatgatgaattgtacacggagctatggaaagcttgtgcagggccacttgtggaagttcctcgttatggtgaaagagttttctacttccctcaaggtcacatggaacaagtaaagaatccaaactcttaagattattccttgttttgtctttctcaagttttaagatttgaatgtttgtcttttggcagttggttgcttcgactaatcaaggagttgttgatcaagagataccagtgtttaatcttcctccaaagatactttgtcgtgttcttagtgttacgttaaaagcagaacatgagaccgatgaggtttacgctcagatcacattacaaccagaagaagatgtaagtttaaagaatcttgaattaatgtgataaattcagtgaatttgatttagattttgtgtgtattttattatgcagcaaagtgaaccaacaagtcttgacccacctttagtagaaccagctaaaccaacggttgattcttttgtgaagattctaacagcttcagatacaagcacacatggtggattctctgttcttcgtaaacacgccactgagtgtttaccttcacttgtaaatgcttttatctttccatcttcattttacagagtttgggcctttcttagctgaatttgtcactttatgttttgatttttgattttcaatacttaggatatgacacaacctacaccgactcaagaacttgtagctagagatcttcacggctatgaatggaggtttaagcatatatttagaggtaacagaatctttaagagagtctctgaaagcttcttttaagagtctattaagttttgtcttatttggatagggcaaccgaggaggcatttacttacaaccggttggagtacatttgtaacctcgaaaagacttgtagctggagatgcatttgtgttcttgaggtagctaaagatcttgtgtctttactttcgggttttacttcatggggtggttaacaagtaatcttctcatgttgtttttaaggggtgaaaccggggatttacgggttggtgtgaggcgtttagctaagcagcaaagcacgatgcccgcatccgttatttcgagtcagagtatgcgtttgggagttcttgctacagcttctcatgctgttaccacaacaactatatttgttgtcttctataaaccaaggttaagttttaaactttctccatcttgtataggttgctagtggaagggctttaagcttgacattgtctgttttttgttcaggataagccagtttataattagtgtgaacaagtatatgatggcgatgaagaacgggttttctctcggtatgcggtataggatgagattcgaaggagaagagtctcctgagagaatgtagtttctcattttttgctttgttcacttgttgattttttttttatgagtcctctcttgaatgttgttgtctgaaattttagaatggtttcttcttcagatttacaggtaccattattggcagtggagatctatcttctcaatggccagcttccaaatggaggtcattgcaggtttagtgaattggaatcattttctagagatgatatatatcatatcattcttgttgcatactttctgtaaaatctcttcttcatatgtttagatccaatgggacgagccatcttctatacagagaccaaacaaggtctcaccgtgggagatcgagcctttctcaccatccgcgcttacaccaacccctactcaacaacaatcaaagtccaaacggtccagaccaatctcaggtatcttcaaaaacaatcaactcttttagtaattactgaaaccggttctaagagttaactaagtttgatgtattgcaagcaagatctctgatacttgattcaagattatctctctaatgaatcattctctagagatgatatatcatatcattcttctgtcctgccttgcagaaatcacagggagtcctgtagcttctagtttcttgagtagtttctcgcagagccacgagtctaatccatcggtcaaactgttgtttcaagatccagcaaccgagagaaactcaaacaaatcagtgttttcaagtggattacaatgcaagataaccgaggctccggtcacaagtagttgtaggttattcggattcgatctcacgagcaagcctgcttctgctacaattcctcatgacaagcagctaataagtgtggattcaaatatatctgattctaccaccaagtgtcaagatcctaactcttcaaactcaccaaaagagcagaaacaacaaacatccacaagaagccgaatcaaggtaaaacaaaccattactctttttactagagaaactcaataacttacaaatttttgttatttctcaaattcaccactttgtttctgtttgttccttttaaggtgcaaatgcaaggaacagcggttggacgcgcggttgatttaacattgttgagatcatacgatgaactaataaaagagctagagaaaatgtttgagattgaaggagaacttagtcctaaagacaaatgggctatcgtgtttacagacgatgaaggagataggatgcttgtaggagatgatccatggaagtaagtttctctcaatctctttcttcagcttaaagctctctctcgagttcttaacaattgtgttttgttgacaaactctcttgaatgttgcagtgagttctgtaaaatggcaaagaagttattcatatatccgagtgatgaggtcaagaaaatgaggtcgaagtcgttgttgggtgataaaggtacgatcgtaaatcttgaatcagatcagaggacagttcacgtttaactatcaagttgttgatttcttactttcttggagactctctcaagtctcaccaagtccgagagttaggtggtttttttttttttggttttttttttggcgttaggtgggtttgttatttacttgtttaacataaagactataaaatatacagttattatatacgagtatatcgtattaggtttcaaacgacgtcgtttatgtaaagtgtttgcttttccgacgtggctttcgtcgtcatgactaatgaatgatgtgttagcaataacttaaaaaaggtcatatttttctaatgttaagattttgtgtgggcctaataagatcgacgattaacatggtagtagtaggcccaaatactgaggccataacatttttactgtataaaatttcttctaaccttcttatttatagtcagttgactaattaacccaataaaagacctataaaagaaaaagtgtcaatgcaatacacatgtttaataaagttgatcaaataatattagtatgataatatacttgttaaatgaataattaatatgtaagaagacaaatggagttaacctgctccctttttattttgttttgtcacaactcacaaaagaacctgctcccttaatcttgtgtttcgcgtaacaaaagacccacctccctttttttgattattattatggacgtcttattgaacattttgacttttttattattgcaaaaaccctcacctaagaccactttcatcatattttaataatttttcctaaactaaattaatcatcattataatcttaagacttgcgagaacacactaagcttgagaagaaatcataagctcggtgtcggtgggaatgttttactgatcaaactacattttggttttgggtccactttgagctttctttaaaatcgttaatcataataaagtcatttgtcggcagataattttcacgtcagcttcataattccttaattttaattcgtataatttgatgagatcacaagaatttcttcaatgtagtagagtatatcagttgcatgaatacaaaatgatttaatgttaatcacatacataccattgattagaaaaaaaaatggttaagaagaccaaatagaaaaagagatggttcaaataacagtctctcacgcgcctcttttctcaagtttacaaagcgcaaaatccttcagccattttaagttcacgtgcctcacgtggtttaggtgcgcgtggctatgtcacgtgttgcttctgcttgtactactattacattacctcttgagcagttgggtgatatttatttattttcacctctatagtaaatagtgaagctttaaaatgtaaaaataccatcccttatagaataacactgtttgaactttagtgacaatgtattctttgaatagtaagaacaaataataacagtttagttggtgaatgattctattatttggtgacgtggtcagtcaaatttcctctaataacaaaagagtattgacttttatgaatggttgtctatctagtcaacagtaaaaaaccaccgttggatcattaataatcacaaatgatttgagatatatttaatgcattgtcttttttttcttcactctcccactacctaaaaagaaactgcctaagactaagctgaagaagaagaaagaaagaaacagagaagacataaaaatgagaggagacaaggaagaagagaaggcgaagcttgcacttgtgttagctgcaaagtcaagatcgttgttgtacacttcatcgcctgcgagtccacgtgtgtttgcttctccgattcacactcttgcctctgttccgttttgttgggaagaccaaccaggcaagcccaagcaccctcttcgtcctctttcttaccccaagtgtcttgatttgccacctcgtttgctccttcctggtgagttcacgcaaatgcccttgcccgagaggaaacatgggctcttgaggttcttgaggaggaaagggagaggggatgttgttgtgaggggtaattatgtctttctgtcggagaatcagagagcaggagataatatcaacgagaacaacatgaagatcatgaagtttaacagatcagggagttaccatggtggtggttctgttaaaggatctcacttttgggtaaagtatttgtgtttctccgctccttcttcataacttcttcatcttcccaagtcttgtctttcgctgaaacgggtttggttggggaaatgcagggaagtttatgcaagggattgaagctagcaatgccatggaagaacaagaagatgagaagtggaagtgtttaagcctgttttcaatatgcattatctatctatctattgagggatcaagatgatgaaaaagagctattaagagtgtatgtaagattagcaattttactgtaatttaatatctgtgtgatatgcatatataatgttgttaagactcatgagccatggcaagaaaagtttcaagcttttttcatttgttgttaagaaatgaatacatctgatcaagtgatgaacaaaagtgagtgtacacacatgcctttatattaagtttcataacaaacaaatgagtctggcttattcattgtgaatagagagagtaaaagacaaaaaaggaatagggatcatctgaatgtaagaaaacaggggaagtcattgcttgttttaactctgtttcttccctgtgacaccagcaatcacctgcaaaagcaaattggatctgagttaatacttgacgcctttgtttgcctgtaaagagtatataggaaagcgttggataactaagcaatgtgataactaactagtctcttttatgcccaatccatttttggcagtaacaaaatgtgatcatgacactcgtccaatgatgaaaagcatagatttttaaggcatggatgaaccaaagatggaactctcaaatcacaagaagacgcaggaggaacaaaacatcgagatgatgtataggctacatcacatagcaaaaaaaagaaacgtccaaacattcgcctacacggatactaagaacaactatcatgcagagttcccacatcagagacatttcattagataggaaatagatgacgattttagcagcaaaaggaatttccacagagataaatatattctaatacatacatcggtaagtggaggagctttaacttgtttggaagcctcgagagagtctagaataggcctcacaaccgcaggcaaaaatagtcctacaagatgaagagaatccatcagcaaatgtatattaacacaattgccttttgctaatgttcaagaaagacataatcttttgctacttatacatggagataatggaagacatggttccaaattaagcttaatttcaactccttaaaatacactctctttgacaacccaaagaaatgacgattccgaatagagagatttggatcaggcatttctctatattctcaaattacaatcgagcaaactagctctatagattcaaagaggaattccagaaactagataaatcccaaagcaaatccttttctaagaaagagaatgcgatcgatcggtgaggaattaagattgagattagggttcataccaacaccgccgattaagcaagaagcagccacaactggttcctgcgccacgaacatcctcaatttctccatgaccggcattttcgcactttccgattttaatctcttcctcggattacgaccaaagctcctcgtcaatgtctgattcgattgatagttgctcctgagtaaaccattttctcacctgaaacgaaattaaagatcatctccggtcgggtcgggttactgggcccaaatgttcgcaattcggcccattataatcacctttgccgtaattaaaaaatatatatactgtatatctttctctttctcattctgcttccagcagtaaaaaattactaagtattttaaattttcaagaaatcgaagctctaggaacatgaaagaaagatcatatacactgtacagtagttaatatatgcagatattacatgaacatgaaagatacttacttacacattaaagaagataatttcatatgatttttgaaggaaaagatcaaactagtaaacacaatattaacaaaattcttacaacaatttacattctctccttaacgaaatccaaaagctgattcgaagccaatcttttaactcatttcaacatcatcaagctgttcaatgagaaaaaagatgaagttttgtctcttttcttctctttaaactagaacgatagcatctgcatccatccaacagtccatccaagaagcaaaccagcaccaacaagactcatccccaatgctaaaccaaccgcgtactttgctccattcggtttaccccttttgcttcttctctttctcccctcttttcttgctttgccattgctccaacaagggatggaaacccctggatcgtcgttgttcttattgtcaatctccttgttcttgatttggaggtaaagtgcttctagctgaagcagttgtaaccattgcttatacccaaaaagctctgcggcttgcttcaacaatatcttcaccaagtgctctttctctgcataagcttctttagccatattctccgcttccctagcccgcgtttgcgaacgcctcagtgcttctagaagctcggatttgcttaaatcagactcagatgaagcctcgggtctgttcttgcagctgcttcctttgcttgtacccttgatggtttggccagagacagagtagtctctcaatccatcagaatcaaaaccacgtggactaccataataagatcgtttcatcttctgcggtgttggtaaatcacaattctcaacatagtctagagatctttgtgcaaccaaggaagctaactcgtctttatccgtagttcgccaccacggtgcagctttctcactcgagagaagattccacggcgagctaggatcaaaagagagctcacttaactttttctcagaggactcatcatacccagttgaaccataactctcccttgtctccatcaactctataaactcttgaaagctttcggaattaaaagactttccttgtttctctccagctcccaattcagacttcttctcagatacaccttgattgttaacctcatcctccaatggctgcttcttattcacctgaaactgatgatgaggatgactccacagtctggtgttgtggggtaacagatcagggaaattcgggtttcgaggaagaggcatgaaacctgcacaagatgattgagtccgtggttcaacagaaactcgaggagaagaaccagaaacttccacttgcttagttgaagaagcagttgaggatgaagatgattggcaataagttaacttgggagctcttttagcgtcttcttggacaaagcaacgattaactgttctttgccacactgctcttgcttcagctgctgccattatttcaccataactctaaagataagacaagagactgagaattcaattcaagatcaatgtgatttagaaattaggtagatttagcaaaatcttattaaccgttttgaatctatttataggaaaaataatatgaatcatttatttcaaaggaagaatctttctgattgccgacagatccatcaccaaaaaagcttattacaaaactactttttagagaatctgatatgttttgctttccaggtaaattgaagaattagttcctaattttcttagaagcaaacaaaaaccaaagccagattctttgtcaatttatcaacttactaaacaaatcatcattatttgcaattgaaatcaaatttcataaaacttcaactataaaattatcaaacccagaagaacacaaaaaaaaaacatgaaacgcgattagacctaagaatcaaaaccggacacaaaaacaacggatggtgatccaaatcataattcatcttaatgaaaccgcaataatttgtaagaattcggaaaaaaagaactaaccagaaggagagagtaacaccagacgaaacccaaaaaacggaaaaatctatgattgtttagtcagtctcgtgaagaagataagagttgttctgatttttttttgttttctgattgtcagagaatttttgtttgctttcgattaaaatcttttgaatcattttgcagtttattatcgttttcttagtctctgtgtcattcagcacgcaagcttccgcaaaacggcaccgttttctgagaggacccatagttatgttaatgagtatttgagtccacagatttgcccatagatttcacctgacagccgttcgattagatattaattacacgtggcgacaaaaaagaagatctaaaaaaggcttccctttccttttttaacggataagaccttttatcttatcagttatcactatacgattacgcgcgatggtagattacgtcataaatgtttggttaaaacataaaaatcttgtagtaattgcgtcgaatgattttgatttttaaatgatcgattaaattttaaatttcaagttagggtctactaatattttttatgacatcgttttcatttaagtaataaagtggccaatggtaaatagacatgttgaaaatataaaattaggttttttacatgtcaatttggtttaatgtagttctgaaagttaggtaaagagaatgtaaatagtggcctcgtctaggaaattgaatgttaggtgaagccaagtgtcttcaagtcattatggttaattgtctctctccattattctccaattgatagtgttacatgagatttatttattacgtggttaataattatttaagcaatctaagatattctaataagatgctttatgtgagcactaatatattcagtcataattaacaccatagtctatatatatactatatatacaactaacttctttagaataattattaatgaaatggacctttgccttaacttaatagttttaggaataattcttggcaaatggggttttaatcaaacattttgatgattcatatcatttcgtctacaagactacaacacaaattatggagcagtttaataatcaaccataagataatattccactacgtaatacgatagtggccaggttcctagccgtcaatttttcataatcttattaaactatatcgagctaataccaaaccaacaccaaaaagaaagaaaaaaaattacaataacgaactaaatcttgataatgtttattttcggttctattgcactacacttaacaccaatctaattggaatcagtccgatttaatctggtctaaatctgatgcaacaaagtcaacgaaaactatgtcaaagataaatagatgatatttccgagtatagattgaagtcaagtcaaagataaattaaaatctggattatggtcaactcaagattctactgcttcataatctttaatatatttgtatatacacaaatattaaaccatatagagaaaaaaactacatcacaaaaaatcacgtattcaataaacacacgcaaggtagcaataactcgttttctcgactgcaaaactttcccggaaaatgtatcttctttttatttagcatcgccataggaagaatctacgaggctgacgaacttcaccgtgccatcaccaccacacgttataaatccattcggacaaacttgtatgtcagtcaccccagcctacaccaaattcgtaacacatacccaaattcgattacatacaccgacattactttgattctggtttactaagaaaccaaagccactgtgagaaaatacgatgaaaggattatgctttaggtgatttggttcactaacccggatgattccaccgtagcctctcgagtttggctgcagaaaagtgtgtctttcgtgtagtttaggccaatgatgaatcaactttgcagctttcgcatcccaaagttttacttctccgtctttgcttcccgtcaagaaaagacttgtgcgtgggattgtcgctatttttgtcacactccctgaaatttgcatcaatgtcaatcaaatttcaggatatttttccggtaaaattggaatatgaaggtgaaaataggctttagggtgtgcacctaagtgagcctttggtatataccaaagcatcccattcttgttttgatctccatcagtcgaagatccaccgtcagggttcctttgcttcttcatctttccggttgcaataaaccggaaatcgtgcaaaccgacatcaccatttttgccaccagtcacaatcataggagaaattgaaccactaccaatgtcattatcaaataccgagatagagcgtgcaccaccttcatagaagaaaagggacaaaacaaaaaaaaaacttgttaagagttgtgattatgggaaatgatactaacacttctacaaaaaaaattattggaggaccttcatggcaattgatagatgcctgggaggttgaagggggagctagagtatcccacacaacgacatttgcaccacttgagctatatcctgaagctgcaacaatggatccactcgaactaatatatcctacatctctgcaaccataaataacagaaacagaatagctgaagccaatagaacaagaaacagagaaataatggtaattttcatgactgacagcaataatttaaaacttatgtgtttttagcatattagtgaacaagaacttatagactcaaggatcatgaaacgtacgatgcatggccattgaagcaaagagatgattcaacaggatgaatattgctccttcctccaacttctgattgccaagtgcatacagttccatccagtgcagcgctagcaaatctgtgtccgaatggaccgaattgcactgctgatatcgacgccaaagcataaggaggggaaacatttgcagcaggaagaacaccataagttgcagtagctctttcgtttccaaactgtaacatgcaaggtttgcattataagatccacaaggatagataagaaatgtcatatcatttactccgaactcctaaaacagatggtgcaagtgtttaggcacaaacctcccacaagtatatgtgagtgttgcttgagccaaccaagaagaggggcattgtcgggtgattagagaatgctctcgtaataacactttcaactgttgggggaggatcaacaaactcttcaaattcttcttgagtttcccaacctagaccagagactcctaaccaccggcggatctacgtgaattttatttaatgttatgagaaaatatacatttggcttatcaattttttttttttagctatgtgtgacctgggtaaaaaatgatcctggatccgctatcgctcctaacccagagtagccaggaactctgtcagctttcccaggcttggaaagagaaacaactccaacagtggccccacctaacccaaggtgtgctcctttcttatccccaagaccaacaccgagtgaaacacatgttggaacgggagttgactcagagttagcccaaccattatgtggccagtcagcatctgaccagatatagtctgactgattttgggaagaatcaccatcttctaggttaaagaaaattataccctgcatgtcacgaatgcacatttagggatgtgtctatgtctcctgccacattaccactaagcataataaaacactgcaacaacaaaataacaacagattgacataaacttggtcttcatatgggacatgcaatatcatctgaaaattttatctcgagatactgatgcaagaatgcaggatacagataaaaggttaatggatgttttccaggatgcagactcatctttgcatatctaaagttttggtgcgtagcatatggcaagttacaaaaacttatgaatttcacaggaaattaaagatagaacaagtggtaaaggcaaattacgacgatatactgaccttgcggttgctagctaatgcagcttgccgatggttaatggcgttgatacaaagggcctgttataaagattagaatactcgatctcaaaagataagaaagtttcaacaatatcagtgacttgttcgtcaatgtaagaaaaataggtacctctataagctccccggtcctcttatggatttctttggggttctggaacgcagagttttcattggcagttaccgcagcttttggtgaagaatttgaagcgtggtttgcaagtgaagccacctcattactacttcgaccatcttgattgcatggcacatagagctcattcttcctgattacttctctgtacatatcgctccaatcttccaatggtttagattttgaccattcaaatatgtcaaaattttctaacaagaaagcttcgtgtagtaaatgaggatcaacacaaagcttccagaacctcacagaaaccacagggtcaccgtttttttccgtctctacacctgcatctgggatatcccgattaagaaaatttgcttgagatccctgacattcgagcagccataacaaggtaggaacctgaagtctcttctctagtttctgtttcaagactaatactagttgttttacatggtacgaagagagttgagctagggtgctaatcagtgtttttcccagaacagacattatcttctccgttacgcatacaatgtcatcactggagtccaatgatgtctgggcatcaaaattttcagcggaaccactattcgaaataccatcatctagattgatcgaaatagataccagcttaagtttcacaaagtctgaaacatgcttccagaaacaagcttgtgttaccagacatctttcatcttctggaattgagtatactggatagccaactccgtgattctcaacaacactgctgaacttagaattaactcctacatctgatgcatctggtacactaacagaagcttcctggtggtatactctcttcacactttccaggtcaacctcataaggcatatgcccattaaaatatgatatcacaaggggctgaaccattcgaaagagacaatgcacgtctcccagaacccaagccattgcgagtctcaaacaatattcgactaaatcaagaacaactgcaagttttgttttcaggtcttccacagaggagcccaagcacagccttatagaagttcttaaattagagaacgattccagaattccttgaaagtaaaaccgcaaagcattggaccactttggatcaggtccagatgacaccttgttttcctcaaagcatggcactgagtgtaagcaagtgacactgcacgcagcaatgatacgtgataacaccaatgatttctcatcagtcgcttttagaatcaatttagacaacgctgaatactggaggagatcttcatctgtgtgagacttgtcgtctgagagtcctgaggaactattttcctgaaatatattgtgtcccatggatagtaaccctcggttgtatgctgacagaatcatctgtcgacaaaaacaaagaattagattacagatagcaatcaaagtatctgcgttgtcaaattagttcaactgagaaaactaatatgatgtgcaagcagtagtagtggagacctcataccatattacgtaggtaagatgcagacagcgaaaatctctggtgaaattgctccaaagctgtttgtagcttatgttgaaatcgtgagaatttctcacatgaaacaacttcagaattcattaagggtgcagttgcttcccgtaagatcatcgagaggaactggacggctaaacccaatctaaaatgagtgtccacagtagatgaaacaccgcttgatacccaattcgacgaatgaggaacagagtgatcaaaaacaccttgtgtagtatgcaactgaccgttacttggaacgctagtctgatgggtcccaccatgaccgctggcagatggtgaaagacattctaacgcctcgagctaacaattttcaaaagaagataaattcagatctgaccgcacggaaaaccaaactcaatctcagaaaaaaaaaaaaaaaaaaaaaaacatcacaatctacaggatatatagtacgctgcgagatctttaaaatgcagataaggataatcatttgatgctaaaacgacttataaaaaaaggtagtttcttccctataaaatttgttcttagctttcaacatggtgccttggtaaaaacatgcaaattatggaagaagtactctagatcctatgtcatttgaaagcacacagcatgttctagtttctgatatgatttaccgggagcccacatctgctgaaggcggtagcagccattaaggatgcccatctactaagagttgaggcagttctttcccccaatgcgttcttcacactatttttggttgccaacatgaggcagtataggccaatactaggatccacaaaagagacgtgatttgaagaaacagtagagctctcagtagcagggttctctagacacccagccatagcaagaattgaccggtggtactctcctaattcccactgtataaaccagggacaacttcatagtcataatttgtaacaccaagcaagaaaggtatttgacaagataacaatatttgcaaacaattataaccaccttaagaaggcttgctagccaaaagtctcctctctgaacagcagatgggagtatatatttctttataagattactttccagggccccaccctgcccatcaataagccggcaaattacgagcgcaagctgctcatcctgaagatttttcacacaaacatttattgcagatgaagcttcacctccaaggagaaagaaacctatagccagttccagttggtgtttacccattagtacatatgcatttttcaaggctgctgccttatttttctcttcctgtaaaaataaggagacatgttactcaatatgatatcctagatgccagaagttgtacagaaaaaaaggtgaaaaagaccctagaatcccaacaagaatatggtttgtgtacacaacctgaaaattgcgtgaaagaaaaaccaccaagggtttatctttctcatccttgcttaatttgaaaagaccagccaaaacttgaactctatttaaagctatatagagaagcgcacaatctttaggattcttgttcttcaggtattgctgtcgggccagtttctccatctacagaaacgaaatagcatcaaaataagtgaggcacatctattttcttaaccctctgtttgttggtatcaaaagagaatatcattaaagaaagaaaagcatgataaatatgagtattagactattagtacatgggtccttgcatagctagtgtggaccaagcactaaatttgaaaacttacccgtgatcgcaattgtgctgcatttgaataccaaaatccaaaaccctgtgatcgcatttgttgccatgatgattcattgggcaaaagagaaccagacaaattttcttgagactctgagtgaaaagcccatcctatcatactagagtcaatatcaagctcttccagagatgctgttttaccagaacttcgagctaagaatagctgtttaaacctaagtgtgacccaaaatctacacagcagaaagaacacaaaattccatgaataccaagcagcataaagtatcattcaagaagcaaagcgaaaaactgcccccagtactacaatactctcagatcaatatttggtaactaatgtgaacataagaagccgcaaaccagctagatttttttttttctttctttttttgaacaagggagcaatgtggccttgctaattaaacataaatgtgatctttcagtctttacaggttaaaggaaaatacgaacatgctcaatggaacatatttcatggaaaacaccatatttcattggtatttcgtaaactagaattaaaaaagtttgaagaactatcgtaccttctcccaggttcatcaagacttgcatagacagacgtagaatgtgggttactaatttcacaaagaaggtcaacaattgcaaaatattgcaatatttctatcctggaaatatttccttcatctgataacttcttgagctgctcgcagaagccactaaattccaagtctgttgcaggtgaattgggactatacgattccatattaaattttgactgcaaccctgactgaaactgcgaatactgtagcattgaaccagacgtcccaccccattggaaatccttaggatttgggccattggagagagatccttcataatattttgacaaaaggatatctggacaaagaactgactttacagcatatcccttctcggaggtatcacttgaagtaatatattcagcaagatgtctaagagctgcacttgctcgtttccaattgcctgaacacatcagagttaacaatctttagctaaggtaaaattaaccgcatgacacagattatgctcctgcacgaaggaaaaataagacaggaaagctaaataaaagctaaacagcttagtttcagaattgactgaagaagggaaaaccagaaaacactagcagcattttacctgaacgtatagctacaaggagggcatgaggatgataaagtggtaaagcacctcctaacttctccaccatatgtcccatgctcataatgtcatcaatagtatttgagccatatgcggtcccaatcagtgacatactattgacttgcccgtcatcaattgcattactagttgaaggtagaggaatacaacctctgctagtagatgtggtatcagcttcgttgatatcattagtaccagaatcagataagaattcagagtctctgccttcttctgtagcatttactaagttgggaagattggatgcaaatatttctggatagttatcaatcttttgcttcttatcaacaacagccagccattgaccatgtagactaatataatcattgtgaacaagacaagtcatggctttgggtccccaccataaatcatgtatagccgaaaatgtacgagtaacagcgaagcattgccaaatctgtgcctctgaagaataatcataggccgcgaaactggtacttttgcaaggctgccgagcaataccatacacccgcatctcaatctgtgtgcaaactccaagtaatagctgatcattacccgtagttgaccatcttacagcaacaacttctgcatcaacatgtaccttatcctctagtatgaaaacccctgaatctataaggtgtacaatctcccatatactaactgcgcgggcagcttttgaatgactctctgtacagagggctgctatcttgtgtcccgaatcagtcagagatatagcactgacaggattttggccaaccgtaagcatgccaactagctcccacagaccggaaggtgttgaactttcctgaaaactacttctccaaagttttaaagagccatcagcttgaccagttgcaatagtataagcttgactttcactgttcacaccattctctagatccctcccacttggattgaccacagcaaaactcgtaacttcatcctcacggtgagattcaggtatttctgaagagcatgatctaatagcaaggcaattcgtcttgccagcaaaagtatcttcgaacaaccactttcccaatccaatactatcaaaatcatgaaaatgacaatcgcaggtacttcctgctgtatcaaaatgatgtaaggttacactccatgacagagcatcaaaccgtttctctttcatccatacactcaggagcaaaaatctgttacttttaaatgtctttccacaagaattagacagaggttttgcaaatatgctggtcggaccactctgcaaagggctattaaccgtaaacggtatggtacatatataatgggttagataaccgtcatcacctttcccacaattccttacactaaagcaatcgacgcctcctacatgtcccacaagtagaaatctctcatctttcaatgaagaaggtgcccaacataaacttgtgtactttaatctgaactcttgattttgtagccgtccacaaggcttccaagaggcaacagatataggatgctcaatagtccggttcaaataaacactagaggagcagattattatcagaccattagaatccagggaagcagtgtatcccgcctcacatacaaaaggatcagaggcaacctgtaggattttcccaccatgaccatcaagatataatacttttccatcaatgcacttcaataaactggatttatttggggatgaatcttccgagtcatgtgactttattgtgtgcaaggaagaccaatatacagtattctgcggagataaataaatcgacgagcagataagtggtgtgccataaaggttatttctcaatacagaaactttcttaaggggtaatcgatcagaagaacctgtagcactcgctagagagagtgatcctgcaccaatttcatttgattcttgtttcgcccacaatgttactcgtggaaacctcataggagagatgtcatcaagacaatggacagcccacaaagtagcaaaatttccagggccataccctaccaaccactcacattttccaacattctcattatcgtacttttccatagaaaaaacttgattagtaccttcgatggttttgaatataccccctgtacgagttccccaaaaaagaaataaatctctacccaaacagccatccaagacctgatttatctctatcacagctgccacgcaaaacgattttttatgatcaggcacatctttcatgcctttttttgtctttccaccatctacctcacaccataaccttactgccccatccaagcaacatgtcattagcacattcctcattgatttacctatacctattgcagactgttctgcagccatcggtctccactgaatcatggatattctctgaggatgaggcaattcaaagttatgatatgattcaccatcactataataggccaagacactttttcctgcgtcgtcacactcagctggaaacttcctccaagaagttgctgtggcaaaaggaccctcgaatgaccaggtggaggaaaccagatcctgaaggtgatccccagagaacttccaagctatttcccaagattggttccttctcttccacagaacaatatcagttccaccaactattatcccatccccggatcctgtccactcaatcgcttcaactattgtttcctgcaccagtatggcattctgactccaacaaaaagaacctgaatatgagtaaagacatacaaatttaagataaagacacattaatatatcactatactaattgaacccagaagatggataaccattctctcgtaacccaatggtatcacaatccaaaccatttgctcaaaaactgaactccaaagaccgaagaataacaaggaagatgtatcgaggcttacctttcaaatcacgcgcgaagaggaagatatagttcccagagccaacagcgagctcgcctacagacggcgttacaggagaccagcaaactgcagtaactggttcgccggaaacctctagaatctgacggaaaaatggtccgttcgtggaatcttcgccgcggagaggagaaggtagatgagagatgacgacgagagtggatgctccgtaagcaagccatgagtaattagcgaagtcgggaagccaatcaatagaagattgggatcgagtcggagctggaggaacgatctccgatctgagttgccggagaggcaaatgatcgatccgatctgtgaccagtgagatcgcgacgtgactcgtctccggcataatcactggttttaacggaaaactcaaatcttagaccacaactatttttttccgattgtgctacacaacttaccagtacgaggatcaccggaccctcgttccaagccagaaggtttgagctggatcctatatctcatttaggcccatatctcattgggcctccttattgtatgtgtatttttatgatgtaaaaattataattccctaatttaatgtgtattgtgaagatagaaattgtgaattttgattattgtagccaaaacgtaaataaattgtcacgagatccgcaaataagaagtgttgctgctaagaagaagtgttgagacccgcaaataataaggaacacacttgtgttggctttgctaactatgatgactgttgtgttgtttaatggaaaaaaaacacgtaaatatcagaaatttacgtaattaaaaatcaaataagaaatttacgtaaatatcagtatcagtggtcttacaatataaggaaaaaaaaattcagaaattaaacaaaatttagaagaaaaaaaaaaaataaataaataagagttctctttggcaaatgaaggcgtgcacgaacttttgatgatgacacgaccaataaagaattaagaccatccaaacttccgaccaagaagcttgatcccttcttactctttcttcttctttctctttcaacactctaaaaaaccccaacacgaccctactaaacactctctaatcatgctaaatcatgcacctcactaatcccggctgatcctaaagttgatgattaacgacctgtcaaaagaaatagtcattaggtcaccgggttggtccagatcagtcagcggtttggtagagaatcctgcatcataatgtataaagcttttactgattcaaaatcaaagagcagacactaactaagagtatctttctccttttatagtaactcgtgtgttgccttcaatctcacgctggggtcaagaaacaagtcacgctttcccaacaccttataatcactaatgtctctgttcccaactctccaaatcatgaaacttttcctcaactctatttattttatttcctatttttcgccttcagacgctataaaaaccagttgcattaagcagtatctttcaacctcaaatctccttgtctctttccattcaagatgaccagttcagctgtcccgtccttgttccggcttagctttctcttgttcactcttcaagtaatgaatattggcaggattggcgctgcaactagattctaccaattcaaggtatcagcaacgcaaaatgttaacttcctattcaaattagaatcaatattgaacacagttttcatctcatgcatgcctatttctttttcttttctctgtattcagatttctaaacagtggtctgttgttgtgtcactgatttttctaacaggtacaaacaataagactcaccaggctatgccaaacaaacgagattgtaacagtcaacaagaaattccctggcccggcgatatctgctcaagaagatgacagaattgtcattaaagtcatcaacatgactccctataataccacaattcattggtatgccgatgtacatatacacatatacataaaatataaatgctttttaaacgaattctagactaacaaaacttgtttctattatgcgcaggcatggtattaagcaaaaacgatcatgttggtatgatggtccatcttatatcacacaatgtccaattcagagtggacaaagtttcacatacaacttcaaagtggcacaacaaaagggcacatttttatggcatgcacacttttcttggcttagagctacagtatatggtccgcttattgtatatcctaaagcatctgttccttacccattcaagaaacccttcaacgagcatacaattctcctaggtaatctttattcttaataaagttagtctcattcactatttggtatcactgaacttgtttgtctcctaataaatctaggagagtattggcttaagaacgtggtagagcttgaacaacatgtactggaaagtggaggacctcctcctccagcagatgcattcacaattaatggtcaaccaggacctaactacaattgctcctctaaaggtaataaatatcagatgaaaaatgatatgattaatttacaacgagaaaacagattcctgattcttgtgtattatgtctttgtttttcagatgtttatgagattcagatagtaccaaggaagatatacctgctaagactgataaatgctggtattaacatggagaccttcttcaccatagctaatcacaggttgaccatagtggaagtagatggcgaatacaccaagccttatacaacagagcgtgtgatgcttgtacctggacagacaatgaacattcttgtcacagctgatcaaaccgttgggagatactccatggccatgggtccgtacgagtctgcaaagaacgtcaagtttcaaaacacatcagcaatagctaatttccaatacattggtgcattgcctaacaatgtaacagtaccagctaagttacctattttcaatgataatattgctgttaagactgtcatggatgggctcagaagtctaaatgcagttgatgttccaagaaacattgacgctcatctctttatcacaatcgggctaaatgtaaacaaatgcaactctgaaaatccaaacaacaagtgccaagggcccagaaaaggaagactagcagcttcaatgaacaacataagcttcatcgaacctaaagtctcgattttggaagcatattacaagcaactggaaggttacttcactttagatttcccaaccacgccggaaaaagcctatgactttgtcaatggggcacccaatgacatagccaatgacacgcaggctgcaaatgggaccagagcaatagttttcgagtatgggagcaggatacaaatcatcttccagaatactggcacactcacaacagaaaatcatccaattcatcttcatggacacagcttttatgtcattggctatggcacaggaaactatgatcaacaaacagcaaaatttaacctggaggatcctccttacttgaacactattggagtcccagtaggaggttgggcggcaattcggtttgttgccaacaatccaggtattcttcttcacaaaactcctaaacatcacaacacatatgacatttgctgataaaatcttcctttcataatgaatagggctctggttattgcattgtcattttgacatccatcaaacatggggaatgagcacaatgtttatagtgaaaaatggcaagaaggtgcaagagagtttgcctcatcctcctgcagatctaccaaagtgctagcttcattgaaattaacaaatggtgacagagaagtagttttccagaggaagattttttatggtaacaagcagggaaagaaaactacatacatccatttgccttgcccttattcattattgtagaacatatgaaatgtcattcaaagggatagagactatggtatagaagaaaaagagtaagattcttttattcagatattttaattatatggcggaatgcgatgttcgaaagtgaagagtaaaagtaaaaggattatgaattgctacaaagtgtgatgtatgtaccacataagggaaatccacaaataataaattcttctctcagacattaaaagtttaattatgggttaaccttttctgaagtccagcacttctctccagttccagtagccatggaagaaaagaaaagcctctgattagttttcagattcaagtaatcaacctgtcattaaagggaaatcatttcatgaaaacctgcttctacatagaggacaacaggtcaagaaagaaaggattttttaaaaaacatgaaaaacagaaccttttctggctctagaagcagcaggcagtattcaggaactggaccacttgaaggatctaatttaacttgttggcttgattgctcgctgttgcaaggactaccgggagtaggacagacgtagataagccttgaccttaaagaattagcaaaccaagctttctctctttgctatatataaatcaaagcaattaaaataaacaaagtgtttcttcctttccaaaatactaatattaaattgtaataatgtacataaaacctgaagcttggtctggtcaggattggacgcatcaatgacctcaattcttccattgatccggaattgctcccaagtatccgagaaataccaacacatcttggggaaaaaacaaccaccaccacagtagaatcaatcaacgcatgattcttcgatccataatgtataatccaaataatttcttacctcagaaaaaggacaatgcttaagctcttcaatctgcaacagggatttttacaggatcaatcaaagagagctcaaatctgcaagtagctacaacataatctgaaaagataactaagaccttacgactgcgaagatcggtgttgatttgaatcctgtcactgttctcttcaaatcccctatcaaccgacaccaaacaaatcaaaatttgacaactggaacagagaaattaggcatttgtgtcacctgaatacgacggtacgattcgaaggccgtccatttaaaccaatcgttgcctgaaaacatacacacgcaaaaacatcaacaacatctcccgatgaagaaaaattcagcaaaaatcaaaaagaagagacatacgagctgaacataagaagagtggcttagatgagaattggcttcaatggcgccaaagagaagctgcttccatggtgctacatgtgttcccatcctcttcgtcacttacttctgatagacccggattgggtttgttcaaacaatgatagtttaattcattgatctttcgatcgattgtttacagagaaaccaaagacaaagagaatgaatacaagcaagctattaaagaaataggccttaaacgagatactaattatgaggcccattaggccttatacttagttgaagaaatttgaggaagaagataaatgtttttttttttgatgatctttcgataaatgctttcaaagaacaagagataaatacaaagaggatgcactattttgggcttaaaagataaactaacgacgaggcccacccgggcccgataatctcattagtatagactatactgtatagtattagttagatcattattccgccacacttttaaacaatgtcgttttctgtttttgatagtattaggcctctaacgtgatgactaaatatcttattgggccaactttaatattgagcccaaaatatctatgaagctttgatatctaaatgggaaaaaatgtgcgaaccgactaaaccaaacaactagaaggacatgtggcaattgacaagtctttaaagcaaaacggcagccaaggtaaagctgaaacagtaaaacgacacgataagatggggaaagagattttttattgggtgggagaaggtgttgggtaagagaagacagatgtcaacatccagaaagaaaaataaaataaaatcacaatcacgccacgaatagtgggacccagctccacctcctttttgtcgcttcctgtcggtcttctcttttctaaattcttctcctccctccttctctttttcaaaattctcctcctcgaaaattccttatagatgcaatctattactttagtactgtattttattatttataaactttttcacttggatttctttttattttattattcgttgtataattgtagccaaatgaatctatgaattgatataaaggagtcaattcattcattacaaaaaagtagtatatcaggttttttaaatgacgattaattttgcttttataactcatgttgaatcatgtacctagaaggttcacacggttttactatatgcttctcgtgaattttccgtctaatacatacatatttcacattatgttttgaataagatgcttttgtgtcaatgttaattagatgttgatctttatcgctttattcaaatcgtacttaactttagatatctatgatgtaatgatcctttgattacatctaaaaagttatatattgctaaaataaatgtaactagatattggtattgtttggtaacattatgtaatgtcgtaatcaaacaaacatatgaataatagaatgataaaattatattttagaaatatttaattgcaaaattgtaaaacagtcttaaaaacactaccattacaacatgttagtttgatagctaaacatagatttttgttttacaaaacaattaatagctgaacagtcttaattttttcacttacacagtcttcaaatctatttaataactaaacatagatttttgttttagaaaaagattaaaattgtgtaagtgaaacaaaaaccttacagaacagtataattaatcattcttttggtttttggattttcaacgattaacgaatctcatcggttttataaaatggagatcgtatcagtgtaatatatatatatatatattgaatatagagatatagtaaaagttctgtcgagctaaatttaggtgtcaaagccactaatcacatgtacgcaagacatgtggtgtatatacaaataggtatggtattgggattttaaaaatgtagctaggcgatttgatggaccatatggccaacaaatagtatccaatcacaaaatgggaggccgagaaatagcatacaactcatagttccactcacactatgcattatgatacacacataagagttttatatccattatattttagcaagacgacataattccttacacacgattttttctcttagaaaagtatattttttaagagggaccagaaagagctagcaagagagagcggtcacgagacatcatcactagtcaaaatcaacaaacccaactttctcttttttccctacctttattctttttataaccgaaatttcttaaaagtttagtccatagttttctcccgaattagacggatgacaattatgaaattacaaaacataatataatctctaaatcaaatatcttttcatgttgataatctaaatggcaaaacaaataaccactcatttcgccttcttatcatttttatataaaaaaaactatatattcagatattttttatttagttcaacaaatcataattgaactatatatagttttcttagaaccgatttttttgtttactcgaaccaattcatgtattatgtataagctatattctcttagataataagttaaaaattgggttcttctcttctccgtcttcttcgctggctctcatcatccataaagtgaaaggcaacgcatagaagagccatcactcacaaacaaagaaaaggcaaaaaaaaaaaaaaagtcctccaaaaacattcttctctttggcctttactcaaaacccacacacatctctctttctctctctctggctttctctttgtcggaagtcatggacgctacgaagtggacacaggtgcttaaaagatcttcctttgcctcttctcttttgtttcttcttcttcctattaactacttcttccttttttctctcttatctttctcttactctcttccctatccgtgaaagatttcatacttgtttatatgcatatatccgtgtgcatatgtgtttgtggttatagagattggagatatacgtatttcagtttgtttgcacattttctatgaataattaatttgcatgggaaaattattattgttgtatattatagctcaaaaacactttttctcagccttttcatgttattaatcattaattatatttgagaaactaatggagatattagaagaaagtcatgatttgtatttaccctttgttcttggtgttcatctattttcgttttccacgagatcctatatacatagttctatagaatatctaataaggaaaatctaatgttcatgtttcatttttctgtttaattagtgcttaaaattgcaaagcatcgtgcgaactaaccatatgttttaattagcttattatataacttatgtatcaattatggtctatacataattaatatacatgtacattgggtttcaattaagctctaattaactctttaaaattcaaatttttagggttttcaagaaatgatgaacgttaaaccaatggagcagatcatgattcctaataacaacacacatcaaccaaacaccacatccaatgcaaggccaaacaccattctcacatctaacggcgtctcaactgctggagcaaccgtctccggcgtaagcaacaacaataacaatacggcggttgtggcggagaggaaagcaagaccacaagagaaactaaattgtccaagatgcaactcaaccaacacaaagttttgttactacaacaactatagtctcacacaaccaagatacttctgcaaaggttgtcgaaggtattggaccgaaggtggatctcttaggaatgttcctgtgggaggaagctcaagaaagaacaagagatcatcttcatcttcttcatcaaacatccttcagacaataccatcttcacttccagatctaaacccgccaatactcttctcaaaccaaatccataataaatcgaaagggtcatcacaagatctcaacttgttgtctttcccagtcatgcaagatcaacatcatcatcatgtccatatgtctcagtttcttcagatgcctaagatggagggaaatggtaacataactcatcagcagcagccttcatcatcttcttctgtctatggttcctcgtcgtctcctgtttcagctcttgaacttttaagaaccggagttaatgtttcttcaagatcagggattaactcatcgttcatgccttccggttcaatgatggattcaaacactgtgctttacacttcttcagggtttccaacaatggtggattacaagccaagtaatctctccttctctaccgatcatcaagggcttggacacaatagcaacaataggtctgaagctcttcatagtgatcatcaccaacaaggtagagttttgtttccatttggggatcaaatgaaggagctttcatcaagcataacacaagaagttgatcatgatgataatcaacaacagaagagtcatggaaataataataataataataactcaagccctaataatggatattggagtgggatgttcagtactacaggaggaggatcttcatggtgaagcaaaatgatcaaaaggagattatgaaattagctttctaattctctttttatgatctcttgcctcacatgggttactttagttaaagttgtcagaacttagctaacacaacatagtctttttattcttcctttccttttttttttttttttttttttgttaaaatcaatatttattttctaaatgttttgtagtttggtttgatgataatttgggttggtttttcattttggtttgttgattaattagtatataaatcacggcgttatgtatgggtagaagaatatgtgaatacgaatctctcgagtgttgcatatatggtatatggtatgcactatgtaactatgtattcatcgcttcttctatctgtataagtgttttcataaaaggattattcatatgatcatatctattatcgatatagaagttagtgtgatatactctctagatcgatcacttggaaaaatcaataagcccgggccatcaataaggcagctaaagtaactacgtaaccattggccattgctaagatggttatgtaggcttctaacatgtcctcggtcgttggttcaaaaagccacaatgatcattttacctttctcttagcaattttatatccagttaacaactacttagttcatattttttcataatagtcacatctcaaattcagacgagaaattaccgttacatcaaatcagttaaggcttggacggagaaagagatattttattatatgtcgacatgtcgttattattgtaagagaatccaattccattgaagtaaataattgaaagacacgacggaagaaatcaagaaacgaaacttctccgaaacttaccattgtcttgtctttcttttgataacaatatatgggagtgggaatgcgtcgtattcacggcccattcgaactttccacgaaaccacctaataatcagctgcttccctccctactcacgaaatcgcattttatcttggaatgaatatcagccgttcattatttcaactttcagaatccaacggctgcgattcaagagagagttttaggccacacgaacgtgacaaacacatcggtacagatacgccactcacttatatatccctttggaactaatcaaaagagttcaccaaaatctcttctctctcttccattgtcttcctctaatggaaccaaccgagaaatctatgttactagaaactactagtaccacgaagatggagaccaaatacgaagatatgttaccagttatggcggagaagatggatgttgaagagtttgtatcagagttatgcaaaggtttcagtttgcttgcggatccagagagacatctcatcacagctgagtctctaagacgaaactcagggatacttggaattgaaggtatgagcaaggaagatgctcaaggaatggttagagaaggagacctcgatggagatggtgctcttaaccaaaccgaattctgcgttctcatggttcggttaagccctgagatgatggaagacgccgaaacttggttggagaaagcactcacccaagaactatgtaatcacaatctctcttctatgccttgaatgatcgtcctcctttcttgtgtattctctttttacttctacaaaacctataaatgtttctgaatataaaatgaagtaatgatttcttgatcctgaaaaactgaatggattgccttgaaactattccaattccaaaagagatcattgccattataagctactaatactttctacaccacatagagtgcaaagcacatacggttcaagtcataagcggtaaagactcagtactaagaacttgtttttgtaccatgcccatacattctaaaaatccatcgcccaacaacatcttcaacctcttgctctttgaatcggggaccggctgttaaaaaatagaaaagaaaaatcagacaattagagtagcacataacactatatataaggatattgaccattcagaagccaagtactgttaccttctgtcatagcccggactcctagctcttgctctaccatagtctgaactgcgacgcccataatctggactcttacgtctttcataaggagcaggacccttgtacctgtcatattcaggactgcgacgacgggtataatcaggactaggacgcctccgatacactgggctaggagatctccttcttcgactgccagcatatctatcttctctttcaccagcctccctcaaggcatactcaacagaaacaaccttatccagtaatttgctgccaagagaggataatcaatgtaagggattaccactcgatcaatcactacatgtcagataaataggtactaactaagcaggtttgttgttacctgttgtgtgtagaatcaagagccttggttgcatcttcctgggttgcgaattgaacaaaagcaaaattgcgcctcatgcgaacattgagaactttaccatatggctcaaagtgtctctccatatcacgctctcttgtgcgaatagggtcaaagttgatgacaaagagtgtctttgtaggcctctgattcgagactgcctttccatcacgaggcttcccacgttcaccctgaaagtcctgaaagccaaaagaaacttagagctctctgaaaatatcagagcataagattaatttttaaaaagaagaaaaagataccttggcccattcaactgataacttgcgtcgcccatatccaaaagtggtattgtcagtcctacggattgcatcttcagcatcgcgctcatcctcaaaatacacaaaagcataacctgcaagaaaacaaaaactcaagataagaagagcgagcatatacattgacaaactgtttcagcccacagaaattgcaatgcaggagttagtcgattagaagacaccttttcacctagagaaagacaaaaactaaataaatatacaacacctgcatcaatgtgaaggctggtgtacataagaagtagaggcgttcgatgtagagtagtaaataaagatgtagatgtgcagttgtagaatgtagcctatgaaaaggtaataaaatccaaatttctgttcaattctgaatggttgctaagccttgcttcaccattctgacatgaaaggcgtgaagaaacaaggcaatagattgtaggctcagcgaagattgtgggcacaacatcataacggtaggcatgagaaaatgtaggaatctatttgcaggaagaaattggcaatcccatgaaaagaggaaacacagtcatgctcctttagagaaagctcctgcgaccaaacaaacacttacatacgagaatccctctcttaaacacaaccccagtcatggttccttttgaattctctccacactcttaacactaattcatgcttcagtagaaaaagtatcaatcaataatgcctgagaagctctcaaattccagaatcaaacagagactacaacacagcagattgatcgccataaggagtacaagtgcaagaaaacgttttaccagacttcatatcaactcgcttcactctcccgaacttgctgaacaatctttcaagatccgaatggcgagtatcatagtcgaaattcccaacgtacacatgtctcattcttgcaaaagcaatcgaattcctaacaccaattgtgatcaacataaacaaagacaacaaagatcagaacatttatactcgaagagctcgcaaagtatctttgatgattcgataaatcttcatcttctgagggagatattcaatttaccttgaagaatctgaagagacgacgacgagaaagataaacctagaagacgacgacgacgctcggcgaagaagacggagcttcgtattaatgacacaaaatcttataatgatgaaccgaaaagcgtgttattgacgctgttaccatgaagggcatatttgtcattccgttaaaattattaatccgcttaacgctatgggcttttgttttacaaccggcccaaaatgttcaattacaaagtgctcaaaactcagaatctcatactttggggactcaaaagcaaaatcttataaacttctgtacatcaactaaaacccaaaaacaataaaaacagagtaacaactttctctagtctacgctttttgtccagactctctctcaaccaataaaaccaacccacgtggctgctgacttttaaaaactttttaatcactagccgtccctcatctctcgagccacatcgaacgatccagattttctactacttttaattctcaacaacccatacaacttcctaaactccttcaccgccggcgaacttcctccgccaccgccgcaaagcgaaccactcatatcatcagaaacatcctccgacgtcgactttctcgaaccattttctaaaagcaaacgtcgtccagttcctctccgatcaccatcagtctgcaaagcattgatgacatgcttcaatgcacgagtcggcgagttacgattcgcgatcatcaactctccgatctcggcgggactcaaagacgcaccgttttgaaatattccttcaacttgagagaaaagcttgtgctctttaacacctaagtagttattagcgagcgttttaaacgccgtgaaatcacataagggaaaatgaatgtgtacgtcgacccgacccggtcgaagcatagccgggtcaatttgttctttcccagtcatcgtaaacaccatgatccgttcatcggcggtgcaagagctgagaatactatcagtgaaattcaaaatcccagataaattcacagccgttgatttcgtcgagaggtgtcgatctagatcttcgatcacgatcactgatttgcctctggtttgtaacagaagcatcttaagatctgaatcatcaactactttggagagatctatatcgtaaacatcgtaatctaagaaattcgccattgctgcgacgaagcttgattttccggtaccggaaggtccgtataagagataactccgtttccaaacacggcccagacgattataatactgtttacctttgaggaaagattcgagatcagatttgactttgttcttcagatccgtttccatggcgatgttgtcgaaggtacaaggatgatcaaacggaatcgatctccaccgtccgttcttcttcttcttcttattcagatgatcatcgattccgacgttgatgaaaagcttaagctctgtgttcctctgttcaagctcatcagatactgtatgtatatgctggagataagaaccgagaattctccgtttgtcagctttacgaatcttcaaaacgaaattcctcgctccatcttcgtcttctccgttaatccaacaaactctagcgccgagaaactcgtcgccaacgacttggttccgatctaaccggaggatgatttcgttggactttttcccggtgaagaggttcgtgaaatcagaattctcgatcgagcttaaggaatttagatacatgtagactttttggtagagatgattctcttgaacgttgtcgttgaattctgggactttgtagaattggtaaacatgaaaccagtcgatgatcttcctacgccataacttgaccatgtaaatcaatccagttttgaataacaggatcctaactaagaacagagcaaacgttgacacaagtaacaagagaaacgaatcccaaagaatccccatggagagaaataaaataagaaaaacgtaaaacctctctctggttccaaaactctccgctatattatatagtagtaacgaagaagaagagtttactaggtttattagagaataaagaaagcaaacgcatgttcggagaattgtgagaaaaaacaaagagagagtgattattttgacggagattgagagaaagtttggaggaatattaagaacaatcggagaaagcctaaaaggacgacgagatattattatttttttcttaaattattctttaagaaaaaaggcgtgacggggacgaggtcactcagcaatcaaaggggtgatttttataaatctaggtaacggcgatttagttgtttgacaagttctttgattgctgatttggaagattttcttttaaagctaataatccacatggcaaaaaatattattattagaagaagataaaatattcattagatttatagagatttttttgatactttggctgaaaaaaattctaaaaaattatatatttactaattttagataaatagtaattaataaagcatttacattcggaacttaattaccaaggaaaaatattagagttaggataaatcttctattactattctaatttctataaaccaaaaattatacgtttatctacaaaaaaaaaaaaactgagagaatattatggtcttatctaccacaaaatatgttgcatagtctttatagttctcaattaatataagttaggtgtcgagttaattatttatctttacgcataaggaagattaacagcgtaatctattggtaacgcgatacatgttgcatttgatacggcaaccgaaatattcttcgttgcagattagttttcaactatcgtgacaagacgaacttgtaaagtcaacttaaacgaggaaacaaagcaacatgattttttatttttatttttggtacaaaaaaaaatattatttatgttcattactcgactattccacatatatattattacaatcggtatcaaggacaggacttcatagctaattcacttaagaaacaagctaaacttgtctgtcatgtttttctaatttgtcaagaacatttagggtcggcgcaagaggaattaggcacttctaatttatactcaacttaacaagcggcgaaaccctttggcattttgaagggttttatttgatgaattggtaactaactcgtaaattttaatatatacattttagttagagagatgactagacttatactgaataaagaaaaagaacgaacggccaaaagacagctttgtatagttcatggttcatgattaagcccaaaagtttagttcccaccaccaactaacacttacaataaacaaaattaagtataagtttccggaatagccgcataattattcttcctattatatagcagaagaatagaccggacaatttatgcccctatgctaattttcttaaactattttgctttcaacgtcgactaattaaattttgatttaaccattaaatgagtgcagcacttatttctttccaacaattaatagttttaatattttgcttattgttgatatgtagcgagagcatcggatatttgtatttcctaacttgcaccaaaaatcagcctactacaaagaagtttaatcgaccaaaacaccgccattcaacgagggactcagtaatttggataatatcgcaactaatcataattaattcattacagttacaagaaaagtgtcatgttcatgagtaaatacacttgtggtctttttataagattgcatgtgtttggtgtttgttatttggtacaagaaatatcaacactcatttaattatgttaaggtataagtctatatcatataactcttatttggttatctatctgttgttttctttttatttggttaaagcattcattttgcttaatgtagattttttttgaatcttaatatcatgcaaacttaaatatgttttcgtctaaagactaacgtgcagacttttcattgtttattttgtttgtaatttggaggactcttcaaacaagaatagcttcgtttatacaaggtgtgtattggcggactcaaaaagactttgaatgtttcagcatgggaattttcaaatttcctgaagccatacccatacacggtggtcctatattaataataattacactcactggaaataaatgttcttccgttatttttatcagcttttgctttacattttctgcactaatcgattgcctgtaaagttgtaccagttgaacgtcatcggtatgtgcattcatcatgattccgtgttcaattatgcatatattaagatcgagctgatcaatctagttgatcccatttaaaccaaactaaaaccgtatttaaacttttaaatactgcaaatccaggtcaaacaaaactgaaacatatgatatttcttacacattttataactcaaaaatccaaaaaccaaaaacaaaccgataattaaatataaacaaataatgtattcaaaataatcaatcccgagttggattaaaaattactaaaactacatgtttttttttgtttttgttttgaggacttatgtttactccaagttagaagaaaggaaaaatgcatttaggtagcatattttgcatgtgagctaccacattaaagaatgaactcattgtatgatcaacatattctataaagagacttcattggtataaatttattgacgtataatccgactaaacttttccatgtgtttaagaattttgactattcgaggcaaacttaacaaaactaaattctaacaacaacaaaacgtgtttcgaacgaagttttagtctttctttgacgctgacttaatagtaaagaaatataggttcaaatggataatatgagaaaataacaaatagcctgatttatattcttgaatcttgactaaagtccacaacacgaactatttgaactgatttatttcgcatccgctatgaataaaaacggagtctataattgcttatgttgaaaagtatatcgaactattgacgaaaggccattacgaacctcttaaggatgatgggcctttacacaatttacccaattcaatgggcatgttagagcaaccttaatagtaggctcttaattttatctctcgactattatgatgaattgttttattgaaaaaaattatagctaagagtttttgtaatggtttgaagctcttaaaccttcttttatctcttagaaacacttctaaactattcacatatcattttgattaattatacctaagagttatagtaagagacttgcaataaggatggtcttacaactttaaatgccttttatttattgccattagatattagaattcaaaattaaccaaatttaacgagttaaaaaaatttcaaaagattctttaaacgttagtttcactttcattggttactaaaactaccatttgcatcaatgaataaaattgttggaaagaggcaagtggatgtgaaagctaatttaaaagatactatgcatatctttatataacaacttggaatgttacactcctaatacttttgttgataatttataacaacatagaataattgattagactatttttagtaacatgttatctcatacgatctcttttaaccagttgacgaaagaaaaaacgtcactcttagtattaaaaagttatgatattagtattaatttttcaggatctttctaatactgttgacttactatatatatgtgatgtttatatgaaaaatgtaaaatatatatgatttaaatttgtggtgtgtacaaaatgtaaagttgaacaaaaatgagaggcttatatttagatgctacgcttgatatgtaggtgacttctgatgcacaataatacactatgaaccattgtatattgttaaaatgatcatataagatatttatttttggttcttaaagaaaataattaatgtgtattaatttttcaagatcttcctaattatgttgacttcgactatatatgtgatgtttatgagaaaatgcaaaattgaacaacaaagagaggcttataattagatgctacgcttgatatagatacttctaacgcccaataagccaccaataatacactttgaaccattgtatcttttttaaatgatcataagatatttaatttttttattcgtaaaggaaagaattaatggctcagagtagtgatcaatactttaattttatgaatttgaaaaagaaaagctgaagaagatgctagcacattactttttattgcttattagtattcgatgtttggtttctgaagtttcaattcccttttgatatagtttaacaatcgttgaataaaatcaagttgtccaaaaatcctaaatgaaacaatatcaaccgttgcactactctctccttagtaattagcattcttttgaaacacgtacataattagagaaaaaaaagtgaaacaaagttaaaattaatgatataaattgaaattaactcaatgagatttcggcgtatgatccatcccagctaccattaaaatcacacatagaggatacatagtcggtcaagctagttgagggactatagtaatttgtaaagattttgttcttcatgcggatttagtcgtctttttgcgtcactgtgactagatgcacactttttccagacatagcaacgaatctagaacctgaattatttatttatcaacggtgatagataagttataaggaaaagcttgaatgtggctcttaacgattgataccaatcgtaaaatgtgggttttgcaagctgtaaatctcattgcatggatctgatacctttcttcttcatttttacctttttcctttcatgtttctcgtgtttcacttttcttcaacacacacacttgtttataatctatctatatataagctttggttacatgatatctaaatcgttccattgtgttttgccacacttataaataacatataattacaattcaaataaatatacactaatgtctaacattcgtccatggttccgtctctctagcatcgctaggcctacagcgcaaggttcaagcgacccacctccacctcaacctcgaccaacctctcgcagttcgctcgtagtcagaccaccggcaaaacaaccgtcacctccacgtcagcgacaacctcgttcacctccacgtcagcaagatcctccttcacctccacgtcagcagcaacagcctcttacccctccacgtcagaaggctcctccaacttcaccccctcaagagcggtccccatatcattcacctccaagccgccacatgtcaccaccgaccccaccaaaggctgcgacaccacctccgccaccgcctcggtcgtcatacacgtccccaccatctcccaaggaagttcaagaagccttaccaccgcgaaaaccgaactcaccaccgagtccagctcattcaagtcggtctacaacatctgagtcagtgaaaactcggtctccatcagagtcagagaatcatcggaaagcaccatcaccgagagtactatcaccttactctctcccagcttctctgttacattccgaacgtgaaaccactcagaaaaacattctcactgccgagaaaacaagccaaacccacgaaacaaatcatcataaccagaatcataaccatgactataaccagaaccataactataaccaaaaccatagctataaccaaaaccaaaaccatcaaggcaacaaccccaagaagatgcatcgtcaaccatcttcgtccgattctgagaacataatgagcacacgagtcatcaccattgcaggtgaaaacaaaggtgcagtaatggagatcctacgatctcctcaaggcaacaaaaccggtggttcaggaacacattcctctagggtttcacacggcaccggagagaaaggacggagacttcaaagcagcagcagtagcagcagcgacgaaggagaaggtaagaagaaaacgacgaagaacgtccctaacaaaggcaatagtaacctcccaatgaaagcttttatgaatagtaacgttcagatgataaacaactccattgtctacaactcgacggcatctcatcatgatcccggcgttcatcttaaaatctcccggaaacctggctccgacaatggttttcatgtcagtgattacggtaataatggcggatacaccaactgatgaaagaagaaaaaaaactaaactaaaataaaaaaaaaggttttggatttaaaattgcaataaattcgatttaattaaaataaatgaaaaaaaataaagaaaatatgagtggggttaatggtttctgattcttctctaaagcttttggaaccctctcacttatatggaggctttgattcgtttacttaaaacgaacttctttttttaattacttttgtaaacgcgcgcattggttctctctgacgtaattaatgagaaatcagttattgctttaataataatcatgaaacccatattattgtgaaggcccgatgtatactacataagcccatattcatacctatgggcctatataaacaatttgtatttaccgtaatatatttacttttatcaattggggtaacgatttggataattgaatccaaaagattattgtgccacaagcgacaagtttatgtgaagaaaagagaaccaaaccttgtatattattaatcaaatgactttcaaatcaactcaaatgtctaattggttcctgtgtccgttatgagaaaagctcatgcttcaataaaccctctaataagatcacattatttatttatacaaaaatatcccaaccaatgtatatgcttttatatttttaattttttttgtaatgtagaatctattctacacaaatcgttttagtgattgtaacagtatctgaaaaagaagtggggaactaaagtgagcattttgaatgcataaaatagaaattggaggagttgaaaagccagaggggtcttttataagctgatttattctttattagttcttgagtcgatttttgtgaatatttaaaattcaccaggagcaaataaaaacatcactaccttataaaatcataatacaatactttcgaaaacttatgcaattgaataaattggccatataattaggcaaaagataacaagaaaaaatgtccaaatcccaaaaattcgagaacaagaagcaactgacaaagagaaaggagagtgaagtgtccaaatcccaacagtatgtgtgtggttttgtgtgctcttcaaaaagctttagagggtactttgcatgtgcatatgcatatgcattatgcatatagtcctcctaatctttaatattgtatctttgaggatttaataggtatctgagaccttgcaagttgcaactgaagaatttgagtaaagttggtcacagattataaatccgtaaattattacattttacaattaatccattagtaacggattggccatgtgatttggaatttacaacttaataatgttgtcaataatttaagtatagcttgtttctgtcaagagaaatggcaatggcatagctttttacaattttgaagataattttacgtcaacgttctaaaacgttgatgattatcactctgaaaatttgacgctagggtttgaatacattattgttgatagtgaagaatgatccgcgatgacattccgcgacatttatattatagtgaccacagtgaccgaattgcttccactatatttggacccttcttgagggaatccaaagctggtgaatatgacattttcaaataagatattaaaattgtacgtccatttttaaaaattgattgaaaccaaaactttcgctttaatgcagcgaatttttcctttgatgtctaatcaaatgatacaaacactgaaagcaacagaagtctaccaacaagattacaagaaatgaaccacggaaagatcaaggaggcactgaaaattagtattaaaattttcttgtcaaactttgataatttataagtaatcgggtcaaaaagcaatttcttaataattaagggtgggacaacgaatagtgtgacgaccagattagcaagtgacatgtggcacctacttattggccttgcctcccaaaagtcagaccgatccaacccactctttgtaattaacacgtgtcagaagctgaaggactctcctatatgatttatttaatgtcttaatagatttctcatttcacactatccttttttgcttgagaactttcttcactctttcaactgctaagaagaaatagagaaaactatgacggtacgtaaattttgttgttaattattttgctttaatccttttttcatatagttcgtaattataaatctataattgttttccgggatttttcgaagatctttaactgggtgcagaaaaagctgcaccaaaatgtcatcaaaggttagtttttttttttatagataatcaatatcagctttattttataaaaaaataacaaatttgctttattttccctttgtttattagaatatcgtaagcttcactaaaatagtagtttactttttgtagtagtatcatataggatcatgtggttccctgtttaataaatagttttatattaacgtataccacgttttcgctaaagcataaattttgtccaacctatatttattttcatatggtgaaagaaatagatggtgtgaggaaaaacgagaagaagaagaggaatgaaggaataagtgagattgagaagaacacgaaagctatattggatcaagttggtttagtggatgctcttgataattggttcgatggagttctcaccatcggcacatttggctttgacaccttgaacttcaaagaagaagatgaaatggatgatgatgaatgcgggagtggggatctcgactacgtcgtaattgatggcagcatcatcaagaacgtcgaccaagagtcggatcctcttatctccgttgaaaataagttttatgatcatcatgaagatgtcggggtacgtattctaatcagttctattgagtacatttttatgatcctcgggttgatttaccaatagagaagattatatagacatatgacatgcatatgcttcaattgttcgtgtgcgtttacgttgatttgattagtatattcaaatgaatccaaaattttaaaatctttaaactagtttaattgttattgtagaaataagttaactaaaatggaaggattatacgttcactaatctacaaaaatttgggttttctttcaaaatatgactttaaagacatataaatgcagaaattgcatttgagtcaatcgagatcgtcatttttttttctgtcgacaattaaggccattatacgcaaagaaataagtacataaaataagtacataaaattatatcttcttgactcttgatattgaatttcttgagatctttcgtattagaatctgtacgtacaggccgatactgatcactttggctcgatcaaaaccgctgaaacgccagctgtcacggcggcagccgaggccgagatagagccacagaagaagaggacaacacttgcggagcttttcatggaggaccacgacaaaggttatgacacgtggcattgcaagaaacccaataaccctaatcttgacggtgaggaggttaagtactataaacaaaacggttcaaaactaagcaagaggttctcgtttgttaagaagaagctggtcatgtcaaagtccaaagaggaagaaaacgacttacgtccaatcaagaaaatgcgtcaggtatttaaatttgttttagtcaattccgtaactatgaaacattgatgatgatggatatatgaacatgttacatgtgcctctatagctcaagggaaacaatgtcacgtcaagatctagataattattcgtgcatgttacaattacatcacttttgttgcttcataagtgtactcatatgtgagtaaatattcattcgatgtcaacaagtatagcatcattatatatgtgtatatattactgtagatgataaagaggatgttgaagaagaagatccatccagatgtcgatgcaactaaggctttaaagaaggacgttccatacaagccaactcggaactgtgaagctctcgagtcacattatcttcttaaaattcaaggtttgtatttcttaattattttggtttaggggttcgatatgatttatttctttcatttgctcgtatatatatgctttgtggacagattgcgtggcctagaagtctaagaacgacgacatcgtacaagagcaatctctggatctattgttctactccctataatatatgtgatttttttgttcttatttcagaatgtgttggtattgttatgactgttgagatgtattgctttcttcttacaaacattactaagttgttagtatttgttcctgttatgcatattgtattttattactatgtcatatgttttcttatttatacgtatatcaatgcatcgttctaaaatcgtggattgtcgtgaatctgtgatagtattccatcatgtctgctatagcttggtcagttttgaagaaatttcaaacctaaagtcataaactgataaaggactaaattatcctactcaaaacagaaagcccttttgtgcgttattgggcctaatcagaaaagtgattttgaaaaagggcctaatcagaaaagtgattttgaggctttttaaaagtttaaagtaaacaaaagaaaattgaggcttgacttttctttctttttttgacttgttttcttttttcctttttcttataagagaaaactaaaacgtgaaagagcttcaccaacctgaggtcgctgaccacttggaggcattctcagctaccaatccattaacttacaaactccatattcttcacgttttactatggtaggtacctttttttaaccttgttcgtaataacaattttatacgaaaagaatagtattaaacttcaacaaaaacaactatgtatattaactggtcagatatacattgctttgttcccttacatcttcaaagagctaagattaaactatttaccccaaataagactgtaatttcatcaaaatctagtaataataatattcaacagcttacaatataaacataacgcgtgtggtctccataagctacgcactgtcttttcatcggttcgtagaaactagaaactcttcccctcacgatcttgctttctttattttgcttcaaccctagtttatttgaagtctctatataaagttctctgtttcaagttactttctcagcacgagcaaccaaaagtaatcatatggcgaatctaatttcgtttcacgatgtggctaaacataagtgcaagaacgattgttggattctcatccatggaaaggtccatatttctactttctttaaatcacgtaaacaaatttatagattataaatgctctgtttttttagctttatacttgtttctaaacacatgtttatccacaggtctatgacatcagcactttcatggacgaacatcccggaggtgacaatgttctcctcgccgtcaccggtacgtacgagtacgagttggtttattccggtttagtttgaatttatcggtttgtaattttgtgagtttttatgaaaatttaaagggaaagacgcgtcgatcgatttcgaagatgtgaaccatagcaaagatgccaaggagctaatgaagaaatactgtatcggtgacgttgaccagtcaacggttccggtgacgcaacagtatattccgccgtgggagaaggaatctacggcggcggaaacaactaaagaagaatctggaaagaagctgcttatctacttaattcctctcttgatactcggcgttgctttcgctctcagattctacaacaacaagtagaccaaattatgatgaacagattgataagagtttcttactgttcttggttttcgtttgttggtaataacgggcttcttatgtgaagatttgggccatttggcccatcgctcagaattggactataatgtcttatttattttatgttaatgggccgtatcagtaggccctttgttgatatatgccaatcccaatttcttctagcatgagctttgtgttatttacttgattttgataaaacaaccaacttatgcagtagattccatttgacgaaaaaaaataaaaataaaaatgcagtagattccattaaattcgtacttaataataaaaatgggtgagggcatacttacaaagaaggaatgtgtgtcagtgtgtgtcaaaaatatgacacagacacagaattatttttagcaaaaacgttccacataatttcaacctttatactgtcggttattttttgccactttaaagacacagaattcaatgtgtcataaaaaaggacacaaagaaatgaagaatgttggtttttaatttactaattcgagaggggatttattaatcaaatttcgaaatgtaatgttagtatttctatattatattactagaagacgattaaaaatatgagaatatttttcttaagtaaagtttttttttcttttttaaaccgtgtaatgttaattgtttggtaaaacaaaccaaacattcgtgtttctatgcaacttattaaacaagtgattgttattatatataataaaaaaaaacgtttccggagtgatagtagacttgcaaagatcgttcaccagaatcttggaaactaaattttatagtttaatatcctgttgcgtttttttttttttttttaatttatcctgttgcagtcttgatctgtgatagaattcataatttattttataaaaatcaaacgtacaattttgtgggctaacaatcaaatatttctgatattttagattttaactaaattacaatgtggtgtaaatataaattgaaactaaaaatatataaattactttttcttgtatttacaacctaaaaagtaaaacacatcactctcctctcagactcacaagttcacaacacacgcacaaataaagaaaagaaaaaaaaacacatcacgtatcaaaatgttagttctaataaaacgaaaagctgcttaattaaaatctctaattctcatatgagcttcttttttttaactgcgcctacggcgcaatttagcaggaagaggattagccatctcgcaagaaagcctcagtttctcagataagtcaacgccgttaccatcggacggtccccattcaaactcatgtaacatcatcgccgtccaaaacataacggtagtaaaaccaagattcttcccggggcaaatccgacgacccgacccgaaaggtgcaagtctcaaatccgacccaagaaccgaaaactccacctcaccttcttttgccacgaacctctcaggtttaaactccaaaggatcaacccacacgtgtggatcatgcgatacggcccacatgttcaccattgctgtggtccctgccggaacaagacgaccatcaacgatcgtgtctgttatggccaaacgggcccatgatagaagtgggcctggaggatgaagcctcaatacttctttcaccacagccgttagatatggaagtgaagccaagtcagattcatctagggctcttgatttcccgactacttgatccagctcgttttgtaccgttgattgcatatctggatgaaggaccatcctagcgaggatccactcgattaagaccgcaactgtgtctgttcctctgaatatcatctcctgtaataataactcaaaaattttagtactttttactttttatagaaactgttataaaatctaaaatttactaatttgatgtcaaacaaaaaacttctaatgctttaattattccacaacacgtcacattgagtctcaaatttcatgttttaatctaaataatcctaagcaattttcaacaaatataattaagaataattaatcaaataaatggtgtgcatacccaaagaacggcgattatgtccgggtcggataatttatctgaaccatggagggagagcaaaacgtcgacgaaatcacgaggcaaatcaccggtttgattacggtgttcggatataatccgggatacaaaccggtttacctttggtacgagtgtggaacatctagaccggagtctttgaggatcaaactccgatagccaaggaaggtgatcagtccaattcaacgttccgagcaaatcataaccttcttcgaccatttcacgtaactcaacatggtttttttcaagctcatactcttgtccgaatacagagcacatcatgttgttaagcgacgccgttttaagcaactcacgaacaaaacagggttcgttactactctgtttttcaagaaactcaaccatctggcttgagatcactcgtcgttgcgtctcggctcttctgatttgttttgtactaaagagatggttcgaagcgatacggcgaagcgttcgccagtaaacaccgtgtggtgcaaaaccaattgctctgttaaacatcagtgagtaagccgattctttaaccggtcgatcagcaaaaaccgggctattcagaatctctttcgctacgtcgggattgcacgtgacgatcacgcgagtctctcctaagctgaaagccatgagcctcttggctccgaatttctcagctgcatcagcgattcgtcggtgagctagagtgcttgacatgagtgacatgcttccaaccaaagggaagccttttggaccgggaataacgtttccggttttgtatgaaccggatattaaccggccgaagaggtatttcccccaagcaggtccaccgggataggtccataagaagagagatatggcgagccagatgattgtgacggcgaggagggagaaggcaaggttggtttggcttagaacgctgcatttggacaaaagggcaaagattaaggagctttcgagtttcgtagccatggcggatcaaagcaaagtaagtgaagagaagagagagataaacaaaaggagagtgtcttttggcctgtggggcttaaagatgagcagatggctttggtatttatatagataatcagaactcatttatatacaaaattggctacatttttatttatttattaactttagtttataatttaaataaatttgtttattatatacttatttgtgtttattttattgtcgctctctatgttacgaatgtgttcattgttcgacatatataatttacattttatacactatttacaccttaccttttatctaaaatgttattcggagaactaagtacaattttatttaaaaaccagctacatatgtagtagagttacggacctcgattccatgagaatcgatcgacgttgattgtgaatctcttttggatgaatatcttataattgaaataattgatagtgcttatagatttgattcctgtttttttaaaggaaattaaaaagcaagaccgttcagccacaggataaatatgattgcagagtctttcttgttcaccgatctgtttgataaataaacatcaaactaaaggtgtttaaaaaaaaaagcaagaccactttgaatgtaatcgtctaaatgatttacatggactctagaatgtaacgaataattgtaatattaatagtgcatatgtagcctttaatgtaaagaagtttcactgataacaaatgaatttataacaggtggcttaaatcgcaaataaaagaaaatatgaatcttattaattataaatagatgcactgtgatggttacatcaataacttattgtaaacgctatttaatcatcatcgtaaccgttgaatcaaacataaatcatagagtctgcttgtataaattaaatactaaattttatctgttaattggtaatccagttgacttgacttatctaaatcacttatctgtctctttatttatatataacagttttacaattgtgtgttgtctttcacatcaaacaatttttcagcgttttttccaaacaaataatgtgaagtgcgaacgaaaaaattatatattttgggattctcacaagttcaaaaattacttattcactacaagaaaaaaaaaaaaaaatttgactacaaaattcataaagtaatcaaataaagtttttaacggtttagcgccgccatacgttaactctccaatcctgtgggatctattctcattctttaagacgtcataacgtgggcctatgttcaatatcttacggtaaaaatgtaatattaacaataggttgcacaaacaaaaacataatgcaatagatcttaaaaagataaaaaaaaaattaattcaatatgtaattcaatatgtactggactagaaactaaaagctaaatatagataattttactgaatatatagtaccatttatagttagtttttttttgttaaaggcttagatatagaccaaactatataagaatctacaacttgattgaagtgtaaccaataataaaaagaaatgaatgcgtgtgcagtgtacgatggatttgattttcattattttaatatttgactagttcttgattaatcggtcacggattcaggagttataacttataaccgcttgacactttctaattctcgatacgttttctaatcacggacgtgggagcgatgaaggatttctccaatgggttatcaacaagtgtatctttaattggtttgttatctaatataataagccaacatgctatataacaaagtgaaagttcaatcctcaaatttataatcaaccgtagtttgaaaaggttaaagattttaaactccattggtaacagataatagcgtatacggttgtacttgctacttatccacgagacagattaaatttatccattagtttactaacctccctagatgtgttaaatgacgctatatgacagctatatatacacaatttgttcaacttctagctgtttagtttgctaagaatagttactatttataaatgtatgtatattaccaccatatagttgaaaatttctatatatcacaaaattcagtcctggattcatatatacaacttactatacattattatttaaaggtgtcatcatattacacatatacatagtactatatatactcaattatatatattcttaagccacatgatgtattgtgattatttatcattcggttgccgctaaattatgatgttttaaaattagtatattcttatatctgtagaaagattccgacgaaatattttcgtaatagaagattcgtggtatttctcttctattatactcgtatattacaaaagggacttgataaaaaaaagaaacgaatttaacatatatagttatatacatgtagcttaattaggtgctagacataataattttgaaggagtaattgaattttgacctttagctgaggacttgagctatagattgaccgttcgcgccggaaaaaaacattctcctataaatgtattgcggtggatctttgttgttggctatggtgcggtcttgtgtactcaagtgacggtacctctgttttacatccagtaatcaagttccggatttgaccgatcagcatcctttgctttccattacgccacatgcatgcgacgacaaagcgcttgatcgtgtcaaatattctgagtgtggtataattgacatatgcacacttggcgtttgtagaatacttgctttagactgaccagaatacccaccgcctaaaacatagacatactcaacggagagggtaaaatggtcatttaaggctaatcagacaatccacatgatctgcttaaacacaaaatctatatggtccctaaatatcggttatcgatggcttttatcaacggtctaagatttctctcgtgtcacagtgagaagtgcctggccgttgatctaacttcaacttagcattaagaaaagaactttattttatttttatcctaaaacttaaaattacataattttaaagaaacaacaaaaacactttacaaaactatgcatgtttgtacataagtgtgcgcatgcatcttgttttgtcatgcttatttatgcatatgttttgtttttttgtggtctttaataagtgaggatcaatacaaagatgagacttgggtcaataaatagtttgatagtgattgcaacttccccccagcttagagctatttattcacaatttggtcatcccaacataaacttgatgatgcatgtaattaagaaatcttttagctcattattaaatgaaacgaaactgattgtttttgctcttattaacttgcaactctaaattaatacacaattatctatagtgaaaagggttgattttacgataagctctaattcacatcaggtaaaacttatactaatagatattgtaacgactttagaaaccctcattaccattttttttttttttttaagttgcatatgcattaaccctttcaaattagagttgagacatatgaatgctaattttagtgattccaaataatgagttaaaccataatttttaagtacaatgctaatcttggtgagtagcattttacgcgttatagaattaatatcgaaactaaacatatatgaataaatggttggaaatgtggagtaatagaagacgtacgtcctaattaaatattagagcaaattaagttgaggaaaagtattaaaatgtggagtttggtaatatttacaaaatgaggaggacaaataaacaattatggccattcatcaatcgttttgttgatattgatacgtcaatttcttgggagggtgtctctatatgaacgtagccttacaggttaatgtgtgatcgatgcccttttacacggggcatactaaaatgtcgttaatgtgcttaatttcaaaattgaccatacatgacaatattatttttcgaatttattaataccatgcatgtaacctacaaccaaactattataggctatattactttatatagccaacagtactaactatagctaagcactaacgaaaataacaattttacatggttgagtttttaagagtcatttttatttacaaaactaaaaagtcatgattagttgagaagttttagcaattaaggttttcacaacggtcagtggattggattggtataccgtgcattccattaaagtgttatgtcaaaaattatttttgacgcattctctaatcttttggtcatttgtatcatatccattgaaaccatttgatatatagttatatatattgggtggttattaactatacatttataaacgctacggtatcttagtggaccgccgtagctagatacacggcatccttgtactttatacagattaatgcaaatggactcgcaacattattccgagaatcaccttagatatatcgaataactaagagagagatatggttataatcaccttacatatatcgaataactaagagatatatatgtaactgttatatatatgcaaatacttacaaaagtactaatttttctctctctatataatgctaattctcccattttctatcatttgtatctgaataaaaccatactaaatagcttatgctgtcatatactttccaaagttgtaaccatacacaatcaaaatgatgtcaggtttgatattttcttaactccataaagaaagaaaaaagatcaaacataacataattatgtatccaactttgtgtacggtgtggaattatatagcctagattcaattatatgtccaactttgagtatgatgtggaattc

SEQ ID NO: 384 - DNA, 55870 bp, Arabidopsis thaliana
aagctttggttacatgatatctaaatcgttccattgtgttttgccacacttataaataacatataattacaattcaaataaatatacactaatgtctaacattcgtccatggttccgtctctctagcatcgctaggcctacagcgcaaggttcaagcgacccacctccacctcaacctcgaccaacctctcgcagttcgctcgtagtcagaccaccggcaaaacaaccgtcacctccacgtcagcgacaacctcgttcacctccacgtcagcaagatcctccttcacctccacgtcagcagcaacagcctcttacccctccacgtcagaaggctcctccaacttcaccccctcaagagcggtccccatatcattcacctccaagccgccacatgtcaccaccgaccccaccaaaggctgcgacaccacctccgccaccgcctcggtcgtcatacacgtccccaccatctcccaaggaagttcaagaagccttaccaccgcgaaaaccgaactcaccaccgagtccagctcattcaagtcggtctacaacatctgagtcagtgaaaactcggtctccatcagagtcagagaatcatcggaaagcaccatcaccgagagtactatcaccttactctctcccagcttctctgttacattccgaacgtgaaaccactcagaaaaacattctcactgccgagaaaacaagccaaacccacgaaacaaatcatcataaccagaatcataaccatgactataaccagaaccataactataaccaaaaccatagctataaccaaaaccaaaaccatcaaggcaacaaccccaagaagatgcatcgtcaaccatcttcgtccgattctgagaacataatgagcacacgagtcatcaccattgcaggtgaaaacaaaggtgcagtaatggagatcctacgatctcctcaaggcaacaaaaccggtggttcaggaacacattcctctagggtttcacacggcaccggagagaaaggacggagacttcaaagcagcagcagtagcagcagcgacgaaggagaaggtaagaagaaaacgacgaagaacgtccctaacaaaggcaatagtaacctcccaatgaaagcttttatgaatagtaacgttcagatgataaacaactccattgtctacaactcgacggcatctcatcatgatcccggcgttcatcttaaaatctcccggaaacctggctccgacaatggttttcatgtcagtgattacggtaataatggcggatacaccaactgatgaaagaagaaaaaaaactaaactaaaataaaaaaaaaggttttggatttaaaattgcaataaattcgatttaattaaaataaatgaaaaaaaataaagaaaatatgagtggggttaatggtttctgattcttctctaaagcttttggaaccctctcacttatatggaggctttgattcgtttacttaaaacgaacttctttttttaattacttttgtaaacgcgcgcattggttctctctgacgtaattaatgagaaatcagttattgctttaataataatcatgaaacccatattattgtgaaggcccgatgtatactacataagcccatattcatacctatgggcctatataaacaatttgtatttaccgtaatatatttacttttatcaattggggtaacgatttggataattgaatccaaaagattattgtgccacaagcgacaagtttatgtgaagaaaagagaaccaaaccttgtatattattaatcaaatgactttcaaatcaactcaaatgtctaattggttcctgtgtccgttatgagaaaagctcatgcttcaataaaccctctaataagatcacattatttatttatacaaaaatatcccaaccaatgtatatgcttttatatttttaattttttttgtaatgtagaatctattctacacaaatcgttttagtgattgtaacagtatctgaaaaagaagtggggaactaaagtgagcattttgaatgcataaaatagaaattggaggagttgaaaagccagaggggtcttttataagctgatttattctttattagttcttgagtcgatttttgtgaatatttaaaattcaccaggagcaaataaaaacatcactaccttataaaatcataatacaatactttcgaaaacttatgcaattgaataaattggccatataattaggcaaaagataacaagaaaaaatgtccaaatcccaaaaattcgagaacaagaagcaactgacaaagagaaaggagagtgaagtgtccaaatcccaacagtatgtgtgtggttttgtgtgctcttcaaaaagctttagagggtactttgcatgtgcatatgcatatgcattatgcatatagtcctcctaatctttaatattgtatctttgaggatttaataggtatctgagaccttgcaagttgcaactgaagaatttgagtaaagttggtcacagattataaatccgtaaattattacattttacaattaatccattagtaacggattggccatgtgatttggaatttacaacttaataatgttgtcaataatttaagtatagcttgtttctgtcaagagaaatggcaatggcatagctttttacaattttgaagataattttacgtcaacgttctaaaacgttgatgattatcactctgaaaatttgacgctagggtttgaatacattattgttgatagtgaagaatgatccgcgatgacattccgcgacatttatattatagtgaccacagtgaccgaattgcttccactatatttggacccttcttgagggaatccaaagctggtgaatatgacattttcaaataagatattaaaattgtacgtccatttttaaaaattgattgaaaccaaaactttcgctttaatgcagcgaatttttcctttgatgtctaatcaaatgatacaaacactgaaagcaacagaagtctaccaacaagattacaagaaatgaaccacggaaagatcaaggaggcactgaaaattagtattaaaattttcttgtcaaactttgataatttataagtaatcgggtcaaaaagcaatttcttaataattaagggtgggacaacgaatagtgtgacgaccagattagcaagtgacatgtggcacctacttattggccttgcctcccaaaagtcagaccgatccaacccactctttgtaattaacacgtgtcagaagctgaaggactctcctatatgatttatttaatgtcttaatagatttctcatttcacactatccttttttgcttgagaactttcttcactctttcaactgctaagaagaaatagagaaaactatgacggtacgtaaattttgttgttaattattttgctttaatccttttttcatatagttcgtaattataaatctataattgttttccgggatttttcgaagatctttaactgggtgcagaaaaagctgcaccaaaatgtcatcaaaggttagtttttttttttatagataatcaatatcagctttattttataaaaaaataacaaatttgctttattttccctttgtttattagaatatcgtaagcttcactaaaatagtagtttactttttgtagtagtatcatataggatcatgtggttccctgtttaataaatagttttatattaacgtataccacgttttcgctaaagcataaattttgtccaacctatatttattttcatatggtgaaagaaatagatggtgtgaggaaaaacgagaagaagaagaggaatgaaggaataagtgagattgagaagaacacgaaagctatattggatcaagttggtttagtggatgctcttgataattggttcgatggagttctcaccatcggcacatttggctttgacaccttgaacttcaaagaagaagatgaaatggatgatgatgaatgcgggagtggggatctcgactacgtcgtaattgatggcagcatcatcaagaacgtcgaccaagagtcggatcctcttatctccgttgaaaataagttttatgatcatcatgaagatgtcggggtacgtattctaatcagttctattgagtacatttttatgatcctcgggttgatttaccaatagagaagattatatagacatatgacatgcatatgcttcaattgttcgtgtgcgtttacgttgatttgattagtatattcaaatgaatccaaaattttaaaatctttaaactagtttaattgttattgtagaaataagttaactaaaatggaaggattatacgttcactaatctacaaaaatttgggttttctttcaaaatatgactttaaagacatataaatgcagaaattgcatttgagtcaatcgagatcgtcatttttttttctgtcgacaattaaggccattatacgcaaagaaataagtacataaaataagtacataaaattatatcttcttgactcttgatattgaatttcttgagatctttcgtattagaatctgtacgtacaggccgatactgatcactttggctcgatcaaaaccgctgaaacgccagctgtcacggcggcagccgaggccgagatagagccacagaagaagaggacaacacttgcggagcttttcatggaggaccacgacaaaggttatgacacgtggcattgcaagaaacccaataaccctaatcttgacggtgaggaggttaagtactataaacaaaacggttcaaaactaagcaagaggttctcgtttgttaagaagaagctggtcatgtcaaagtccaaagaggaagaaaacgacttacgtccaatcaagaaaatgcgtcaggtatttaaatttgttttagtcaattccgtaactatgaaacattgatgatgatggatatatgaacatgttacatgtgcctctatagctcaagggaaacaatgtcacgtcaagatctagataattattcgtgcatgttacaattacatcacttttgttgcttcataagtgtactcatatgtgagtaaatattcattcgatgtcaacaagtatagcatcattatatatgtgtatatattactgtagatgataaagaggatgttgaagaagaagatccatccagatgtcgatgcaactaaggctttaaagaaggacgttccatacaagccaactcggaactgtgaagctctcgagtcacattatcttcttaaaattcaaggtttgtatttcttaattattttggtttaggggttcgatatgatttatttctttcatttgctcgtatatatatgctttgtggacagattgcgtggcctagaagtctaagaacgacgacatcgtacaagagcaatctctggatctattgttctactccctataatatatgtgatttttttgttcttatttcagaatgtgttggtattgttatgactgttgagatgtattgctttcttcttacaaacattactaagttgttagtatttgttcctgttatgcatattgtattttattactatgtcatatgttttcttatttatacgtatatcaatgcatcgttctaaaatcgtggattgtcgtgaatctgtgatagtattccatcatgtctgctatagcttggtcagttttgaagaaatttcaaacctaaagtcataaactgataaaggactaaattatcctactcaaaacagaaagcccttttgtgcgttattgggcctaatcagaaaagtgattttgaaaaagggcctaatcagaaaagtgattttgaggctttttaaaagtttaaagtaaacaaaagaaaattgaggcttgacttttctttctttttttgacttgttttcttttttcctttttcttataagagaaaactaaaacgtgaaagagcttcaccaacctgaggtcgctgaccacttggaggcattctcagctaccaatccattaacttacaaactccatattcttcacgttttactatggtaggtacctttttttaaccttgttcgtaataacaattttatacgaaaagaatagtattaaacttcaacaaaaacaactatgtatattaactggtcagatatacattgctttgttcccttacatcttcaaagagctaagattaaactatttaccccaaataagactgtaatttcatcaaaatctagtaataataatattcaacagcttacaatataaacataacgcgtgtggtctccataagctacgcactgtcttttcatcggttcgtagaaactagaaactcttcccctcacgatcttgctttctttattttgcttcaaccctagtttatttgaagtctctatataaagttctctgtttcaagttactttctcagcacgagcaaccaaaagtaatcatatggcgaatctaatttcgtttcacgatgtggctaaacataagtgcaagaacgattgttggattctcatccatggaaaggtccatatttctactttctttaaatcacgtaaacaaatttatagattataaatgctctgtttttttagctttatacttgtttctaaacacatgtttatccacaggtctatgacatcagcactttcatggacgaacatcccggaggtgacaatgttctcctcgccgtcaccggtacgtacgagtacgagttggtttattccggtttagtttgaatttatcggtttgtaattttgtgagtttttatgaaaatttaaagggaaagacgcgtcgatcgatttcgaagatgtgaaccatagcaaagatgccaaggagctaatgaagaaatactgtatcggtgacgttgaccagtcaacggttccggtgacgcaacagtatattccgccgtgggagaaggaatctacggcggcggaaacaactaaagaagaatctggaaagaagctgcttatctacttaattcctctcttgatactcggcgttgctttcgctctcagattctacaacaacaagtagaccaaattatgatgaacagattgataagagtttcttactgttcttggttttcgtttgttggtaataacgggcttcttatgtgaagatttgggccatttggcccatcgctcagaattggactataatgtcttatttattttatgttaatgggccgtatcagtaggccctttgttgatatatgccaatcccaatttcttctagcatgagctttgtgttatttacttgattttgataaaacaaccaacttatgcagtagattccatttgacgaaaaaaaataaaaataaaaatgcagtagattccattaaattcgtacttaataataaaaatgggtgagggcatacttacaaagaaggaatgtgtgtcagtgtgtgtcaaaaatatgacacagacacagaattatttttagcaaaaacgttccacataatttcaacctttatactgtcggttattttttgccactttaaagacacagaattcaatgtgtcataaaaaaggacacaaagaaatgaagaatgttggtttttaatttactaattcgagaggggatttattaatcaaatttcgaaatgtaatgttagtatttctatattatattactagaagacgattaaaaatatgagaatatttttcttaagtaaagtttttttttcttttttaaaccgtgtaatgttaattgtttggtaaaacaaaccaaacattcgtgtttctatgcaacttattaaacaagtgattgttattatatataataaaaaaaaacgtttccggagtgatagtagacttgcaaagatcgttcaccagaatcttggaaactaaattttatagtttaatatcctgttgcgtttttttttttttttttaatttatcctgttgcagtcttgatctgtgatagaattcataatttattttataaaaatcaaacgtacaattttgtgggctaacaatcaaatatttctgatattttagattttaactaaattacaatgtggtgtaaatataaattgaaactaaaaatatataaattactttttcttgtatttacaacctaaaaagtaaaacacatcactctcctctcagactcacaagttcacaacacacgcacaaataaagaaaagaaaaaaaaacacatcacgtatcaaaatgttagttctaataaaacgaaaagctgcttaattaaaatctctaattctcatatgagcttcttttttttaactgcgcctacggcgcaatttagcaggaagaggattagccatctcgcaagaaagcctcagtttctcagataagtcaacgccgttaccatcggacggtccccattcaaactcatgtaacatcatcgccgtccaaaacataacggtagtaaaaccaagattcttcccggggcaaatccgacgacccgacccgaaaggtgcaagtctcaaatccgacccaagaaccgaaaactccacctcaccttcttttgccacgaacctctcaggtttaaactccaaaggatcaacccacacgtgtggatcatgcgatacggcccacatgttcaccattgctgtggtccctgccggaacaagacgaccatcaacgatcgtgtctgttatggccaaacgggcccatgatagaagtgggcctggaggatgaagcctcaatacttctttcaccacagccgttagatatggaagtgaagccaagtcagattcatctagggctcttgatttcccgactacttgatccagctcgttttgtaccgttgattgcatatctggatgaaggaccatcctagcgaggatccactcgattaagaccgcaactgtgtctgttcctctgaatatcatctcctgtaataataactcaaaaattttagtactttttactttttatagaaactgttataaaatctaaaatttactaatttgatgtcaaacaaaaaacttctaatgctttaattattccacaacacgtcacattgagtctcaaatttcatgttttaatctaaataatcctaagcaattttcaacaaatataattaagaataattaatcaaataaatggtgtgcatacccaaagaacggcgattatgtccgggtcggataatttatctgaaccatggagggagagcaaaacgtcgacgaaatcacgaggcaaatcaccggtttgattacggtgttcggatataatccgggatacaaaccggtttacctttggtacgagtgtggaacatctagaccggagtctttgaggatcaaactccgatagccaaggaaggtgatcagtccaattcaacgttccgagcaaatcataaccttcttcgaccatttcacgtaactcaacatggtttttttcaagctcatactcttgtccgaatacagagcacatcatgttgttaagcgacgccgttttaagcaactcacgaacaaaacagggttcgttactactctgtttttcaagaaactcaaccatctggcttgagatcactcgtcgttgcgtctcggctcttctgatttgttttgtactaaagagatggttcgaagcgatacggcgaagcgttcgccagtaaacaccgtgtggtgcaaaaccaattgctctgttaaacatcagtgagtaagccgattctttaaccggtcgatcagcaaaaaccgggctattcagaatctctttcgctacgtcgggattgcacgtgacgatcacgcgagtctctcctaagctgaaagccatgagcctcttggctccgaatttctcagctgcatcagcgattcgtcggtgagctagagtgcttgacatgagtgacatgcttccaaccaaagggaagccttttggaccgggaataacgtttccggttttgtatgaaccggatattaaccggccgaagaggtatttcccccaagcaggtccaccgggataggtccataagaagagagatatggcgagccagatgattgtgacggcgaggagggagaaggcaaggttggtttggcttagaacgctgcatttggacaaaagggcaaagattaaggagctttcgagtttcgtagccatggcggatcaaagcaaagtaagtgaagagaagagagagataaacaaaaggagagtgtcttttggcctgtggggcttaaagatgagcagatggctttggtatttatatagataatcagaactcatttatatacaaaattggctacatttttatttatttattaactttagtttataatttaaataaatttgtttattatatacttatttgtgtttattttattgtcgctctctatgttacgaatgtgttcattgttcgacatatataatttacattttatacactatttacaccttaccttttatctaaaatgttattcggagaactaagtacaattttatttaaaaaccagctacatatgtagtagagttacggacctcgattccatgagaatcgatcgacgttgattgtgaatctcttttggatgaatatcttataattgaaataattgatagtgcttatagatttgattcctgtttttttaaaggaaattaaaaagcaagaccgttcagccacaggataaatatgattgcagagtctttcttgttcaccgatctgtttgataaataaacatcaaactaaaggtgtttaaaaaaaaaagcaagaccactttgaatgtaatcgtctaaatgatttacatggactctagaatgtaacgaataattgtaatattaatagtgcatatgtagcctttaatgtaaagaagtttcactgataacaaatgaatttataacaggtggcttaaatcgcaaataaaagaaaatatgaatcttattaattataaatagatgcactgtgatggttacatcaataacttattgtaaacgctatttaatcatcatcgtaaccgttgaatcaaacataaatcatagagtctgcttgtataaattaaatactaaattttatctgttaattggtaatccagttgacttgacttatctaaatcacttatctgtctctttatttatatataacagttttacaattgtgtgttgtctttcacatcaaacaatttttcagcgttttttccaaacaaataatgtgaagtgcgaacgaaaaaattatatattttgggattctcacaagttcaaaaattacttattcactacaagaaaaaaaaaaaaaaatttgactacaaaattcataaagtaatcaaataaagtttttaacggtttagcgccgccatacgttaactctccaatcctgtgggatctattctcattctttaagacgtcataacgtgggcctatgttcaatatcttacggtaaaaatgtaatattaacaataggttgcacaaacaaaaacataatgcaatagatcttaaaaagataaaaaaaaaattaattcaatatgtaattcaatatgtactggactagaaactaaaagctaaatatagataattttactgaatatatagtaccatttatagttagtttttttttgttaaaggcttagatatagaccaaactatataagaatctacaacttgattgaagtgtaaccaataataaaaagaaatgaatgcgtgtgcagtgtacgatggatttgattttcattattttaatatttgactagttcttgattaatcggtcacggattcaggagttataacttataaccgcttgacactttctaattctcgatacgttttctaatcacggacgtgggagcgatgaaggatttctccaatgggttatcaacaagtgtatctttaattggtttgttatctaatataataagccaacatgctatataacaaagtgaaagttcaatcctcaaatttataatcaaccgtagtttgaaaaggttaaagattttaaactccattggtaacagataatagcgtatacggttgtacttgctacttatccacgagacagattaaatttatccattagtttactaacctccctagatgtgttaaatgacgctatatgacagctatatatacacaatttgttcaacttctagctgtttagtttgctaagaatagttactatttataaatgtatgtatattaccaccatatagttgaaaatttctatatatcacaaaattcagtcctggattcatatatacaacttactatacattattatttaaaggtgtcatcatattacacatatacatagtactatatatactcaattatatatattcttaagccacatgatgtattgtgattatttatcattcggttgccgctaaattatgatgttttaaaattagtatattcttatatctgtagaaagattccgacgaaatattttcgtaatagaagattcgtggtatttctcttctattatactcgtatattacaaaagggacttgataaaaaaaagaaacgaatttaacatatatagttatatacatgtagcttaattaggtgctagacataataattttgaaggagtaattgaattttgacctttagctgaggacttgagctatagattgaccgttcgcgccggaaaaaaacattctcctataaatgtattgcggtggatctttgttgttggctatggtgcggtcttgtgtactcaagtgacggtacctctgttttacatccagtaatcaagttccggatttgaccgatcagcatcctttgctttccattacgccacatgcatgcgacgacaaagcgcttgatcgtgtcaaatattctgagtgtggtataattgacatatgcacacttggcgtttgtagaatacttgctttagactgaccagaatacccaccgcctaaaacatagacatactcaacggagagggtaaaatggtcatttaaggctaatcagacaatccacatgatctgcttaaacacaaaatctatatggtccctaaatatcggttatcgatggcttttatcaacggtctaagatttctctcgtgtcacagtgagaagtgcctggccgttgatctaacttcaacttagcattaagaaaagaactttattttatttttatcctaaaacttaaaattacataattttaaagaaacaacaaaaacactttacaaaactatgcatgtttgtacataagtgtgcgcatgcatcttgttttgtcatgcttatttatgcatatgttttgtttttttgtggtctttaataagtgaggatcaatacaaagatgagacttgggtcaataaatagtttgatagtgattgcaacttccccccagcttagagctatttattcacaatttggtcatcccaacataaacttgatgatgcatgtaattaagaaatcttttagctcattattaaatgaaacgaaactgattgtttttgctcttattaacttgcaactctaaattaatacacaattatctatagtgaaaagggttgattttacgataagctctaattcacatcaggtaaaacttatactaatagatattgtaacgactttagaaaccctcattaccattttttttttttttttaagttgcatatgcattaaccctttcaaattagagttgagacatatgaatgctaattttagtgattccaaataatgagttaaaccataatttttaagtacaatgctaatcttggtgagtagcattttacgcgttatagaattaatatcgaaactaaacatatatgaataaatggttggaaatgtggagtaatagaagacgtacgtcctaattaaatattagagcaaattaagttgaggaaaagtattaaaatgtggagtttggtaatatttacaaaatgaggaggacaaataaacaattatggccattcatcaatcgttttgttgatattgatacgtcaatttcttgggagggtgtctctatatgaacgtagccttacaggttaatgtgtgatcgatgcccttttacacggggcatactaaaatgtcgttaatgtgcttaatttcaaaattgaccatacatgacaatattatttttcgaatttattaataccatgcatgtaacctacaaccaaactattataggctatattactttatatagccaacagtactaactatagctaagcactaacgaaaataacaattttacatggttgagtttttaagagtcatttttatttacaaaactaaaaagtcatgattagttgagaagttttagcaattaaggttttcacaacggtcagtggattggattggtataccgtgcattccattaaagtgttatgtcaaaaattatttttgacgcattctctaatcttttggtcatttgtatcatatccattgaaaccatttgatatatagttatatatattgggtggttattaactatacatttataaacgctacggtatcttagtggaccgccgtagctagatacacggcatccttgtactttatacagattaatgcaaatggactcgcaacattattccgagaatcaccttagatatatcgaataactaagagagagatatggttataatcaccttacatatatcgaataactaagagatatatatgtaactgttatatatatgcaaatacttacaaaagtactaatttttctctctctatataatgctaattctcccattttctatcatttgtatctgaataaaaccatactaaatagcttatgctgtcatatactttccaaagttgtaaccatacacaatcaaaatgatgtcaggtttgatattttcttaactccataaagaaagaaaaaagatcaaacataacataattatgtatccaactttgtgtacggtgtggaattatatagcctagattcaattatatgtccaactttgagtatgatgtggaattctagctcttatgtacttcaatttttttttttataatagaaaatgtctcgaccaaattttgatttcttcgattagtactggataaaaccaataaatttgacgaactaaagaggacaggaaaaagaaaggctgattattgaaatttgtttcttcaaaacatataaagattttggatatgtatatgaccaaattactctagtcccaaagctatatgtattatgattgtcaatgagttttttttttttttttttttttttgtgtgtgtgtgtgtgtggcaatgagtttcgtcgatgcttaactttggatcttacaaatttttccttaagttggtaatgagatgaaagctttgatgagtattgtctttacttttatgttttatctataaatgtctctgctttatatttatccttttgtcgcatgatacttttatcattcaatagatgaagactaacaaactgaaataccaacgaattgattactaatccacaatgaacgatgtataatttaaacaaaacaaaaggacgaatccatactaaaaggaatacaattgctttaaaatctacaagaaaatttccatttaaaatcaataatattcaaaaaaaaaagaggaacaaaatcaataatactctgttttatgttagtactaaaaaaccaatcttcagagagtttttttcttttgatatttggtcaaccgttggataaaataaattatactccctattttataataattttattcttgtttctaaataaataatgttctgtcattttcaatataaacgaaataaggatgtaaatggttttaaatttttataataattttgcattcaaccaaaaagatatttaatacgaaaatgaggaagtatataaatataagcacctttatatgaaaattatgtgatggtttttctgtaatggcaatatttttattctatagatggcctaacccacttttgtttaaccacatttgaatgataaattgattcgatgccatgaatttaatcagaactgctccatgacgatgtgtcaaatgctcctgtaataattcaaaattcctctttttgaaatcttattattagtttactttttctcaaaagaatattatggaagtctttcactacactatccggatagatatggatcacataaaactttggtggattttatcatgataaactttgacttactaaaaaacttactaataattaatagattaataataagcacaatatcaataatattccgattgattcgtatattttggaagtaaagatctcaaatcaaatatctaagcttaaacgatcgctggattatagcttaaacagacttaaattttgacaatgcatgtggtctataacttcttcagagcgattgactcttgttctccacccttttctcttaatagaagatatgcatggttgactttttttttgtatacgttcatgctcgatattcgaaatctaccaaattaaagtaagatctttcacgaaaagaaaggaaaagagcatgcaagatatggcgcaacatgttattttcatggaaacccgaatatacattttttaaaaatgaactatttgaaagagaatctaaacagctttgttcaactttgttacacttccttatgccacccaaccaataaataatgtagctataatgtatttgagtatcttggtctgctttaccgaaaaactcatataaagccgatgtgtgaatatcattgtagtcaaatattattatgcattttgtgcaatcgatctcgaatttcaagtttttaaccaataaatatgatatcaatacatgtgtaatgttcaaaacatgtgtatgcatgataaattggcatttttgtgttcggtctgttacaaatcaaatcattgtgcgtttttaacattgaaagaaattattaatataagaaagagaagaaaaaaaacactgaacagaagagaaaagacaagactaactaataaaaaacattataaaaatgaatctagtcttttagctagtgcactgacgaatttgaagatgaattaaaataaagattcgatcgcacagtctagctagatggagcattgattctgattagtcaagtgtattgatggagtcacatagacacaacttgcattgaattgaatctctcatctccctgtccaatgtatattacacatacactttgaatacttgctaatcaactagagtttgaataggtatcaaataaaactttgactgcatcgacctttgtcactttttcattatagcaacggtaaacacaatgattgggtatcttgtctgaccggtgaaattttgaattcaaactaatcaatctagtggcttttcttatcggttccatatattggttcgcagaagcggtttagcaaaatgattgggttttcgttttgacttttgagggtttattgaattgtctaagaagaaaaattcctaaacatactaaatttttaaaactacagtaaaacttttataaattaataaaattttatagtgaaattcctaaaattctaatattattaatttaaaataatattaatttatcaatagagagattttcttaatttaataaaaaatttaataacgatttctttcattataaaaaataaatgttaaatatacatgaaaatgtgaaatacatatgaatttgtgaaatcgctaatgaccacaattaaatggcgggatccaaaatccggttggatttcacaatttcatattaatttagtatttataaaaaaaaaaaaaaaaaaaaaagaaagagttgaaaacctattaagaaaataaaataaaaaataaatgctaaatatacatgaagaagtgaaaaacatgttggatttgtggaatcgctaatgaccacggttaaatggcgggatccaaaatccggttagatttcacaacgtcatattaatttagtatttataaaatttaaaaaaaaaaaaaaaagagttgaaaaccttttaagaaaaaagaaatgctaaatatacatgaaaaagtgaaaaacatgttggatttatggaatcgctaataagcacgattaaatggcgggacccaaaatccggttagatttcacaacgtcatattaatttagtatttataaaaccttaaaaaaaagagttgaaaatcttttcaaaataataataataataaatgctaaatataagaaaaacaagtgttaaaaagttaaataaaatgtaaaccatattgaacctagaacaactcttaggggattggatgatgtatccaattagtttacacaaaatttaaaaatttaacacttatctatataaaaaaaatctaaagttataataaaatataggtgtaaaaacattttacacttaaactaatgaaaatatataaacattttagttatataaatgttatggtgaaactaattagttttagttttacttaaaaataattttgaaggaaaataaaacaaaaaaaaaaagaatgaaaaaagtaataccttgttggatttagtagcaaaaagggcccatagagcaaagcccattccaaagtcagatttgagcccgtcggtctttgggagccctctcgtgacatcatccaccaccataaagctctccgctctcttggctatatcctcctctttgtagtctccggtgaaagcgtctctcgttggtcagatcattatctggcgacatcgatcttgatgacatagatttgatggttcaatcacgaaacgatgatgatatgatatcgctccgatcaattacggacgtttcagagatcatcaccatcggcttttacttgaatatctctacttggatcatcatcggaattcacagagagataaagacaaaattgtcttgagaagagaattagggttttagaataagaagaagcgagaaatagagagttttgatttgtcgaattctttagaagaagcgttgagactctcagtgagagagtaattatttatttataagcgaagaaaaggaaactgataatcacaattaacggtcacaaaatcttcttttaacggtcacaaaaaagatttcttttgatagcttctgtttccttttttttgtttctctgactgtgagagaattaatgtgatgagttttaatacatagactatagcaatggtatataaatcaagttttatagaatctgtttcttgttggtatgtatcgagagagaagcggcctggatatgatcacaacaagaaatatttctcaacttaacgaaattggaattactgttttagcttagcctgatcatttgcagacatatatacaaaagttgccccagtatctcatattagctgagaagaagaagccaatcaaatacataaaaaaaaaaagcacactaaagattgcaaaagctaaataagtttctgttataaaatcaacaaaagaaatcagaggaaaaactgaaagagctcttcatgattttgtagacgcgtctgaattcacggttcgcacgaactggcctttcactcgaggacgttgttctgctagcttcttcctgctctggtaccgaacctgtaatccatttttatacatctccattgaatcagtttgatcttgtatttgtttcagatgctgtttttatgatgaagcttgtgtgtctcttacctttttgtcaaagcatcgatctttcctcttcaaccggaacttcatcaatgcagcttctctctggcttctactccaacgttgtttcgcactttcttcttcctttggtttctctgtgctactgctttgtccagcaatcccctcattggtgctttgagaaccagcttctacttccttgctagctgctttctcgcgatttgattctaccggtatgggtgaatcttgcttctgattcgttactgtggactgaagaacttggttacggaagcttacgcttgatgatccgatattctcctggttgctgctcgttgtggagcttccttgatcagatcttacttttctcaacttttcatgtgattcggttggtgtctttggctcacctgaagtactctcctctaaagcaacgacggctttttctgctgacttgctttcctcaaatctgcaagttaaatacataagaatttgcgaattgactgactctgttttgatactctgcttttgttgagaaaaaaacaaagtttctccttaaatcttccgagtcaagaagatgttaacttgggtttcatggttcttttcgtgttcctaatatcagtttcttctcaccaacttagttctcttcttgatcttttacatattaatgcataacactttatatatatgatttctcctgcttttgatttttattcatccaaatttagtcttaaacttactacttagctacaaagcatgacgagtacttactacttaaaaacagaattacaaacacgaactgagaatatacgtctttctaaacacatcatttatacagacaaaaccatacaatttcagctcaaaatcctgcaaaattctcgctgagaaacgagtcatttgctggaccgaatatctctatatccgtggctcggttcatgcgatgtagaccggtaaatttcgatttgaatatgtatatatccaatctttagtctcaatctgtttcatcttcttgtttagagtttattgttttcatgaccaaaaatcccgccaagggtaattgttgctggattggtccaagagagtagtagtatctgatttgaaacctctccaatcatcagatgatgtcaaacaactatcagctggttcaacaatgttcattaagtgatctggttcttcctcaaacccaccaaaatactctctcttgatgttgttactataaccattatcatcatcttcataatcatgatgatcacacataaccccatgatgacccttatcatctttcatctccatctccggtctaacctcttccggtttacgcctccggttctcttcgttttctgattcatgatgtgtgctgcttagagcaaccaccgcttgatctccactacactgcctttcctcctcctgtgtcttcttttgcgtcgcctcttttagcctctgcaactacataaaggtataaaacaactcatcaacaatctattctctccttcaataaaccatcaaaacagagtttttcttgatcacctaatcagtccttaattgcaatataaccactaaagcacatattttatcacatatttaaaaccacagtttttcagtatacaaccacaaaatacacagattttaactaaccatgtaagaataaacagagtttagaacatacctcagagactaaagcttgtttttctttctttaaggactcgaactgagaagccaagttgtcgtagttttgtctgagaatgttgtactcagtctcgagctgcttggatttccaacgagccctcttgttctgaaaccatatagccacttgcctcggctgcaaccctagctctctagctaattgaaccttcttccttggctcaagccttgtctcagactcaaacatcatctccagtgacttgatctgctcgtcgctaaaccttctctgattgttcttgttgtggttgctcttcttcatcttcttcatggtcaagaatggctctgctgacatcatcgccggagaatattctccaccttctgtcatctcatcggaatttttcctcagaggatttatgttttctttatttttattttttggaatctctatgtttgtgtgatgttggctatctatatatgtgtgttgatgaggctgagattattatgttaacagttatataaaaatgtgatttgttgttcttttttgggagggctccttagcatataataagatataactttgggtttgctttatcgtaaattttttattcatttttgagtaaacgatttgtgggtcgacaggtagcaatagggcggattttggctgtttctagagtcgtcgctatcacttgttaagtcgagtttcatttcaactcgaaactaatcatctaactactgattaataatttccaccttttttatttcttttacttgtgacaaaattagtttcgacttaacaagtgttagaaaattaaatgatacaaaaaaatctgcatactacacaatttaccgcatagtaaacattctggtcgatgtgaaaatggaaatggaacaacggttgcgtaccaatgtatttagtgatgtgggtgcatattaacaaatcctgttaagtggatcttaaataaaaatgaagggaattataatggttcatataatgattagcatttctgaactgattactaaacaattataatggttcatatagggaatttcagaaaatgaataatcctcatctcctatgcatatatcatcatgtgattaattatattcttttcagtacatctctggtgaatttttaaatttttatgattgtgtgcgacagatttaacgttcagaagtcaggatgtgtgacgggtgtttttgtatacgtatgacacaaatcataattttcttagaatgtgactttaatattattatacttgcattgtaaaacatatattgattacatcacaaatctcaaaaacaaaacattgtgacttaagtatgatgggatacaattttttccagctatttgcttacgcaattttttctaatcggagatttgatttagaatcaaagcctaaactaatttttatagataagtgtaatacaagtttaccttcaccacacgtaaaacttccgtgcatgcgatttgataactttttgccaactctgttgtgatcatttgttgaccccttccttacaaaaagatatttacttcagattgaaaaattgacaatactattatactcgtaaactatttgtttctaatatcatatttgaacttatatgataaatcacagatataatgattcttgagaaaattttctaaatttttctttttttctgtttttatgttaacaacaccatatttatatatatttttagaaaaaaaaactaaatagaaatggcatataatagtttttttctagagtctatataacgttatttttaagaaagtcttcatacaactgatttcgcaaaatttctctagtttagttttacaaattatggtacttcaaacctctataaatgttatggtattttaagaatgaatgcctcgtgattatttaacaaacattactccaaagacaaaaggctaatttttcgtaacatttcatcatttgaatggaagcaagttaaatttttgccaacagggaaaccatatttgaggcagattccctagactttattttcttcacgatagcgataacaatttaacaatattagtattaatgtgaaaagcaactttaattcttgctttcctgattagtttaaggtttacgttcaccttgcttgtcggaaatttcttttgactaattaatacaagcaaaaatattaaattgggccatctagataagatattttcaaaccctaatattctttttttaataattaaatctgatatttgtaaaaaaaaacataattcgaaattatatctatcaagtatcaactaaaattaaaccaaaaagaagtaccaactaaaatttaacgtaagagatcaatttctaaagtcttattgaacttatcagaaagtggcaatcaaaaagtatcaaaatcagccatcgaaaactagccaagtgttataatcagagatgagagttcaatgctttgggacatcaaagttgatagaagagatgacatggcagttgatctgtggtggtgcctgaatattttggcccagcaaagtacacacgtgtcgtggttaactagtatatcgcaatttctgagaagagccgtaggagaagacaaattcttcatttctttttttaaaaagtataattttaatttattactaaataaacgatggcttggcttgtttgtatttgcaagctcctcgacttgccgcgtgtgacattaattttttgatatatttacaattaattaggactttttatgttagattatcagtatggtgtcacgttcacaaagtttttctttgttttcataccatcgtaatattcaaacgaagatctattttattaacgaatgaatttattatttttattttattttctttaacgaatgaattaagttttgtcctgctttttagattattaccgttactgcatctctaatcaatttatgatacatgagaatcaaacacagtaatttggtttttaacgatagaaaaagtaatttatagtagtgactttatcagacaagaagacttttttccaccaattttggaattgttgatagaattatagaactctattattccatattttccgaatggacaataaatattctaaaccacattcgaaatttttttgttttattttgagaaacaactagatcaaattaatgtgtaatctgaatatctgatggtgtggaactgtggaaatatgatgccaaggaggtgccaatggggaagagacatttagcaccgtcttaaaaaaagcttatcttttcgtgataataactttatagaattaatagatgaaatatctaattacttttggtcaaaatcatcattggttttatttataatgttactatcaaaaaggttataataatcgtaaattcattgtcacaagtggccaacaatcttaccctacttctttaactactactcctcgttaaagcgatgttgaaaataaagcggctcgacttttcttaccgagtaattaaaacaaacaaacccatctttaggactagatattttacttaatacaccgaatctccgactttcacgtttcattttttttttaaaaaataagcatgttcaatttggacatggacaatattttattttattttccagtttatttgaaagatcaactattgaaacagagtttacaggaaatttgaaaatgtgaaaaggacaaaacaaaattaggaagaaaacaaaacgaaattttacacacaaaaaaaaaaaaaacgaaagaggcgaaaactgataaagataatgagtgattggacctgaactttatccgtattagaattttgttatactttctttcgtttccctttctacgtgtcaaaatgtctacagtatgttgaagtacaagtacgttcattgtacatgaaagatatattcaattgcttatgttgtcataattatctaaattattgtatattaagctatagatattgttaattacttaattgtattagtcacggaatctgataataccaagtcaaggggaaaccaaagattaggcgtgagacggttctcattgctgaccttgtcggaccaaagaccttagtcatgttactctgttctcttgctttaggtttcgatctatttccactaccgaaaccagtttcaattttcaaataataatatttctctcattttatttaaccatataaaactctcagtgtttacttcgatccccgaaaatctttatctcttaccttgaatttatttatttaattttttgacatgttttgtgttatatttcatataccttttgtctcttataaatttgactcacaaaacaaaagtaagggaggaaaaaaaacaaagcattgaatttttcttatttaaaaggcccatactagatgttttaaagcccattatcccttatcaggttaacaaaattaaagaaaatgcccattggactgtctagcccacgctagctgagggattgataatatgtagtgagccacctttggcataatcataacattttgtaataaaaccaatataaatgtgttctgattgaaaaataggtttagtgcgaaccaatacatgatttggaccagtattaatagtctaatacgatgtgatcattgaacttacatcgctttttttttttttttttttgctaattagttttccttttactttttgatacctatgagtttgtaaactcatgacatcatatatttattttttgtattatgcgtattggataacaccactaatcgagtagacaaattcctataacttgttgatattgtatgcatgcatataggtaagaacaaacgtatacttacacgcatatatgatttatgtaagtgtagtgtggatagattgagaggggtaaaaaaaagagtgatggggatatatcgaagaaatggttaaaaatacagtgaataaaagtttttgacaagtaaaggtctcatcaatagacattcgagaaagggtctttatgttcattacattgagatccgcacttttcacatatatatatatatatattttctttgaaattttgttttttttcgttgtgaattacattttcataaggataccattcatatttatattgaattccctcttttgtagtcttttcaccgtaaccagctaatatatatagatagaaaagaatggctgtaaaaaaatcttatacgttagaaaatagtggagtaatttttattttgaaatagaaaaggtgaggaaggagtaggatagtggaaatttgggatctgatttgagaaattgaatgggctgagagaatacgaacaaagaggcattaaatgctcttgtccctctttttccctaatttcaatgctaccctcgctcctcctctagttcttaattattcagaaattctaattgctttattacagtttttctttaacaattaagtttggtgtttagtccttgaattataattgctttatttcagtattttttttaacaattacagtttatgtttagtccttgaatacataagaaacggtagctccttcagcatatagtactatatgccaaagaaaagttcgtccagtgcttagttaatgacttatggggttggaaatttgaaataaacccttacttttttttaaagattacataatttcatttaaagtttataattaagagcatgcaaactgaattatctattaaaatcttatatgttgctggtcaatcttttttttttttgtagattgtaattaaaaggtaagtggtagtatgttttaacttttaagctatcaaaaatcaaaaaatgattttattttaaaaaaatactatctatgtaactatctataaaatatttttatttgtaactatttatgtaactatctataaaatatttttattttatagtttagaattgttattaagtaacgtcctgccaaacccgtcccgccaacccgtcccgtaaaaaaaactcatttattttattaatgttgatcttatttatcatatgtttatgaatcattgtctaaatattttgtaattttgtagtaattaaatgctatcaaatatctatgcggtttgatgattataattgaattgtaatagtcatgcagaaaaacaatatcaataatgataattttgtagtaattaaataatatgaaatattttgaaagttttattttagtaaccaatcgtgtagttaatgtagagagattttaggaagattgttaaatgtcaaatatttaattcgaagattttttttctaattatcaaaaacaaatattaaaatttagtggcaaccattgtaaataagttccaactacatgatttatttcacaaaataattgtaaaaatgtatatataaataagtttctgaacaaatctgcaaactttaaaaggttttcattaattacaagtaaaaattgaatagagtggactataaaagtggttttttttttctcttttggttgaccggtctttagtctatttctatgtggagaagaaataaacatttattccttgtagaataaaaataaacataacaatagaatataaatatgaattaaccgatctaaggtaagtataattaattagttttctaaggcatttttttttgtttcttaaaggaatgtaagaatggacaacgtgggttcggatatgcagggatttgacatttacgtcgtctctctctcggacacaacacaaaacacaactctcgaagactgtcaaaaacgttgaaatctggagccagaatcgtcttctccatttgtcattctcatccacagtttctacttatttcttatctacgtggaaattaaattcattagttttcttggactctagcaacctaaacaaattgttgcagcacttgtcgcgggcactctctagcttttaactctggaatcacttttaaaatgagaaaatatctatgtttttttaatttattgtaccatatgcattctaaatattaataagacaacgacatttcaaaatgtgaatgcaccacaacgttccatatacatatttccatacactaaataagattctttgttttggtaatttgattagggtttcttacttatacatttcctaattaactagtcatatttccagctggctttagtgattagcttattttataatgggtgttattaaagcaataaaaatacacaaacaaaagttggtattaattagttgacttaaaggacataactttatttcaaaagcgagtcatagaaaagtgattcctttttcttccctgtttttagcgtagaaatttttcatttacaatgcacgtatttttgacataatactcaggagacagtaaaatcctgtccaatattcgagaattactatatcatacactagaatatataatggtgtgactgtaaatataatttcgtagaaaaacattttttctgaatactgattacagaaacaaaaaaaaaaaggggcaaagaaaaaagattacagaaaaagtagatatctgagcttaattattgcgtaagagagaacaattataactgccagtttccttaaagtgacatgtttgcgtgaaaacaatgcacagacagattaaatctctcactaaatctcgaaaaataagagtattaattactagattgattacataattgatttcatttttttcctcgttgaccaaaacgtttaccgttataaaacacatgatgacttcatctccgttacacgcttgtcacagttttttgttcttcctggattttttaaaaagatatcaaaagaaaaacccattagttagaaaaaaaaatcctaagcaatttaaaacccaagtcaaataataaagaattcaccataaattccacgcttttttaaaaatatgtacgacaagttaaccacgtagtcaatatttccttgaagtaaacaaataaacaaaactcaaacccttcactcggtaaaatttgaaggttaaacgaaactataaataaaataaagtactagccaaataattctttcattagaaaagggcatgaaaaggtggagactttgacttaaaccacaataaaaagagtcaccaagggaaatgggccaacaatatagagttttagccaccccatggaccattttcaccgacctcaacgacttgaaacttacgataatcaaacatcattaatgaatatgaaatatattgctgataaaacttcgacttgtcggtacaaaagcatttgatctaataattcacaaaatgtttagtacttttacgttaagttagtcataaaatcatacagtattgtttaaaatggtaatacaaattttcttgttttaattatataaaaccgtgttattactttcataactgattagatgatccctttctaatactaacttcatgcattcccaaaaagaggatgggtaggaaaaaagaaagaaagagttttataagaaaatttaaaactgaaataaaacgggcgaattcaataaaggtgaagcaaaattaaaaaacgagaaaaaaaggtgagatacaataaatgaagaatgctaatattgggcagatcaataactcaactactcctctgactaacttttatagtcactcctcttcccctttttgattccctttccatttttctcagatttatgtttctaatttctcgaattcttataattttatactttgtgattcgtagtctttgtactttcctacttgttcgtatctctttcaccggatgttcttacgcggttccttcaatttcttttcattattttatgttcttgggactgaaacaacaatttgtttgggtaaaagctagtcgtataattagtggaatattgtaaagtgttggctattcattttttttttttttttgcaaagagatactaggaatgtaaacggtggttgtaatgacattactaacactcgtctatctcctattaaactgcaaattaatttgttgaacaatgtgttagtaaaacattggtattctgttctattcactatatatattctttgttataacatatataaaaagttagtctccttccacttgcaatatgtactgtttgttgcgctaacacagtttaaaaccataacgacaaaattaggcatatatctaggcatgcatataaagtatgcttttgtatataatcctcctaaaacatgtaattaagaactcaaaataaaataaaataaaataaaaacaaaattaacatgtaaatagaatccatctatatataaaacattgaacatggccataatttgtttgctagtgatgaaccgaccgaggatatattgaaataaataatcatcaaactataaacttcagccatttaattttctaactataatattacgtaataaagtacataaagaacgttggaaataggctcaatatagaattagtagaagggatgggaactaagattttatttttgcttgaacaagtaataacatagtaaatgggagtccagtgacatgtctcaaaaagtaaacccaatgtttttactgcgagatcttgaaacttgaaaagctacacacatacgtacatatgtattgttagagagagcgtgtgggaccagagacacccatgtttcttgtcttgtatagcttttctttggctctctccactactcaatttcttcataaaacccccctttttatttctctcattctctcttccatcatcaccactcacttatcttcttctccatctctctctctgcttctcccttaatcttagccgggtctcgtgggggacgaacatagaaagagagagatataaagatatatattcagaaaccctagattctataatttcgactgaaaagaaaaaggggctttctcttttgaggggactgttgtctggctcgaggactctggctcgctctattcatgttggatctctttcgatctaacaatcgaattgaaccttcagatttcagatttgattagggttttagcgtcttcggaccaggcttcattccccccaattgttgctccctgtttactccatatttcttccttcttttcaaattagggtttcagatccagtgaatgaacccttgttaaaggtttgatctcttaccttactttctcagattcatttacatgcgttattgattgtttgcatggaaagaaatagttttcttttttaaataggtctttggggaccgatagaaaaaaaaagttttcaggtatttgcagattggtgtaatgatgaaagaatctgactttctttctcctcttggaatctgaaaagtttcatcatgacaaactttttatacatgtgtttgtatttttgaacttttctacattgctatgattttgctatgattgtttctttttggatcttcatggtattgaatgatgatgacgatgatagtttttattcagatctgtttgtttcttagcacactagatctatatttgtgacacaaactaggggtttcatgattctataattatgatttctgaaaattaagaagcaatatgtatgtgagttaatacaataattatgtccttatactccaacatgtaagaacaggttttgcatgggaagatcaatagcttgaatttggacctctttctccttttaaatttcgcattgtaatatgtaaccatttagatcatttagtctcggattatacttaatagttaccactagattgctaatacgacatttactatgcatcttagatctttcacttgtgtagtgaaaatcttcaatctggtgttattcttgaaatcttatcctcttattgtacgatgaaccagattccagatatttagtaaaccagacttcgtgtgtgtatatatatataataattatcaacaatttaaaagtaaacaaaatgtggatgttgtaaaatttcagagtgaaaccattacgcatagagttttcatcatccttcgatttttctttgttcaatttatgtttcgttttttttttcggcgttgagaaacactttactaaatggtgaatcttaggaggaaaaccaaataagataatactccattcgtgtggaagccgtcaagaaatagagagcgtcttaaatcaaaacaacaaatgaagaaataaattattattaaatttttggaaaaagtagagaaaaatcttactaaaagtgaagcttttttggttgtcctaaagttttcacggattacacaaattccatggctcatcggatttatcttttttactatgtacttttaaccaaaaactttgaccacattttctttcttctacgggtttcagtgtcttttcctgctgaacatacggctatggtttatgtcaatttaatttttgttcacagtaggcggtttctatataaataacctgctgaacctacggctatggtataagttaataacatttatatatccatgaatatatgccgaattgtcaactatcaagcaggcggtttctatataaataattcattttaaaaatgtttctatgagtttataagaatttggttagacagacttatttaaatgttttattttcggattttccttacaatttatttttttcccatataatttatttgtcgaaattcccatatatattatacacatttttaagaaataaaatatattgccgacaaaaaaaaaaaaaaaaaattattgatgaccatgggctttaattgggcttatacaagtcatcaatttgacagccgataacggttaattaacagaagcccatgatagtttccgtggtttttatatctacgaacttatcactaatatattatacacacatttggcccattggtatttgacagtgtctcgtgaatttgtttttcaaagaatcaaaagataaataattggtgacaaatagcatgcattatttgctatataaaaaaactatagcatgaattatagttttgactgtaatactgtatattgaccaaaaatcaaattatctgtaaaatatgtgaaatgaaatcatgaataaaaacggaaacttatttgtaaattcgcaaatgggcatcatatatttgttgtcatgttataattaatttgccaattgacatgagtcaagactgtacgattatacggttccggtgtggatggttcatcacacatgagggcaccctattagaaccggctttagaatatgaagattttgatgttaaaaagaaggctgtaccaatatacgatgatttctacaaactcatatcaggaaaattatattatcctgctgttttttgcatgcgcaatcgaatagtagttttaagtaagaaaaataggggaaatataaatagtagtataatccaaggtacccacaccgtcccacaaagttgacaatttttgaatatcgttgtctcatttttcacacaaagtgattattgttagtgtgcactgctttatcttatcctctatagacgatcaactttcattttcctctcttattttattaaaattgaaaacggatctaacaaattttcatttttatttcatttatcttctggttctagatactgatagagtgacatgtgccttttctttttaccttttaaaattcatatatttttcttttctctgtacataataagtattcgctaccatgtcactaccaccaacttggacggcctcgttttttattcaactcgtcaggaaattgataaccatttacttgttaaagatatgattattgtattcgtacgaattcatagatgtggtaccattgagcatatcaatattaggctagaatattccttctccaaattttgtgtgtttgatggcacaaattttagttgttttcattagtaactgtctttacttattggattagataacatggattataggctcctcgaaggtgccaatatccatcaacgcttacatcgaaattaaaccggccggtttatgctaaaatccgttgacccaatcgccgttatgctaatgttaagtgacaattctaaatacgataatggaatgatttttaaatataaacgtagtttatacctaaaacaacaaaaagaaaaagtagtttatacgtggacatgtcttagaccggctgcgtcttgttcatcgaattgtctccgaatttggatcattacatatctataactgtatttataataaacttgtaagttttagatatcgacttgcataatgtgtatacatgagctcatagatattgcatatatacaagcgatgtttaaattattaaacaatcgctatatatatacatcaccacctccagtcttcatcatgtgacgacattgattctgtttcttttataactaacaatacctaagccgctccaataatatataaataattggtaactacagttaacaaaacgaaagtcgcagagagatcaacattgtgacaatatttaataatgtaatttctctttgccatttaagattccatatgacgacggctcctttatttggatataagtttcaatttacgcatatttccgactatcaaaccttttctctttgtaagatgaatagttacactgaatccacccaaattttatagcttttctttttgaatatatgagaatagtcagttttgaatttcctttgcatagtttgatcacgcttttaacgttcttaattgatgatatatttttcgctagtaatactcttaggttttaggtaaaacagtaatatgtcgactaatttgactaatttactcggtttagcacttagttaaaatttcaaccctttttcttgagtcaccaacccattattaactgttggtcgtcattactctttaattctcagttgctgaccacatactttcttaaaactatttgttgacgagtaattaaaacaatttatgagtatcttttacttcataaaaaatattaaaaggacaactatattaggaaatataaaagaatattagttataaacttactgtcatattgatatatagctatgcaaacaatagaaaatagattcagcattcattgggtttcttaatttaagtgttctatatttttggtagttctcttaccaatagaataacgttaacaatatttttaataaaaacatatacagatatttctaaagtcttacacttcattatttagcataatgttttgttttatatatttgtaatataaaaaagtgctactcgatagagtttctctttaaatattttagttgataatccttgaatttttcttacttattgctaatatttttggtcaaatcttaattattgctagttacaaacttcttaaaatacccattggttattattagattttataaagaaaatgacaaccaaataggaatatttttaataccaccattgtatttattaatgagaagttgaataaaagaaaataggagcgtctcatctctttttgaagggcttttttaaaaaacaaatactagtgtgttttctctttataaaacaaacctcactcttttgtttctttcattcatcatctccacacaaaaaaaaaaaaaaaaaatgaacaacttaattagctctctcgaactcacatctcttacacttgaagacccatggcctgctttctagcctaaatttcctcgagaaaacaagcaaaaaaacacaagaaagctagaatcttattttcttcttggtctttcttggtttcttcaactttttcttaaaaacgttttcaaaaaatcatgggcaccggagaaaaaaccctgaagagcttccagttacatcgcaaacaatcagtcaaagtcaaagatgttccaaaagggtgtttagcgatcaaagtgggatcgcaaggagaagagcaacagagatttatcgttcctgttttgtattttaaccatccattgttcatgcagctcctgaaagaagcagaagacgagtatggattcgatcaaaagggcaccatcacaattccttgtcacgtggaggagtttcgttacgttcaagctttgatagatggagagagatcagtttacaatggtaacaaccatcatcatagacatggtggccgtgaccagtatcatcatcttgttggatgcttcagagcttgatgaataatgatgaaatgaaatgatgggtggtgattgtatgtgttcaaattttaatgttttttctggtttaatcttgtggagttgtggagccaaaactggcctaacccacaaaagaagtgaatcttctaaattctatcgatttgtagtatctttttctgtaattttaatggaattttaagatttaagagtgttgttgtttctgattttttttctttttcttttattgctttagaccatttttgaaaggttgtagataaacatgactacgatgatcacaaagaaacgaaaaagattgacacattttttggaaatttgcaactgttagacacgtatcaaaatgataaaaaatgatattccatttaggaaaaaactataaggaaaatattctaaaatatcacaaaatagctttgaattccaaaaataccataaattttaattttatgaagacttcataaaataattgtgattttttgggattgtattaggaatgttggaaataaagcataattgtggtatatatataggaaataatgttgtgatataagaaattaaatatagaaaaagaggaaaataaaggagagattctctgaaattagtttttgtataaaatatttccttttaccttacattgtaacggctggtcctctaaagcattaaatctttcatttgactattactagtgatattttaatcaatagagaatacatacacatcgaagtaaatagcaatgcatcttccaatgttagcaggttactcatgcattcttcagagtcttttactctatgcgttaattccaaagatcctatttcaccaatcacaatatcacacagtaaaaaggatgaaaccaagaagatcctatcttcttactgatatctttgtagtttgtatacattctacaaaaaaatatgggcagtactacaatctaatctcatttatattaaatataactatctaaattaaaacatatatacttgtgaaacaattagtttaagaaagcgaaaagtatcatgatttgggctgtatatatatactatcacacctgtagagtgcctgttttccgtagactaatgggtacgatcgaacccactcatctcactatcatgatttgtaataaatggttatgattcgattgtcggcaccatttgagaaaaggaaaggcttagcttttttttgggttatcactaattgttgttttatcacttttcatttcattttttaatttgttgattaggacagcgttactttattgtcttttgcttttaagttttaacccttcataatagccttatgtagaattagtagttggcctgaaaatcgtttgattagatgctagacctctttaatggtatgaatgatattcttaaggatttgttgtaatggagatgatgatgatgaagtgatttgcttagaggaaacaatgtaaaagttaaaagcaattgacatacaatatgactacttgaaccatagatgttcatatattatacttgcaaaaaaatgactgtaacccatctaccttatgcacatgtttatatctttttttcattttggtcttttctgtaccataaaattgaaactctataatacgataaagaacaaaacaaacggacgaaaatacccctcacctctctcagaagtctatttgctctgttctgatgaagaaaaaaaatattaagaaaaagacctaaaattagagaaggactagcgaggtcttgcgtgagcagcacgaagagtaactccgtgcaagaacttagtgaaccctaagtaactcagcttcccgtcactgcttcttacccaatctctcaagtgtccatacgcagacgcacccacattcagttcctgttcaataaccagagtcaaattcagttccgaagccaaacaccggtcctatgaatcgagaggattacatttaacaccatacccttgctagttcttcgattgtgatcactcggtttccctcggtttcaaaatgctggaaacctgccgttgctatctcttcccacgcgtcaacagcttctagttgatggatgctaattgctgctgcacagaactcttcgaaatacatcttcctatacgctagagattccatctgccaaaacagatgatcattagaaaccaaaagattgattcatttttctctcaaatttgttctcaggttctcacagtgtgaagtatttcaggaactcttgattctctcattgcgtctgttgcgttttgcataagcgcctgcgaggatggagcttattaaacctttttagtttaaaaaagccgatgtgactattgaccaaaggccttccttcagattaagtaacttaccgtcttgaagttttcgagagagacgctaccatctttgtttggtcccaacagcatgaactgtgctctaagatagactagctcgttctcggtcaatgcttttgctagcgcctagattcaattattaaacatatgcttcaatcttctaaatcaactcttaccaactttgtgccaaaagaagaagaagaagaaagtcatacctttaaagcagctcgtctaagaggtgtcgcgtgcaagtaggctttgaccaacttatagatcaaaatgtctaaaggaatcacacgactatcatcccgtaaccacggatgagctgaaaataaacatatcattagttctgtaatgttcaaaataatataactcaatgatgtgtcaaaaaaagaaaaaaaaaactcactcaaagcttgaactgcagacattcgcttcctatagtctttgttgagaagtcgtttcacaaaatctttaccttctgatgaacaagaaggccaaggtacgtcatcatagtttggttcagttcttagtacagtgcgaaagattccagattctgtccgtgcccaaaaaggtcggcttccacataagagtatatatgtaataactccaatactccatatatcagcctcaaggctatatgacctgtgtaaaacttcaggcgcgacatagtaggcacttccaactatatcattcagtctttcatctgcattgaggaattcaatcaaatttcactagtaggcagctataaggaaagtatagtgacaaggcctgaaagaatgaaaagtcttaccaggtctaataaagtctgagagaccaaaatcaataagtttcaagtctgagtcttcgcggcttgatgtaaatagaaaattctgttgaacaaggtaacaggagtgtttagtaatgatgtgtaatgctactggaggtagagatagggaaagttttctttgtaaaaacagacctctggctttaagtcacggtgcacaactccttggagatgacaaaatgaaacaacagttagaatttgtacgacaatcgcctttgcatcatcctccgggtatttaccacccctgagacaagagaatgcagtgtttgagcatagatatgaataaattctcagcatttaacttgaggcatatgcagagaaacacctaaaagagtaatcagacataccttgctaaaattctgtccaaaagttctccaccatcacacaacctggtcaagcagaaccaaacatcgatttaagtaactggtttacaaggtgtgtctgattacagagatatgttcaaagaaatgcagttcagaagtgatgttctgtgttacaacatttaagtaacagccaaaatcctgaggaagagagaacatcaaatatctgataaaaaaaaatggaaacaagacatactccatgactatgtatacgttattggcgtcctcacatgcatcataatatttgattaaatatttgtgtccagataatgatttcagtaacttcacctccctgcgaacatcttcaattgcaattgctgttgtcatctgccaagtacagaaagataattcagtcaacaaatcctttttgcttgttctattagagagaaggatagcacaactgtcaccaaaatgtgtcagaccagcttcattacaaagataagccaaaatcatgagctttcaaaagtgaagcccatacataaaacattgtgtcctaatgcagacaaaaggaatgtcagattatggtctccccaggacgcagccagacaaagacttctctagttacgtttttcatgaatcatcttttcaaaaaaggatgaaacagacaacaaatatcacatgtaacaccataacattcttacaaaatcaacagctaagtaatcaaaacgtaacctaactgtgattacaagcttcgaacaaacaaatgtttgcagaagaaaagctcataaacattagtacatgaaactcattctttgatgactatccttgtcctaatgctgacaaatcaacaaaaagttcacatttttgtctactcaactcactgccaaacaaaaaatttacctatcaaaagagacaacattgtttgtctcaagagactcagctggaagaaaaagacaattcactgtcccacagccattatccaaacccaagaatcttactttcactacctcaactacgagaaaatgtaagcattactcgttccacatttcaaaaccctccacagattcttgtagcagcatcagcaacaaacaaatcacaatataagctaaaattcaacaccaatgcaagcaatcccaaaatcaaaaactagatgttcaaaagattgagaatttaaaaccttagccttggagatgatcttgacagcaataggatgatccttaatatctcccttcttaccacggccagaacaagtatgaccaaaatgccctcgacccacttctttccccaattcgtacttagcaccaaaattcttgccataaccaaagctcttatcaagcgactgctccggctcagttcctctctcctcagggatcggaccttccttaggcttcactccaagacgtttgatcaaagaagccttaatgtgtttggctggagaaggcggcgggaaaggccgtcggaaaaacctcctcggagtggaagttctggccggagaaggagaaacaccagaaggaagagggctcgctgatccgtgagggaaaggactaggccaaggactcggattcgatgacctagctggagtgttcttagctcgaccgtaattaaccggagttagaggctgaatctgattcccgtcgccggaaacaacataagtagtcgtgttagcttcttcttcaccattttgcttactctgattaaccttcccgtaacattgccccatctcccccacacaatcaaaaatcaaaagaattcaaaattgaagcaacatagagcaagtaacgaatcagatcaaaaggaagagagatccaaaattggaagaagaaaacgataaacgaaaggaatgagagaagaagaagaacagagacgacaaggtaagtgttaaaaacttagaagagacaaaagtgacagagagaacagaacggaacggaacggggacggtggtgtttttacgtagtagaaggattgagaaccgttggattaaaatctgagatgttgaaatgtaaacttggagatctcaaaccatttaactcgttctagtcactattcaacaacaactaccttcccctaatcaggcatttttagtcttatactatttgattaacaattttgttttgtgttttgtgaatatgaatatattttattttgtcctatgtctttttcttttcttattatatgatagttcgagttcttttgactctttcttttttcctttaattgttttgtcttttgttactttttgggctcttttgccgtttccttatataaatttgtaagacattttaaacaaaatcaaaattccgaaaacggagtttataaagaagattggattcatcaattccacgtggcttaatattattggatctaactaaaacagagtttcttccataacgattttttcacaacatatgatgcgacctggtcggatggttcggaaatggagaatatacggagtacgttatcctacgtgacaatatctgggccgttaaaaaaatcgcttttaaatgtgatttattgagaattaaacacaagggcgtgattacagctttttctcgaatttggaaacaatacttttcttttgtacttctaaacattttttttttaattagttatcactctttttcaggaaaagtatatattttcgacacaaaagttatattataaaaaaagttgaaatttttgtccaaaaaagaaagaaagaagaagttggaattaatatgttttatctgttaattaattaaataaatccatgtgtaaagcaatcacacggagatacaatattacaaagttattgttttttttctttgtgattaaattttctttacgttgaaatcaatatgttttatactagaatcttgttaaaaattgtaataattttctgtgattgtgttttcacttttttctttagagatctctcgtactaaaattagggtgacactaaatccaattatgaaattaaattatagtggtaattaataggtaaagcgacgtctatgaggagatttaacacaaacattactatcaacttatcaaataggtaagaagcagtttttctttaaatttattttgaaagataaaccttgatgtaataaattaaacaaattgaaagtttagaagttaccgtttgtttgtatcagcagacattaggaaatatatggtcatttacaccaataattgtccataaagccgaacaaatgggtaataatataattttaaagtatgtcgaaaatagaaggaaaataaataaatgtaaatggggaatagaatccaccttcaatattctatggtattttacaaaatattgaaccgacttaaagtaagtccaacaacatgcatttgtttagtttaattggatttattatacaccaaaattattgtgattggagtacattttttatacaaattacaaaactcaaggctaacatcgattacctcagaagtcgacaaatatttcgttaaaaaatagagaaagtgaaaaaatcttgtattttctgtaaattttagcgtatgtattaatttgttattaccgtcatctgatatcatagcgtatgttttaagaactcttcgtttggatttatgtccaatggtcaatgctcattcatattaatatatttcttgtcagcagtttgataatataataaacatgtgtctaaaaatatttatcaaattcaccattcaaaaatgagttataacttatacgacacaatatttcctttcaagtttattttcacaactacttcgtaaattaaacaaatggtaaaccacgaaaaaaatggtagatttgttgtcatcctaattgttagaatttgttttaagttatgttggtaaatattttgcagaaattgattaaataataataatatccccttatgagcccgaaacaatcgagcccagcttgtcgttcacaatgtagatcttatccttaattttcaaaggaaaacagttcagcccagtataggcccaatatcaacccgcttctaggcctaatcctaaacatgaaccaactttgagaaatataaccttttttttgtcattcagctgaatatttaccatctaaactattcaatcaaagcatgattgataaattaataaattatatacaataaaatttgagaccacaatttttcactaagaacattacgacaatgtttatagttaccaaattttggttttgttttaatttcttaagttagtaataaatactgacagcatgagcaatataactgatcagtatacatatcttaaggattaaatcaaacgaaacattcaaaaaggcacttgtctctctagacactagctagttggtgtggtttcggttaaggtcgttgccacaacacctaaatatagtgacgaaacaaattaagaatccaagagtaactttgaagctaacattattaaacaatcatacgaatatatgtcaatatcacttactatatttaaacttaataattattagaagcccttttctatatatacatgcgtgtatgttgtattgttatatataaataaaaagtacacttatttacttaaaacaacgaaaatattttatatttttgcttctgcaagaagcatgcagtcgaacatatggacctgcgttctttggagttgttggattgttggaatcatatgataatttcagcagacgcctatacattaatacttttcattgtgattttttgtattatatatatggactaactatctgacactgtaacactacgtgtaataactataatttttttagtttataaacaaatggggtctaataacttgaaatgtactcttcaatgtgtgaatccagccaaatttggtcattataaactattttttgttatattatctagtgtttcatttattggcatcccaactagaaaaatgatatatatgaacaaacaaaatataaacaatattttacttgttacgttttggccttacactttttaaaattgaaatgactaaacccatttgcattgcatcagcattagtggtttatttattgttaagtatcaaagccatctctgctcatagattccgcgcatgcgtttgtacctccactaaccatctcaatatttatttcctttggtatttgatctctattataccaacttatttttttacatatataaaagagatattaccaaatatgttgaatctaaaaatattaaccactaaacttagatataccttaacttcgtgaatatacatatacttgtataagtattattaataaaacataaaacaaaatgactatacatgaacgaacacatcttttatcgtatatcatttcatatgttttccaataatagatgttttggaaaatttaaatttttatacaaatacaaaaaaaatatgcaaattttatataacactttcaatgttattctattagttagagatttagagttgaaatacttaatttaaataactaacaactaataattaactataaaacaaagtgtattgcattgcaatttgtaaaaatgttcttcgtatttatataatgtctaaaacatacaactttataaaacgagtgagtattgcagatatcttactgcaataatgccgacaaaaaatataaaagtaaaaatcttactgcattaggtatgctttcgaaagttaaaagttttcaagtggcaaacatttgtccgcctagacaggaataaaacaaaaaaaatattcataaaaccaaaactgttgcttttactaaagaagactttatgctacatttttaacaaaaaaaaacaaaaaaactttatgctaaattttatattttaaatgtgacaattaacaggtaacaacacgctggaaaaccagcagagatattaaatccggttaaggcttaatatttactgcttacatttccagtgacaatatagagaatctaacattaaattatatgaacatgagattaataaactcactatagtaaaataagcaggagacatcacgtgaagcgtcggattgtttgtcataatgtcttcatcgtacggcaacgcgatgaattgaaacagaagacatcacgtgaaccagtgctacatggttaactcaatcattaacggcgtatattttcttgtattgattcttctccggatcgttaactatgctcccgatttaacaccgtcagttcagtatttatacggcgcaataaattacgataatgtagcctcttgagagaatgttttgcgggttggactttggagaagaaaacaatcatataacctatctatataaaatcgagtagaacgagaaataaaattattgtaaagcgagagtgcattaggattatgtggtctaattatgaaagaaaaaagattatgccaataatgatgatatcgaataaacaccagcacgatggttttctaataatccacaactaaacaaacgtaaggcctttatttatctatttttatgttaatcttgaactatcgaagcacgacttgagctatctatgagttattacaaaaatatgatgtcgtcagtttgtcaccgagggcttattaattagataaattacaaaccaatttttgtccttcatataatttcatttaacggatcatgaaaattaagaatcaatacgatacaaaatgcataattgtgtatttgacgtgataaaagaacaacgaaccaatgcacatgtaaccatgtgataacgtatcccccgaaaacaaaaaaaaatagccaagacactacagcgaagtcgtcttttgtgatgtcgattctatatcgtcgcccccacttacaacgacgtcgtataggtttaatcatcaatcatggtttcatttataaacaatccaacaaaaaaaactttgtatacgttctaattgataaaacaaaattaaaaaagagagggatggatcctaacactgagttacagagacattagagacaaatttgcttgtgacttaactaggtcaatataaaacaaaatcaaagaaagttccaaaaaacgacactgactcgtatgtcccccattcttacttgtcacccatctaatctaaccatctcctaggcagcttcacgagccgtagtctaatctaaaatcttatcattagacatttctatatatattttaatttctttacctttttacaccactgtagaaaaccacgaattttactccataagttgatatcattttcatttacgtctccgtcactctttctccctatccactaaacacagatcccaaaaaagaaataaacgagtaaaaaatgtaaagaaacgtccctttgtttctacgcgattttctgtaaattttccttcgttttctcgcagtttctttctcaccaaacaaacccttatatcactctatctctttctttctctcacattcaaagcttcttcttcttaactctacccctaacgtcctctcatcttctctggcagaacagaaaacgatgactaacttctcccgatccaaatccaccggaactatcgggttcccggagtttaaacccactcgacccggtccagacaaatacgagaacatccacaacgatgacgacgagtacgaagaaggacatagcactacgagtacagactactacgacgcttcaacgccgttgagctcacacgcgtcaagatccgggaacgggtccggctcgggtcagttaacggtcgtagaccttcttgcggcggttctgaggaagtcgttggtgatgtcgtgtgcgatggagagaggggaagatgacgtggtggcgtctatggatataggttggccgacggaggttaagcacgtgagtcacgtgacttttgatcggttcaatggttttcttggtcttccttctgagctcgaaccggaggttcctcctcgagctcctagcgccaggtccgttattaattaattattatcccaaagatgagtaatattccaaacaaaaaatgaatttaatattttattccatatatattgaaaaaagattatgatatgaggaattaaataaatattttcctagctggaaatctgtatatggcatgttactgtgttgggtagaatcattaagatggttgttgtttggatttaaatgcatgattacgacactcgtttcttcacaaaagaagattctctttttgtttttttttctctcttcaaagattttcaatggtatgtaaagtcaataaccatttattcaaacaatgaaactatttagacataaatttggtctttaatcaactcatgaagtagtggttgaatgacacatcctggaattggggattagtgtttaagctttcacaacataatgatattatttttgggctttccctagagattggtttgtatgatgatacatggagctctaataagtttggtttgtatagaagatacaaacttttgggtcctatggagatatactaacagaaacacgattacacaacaaatttctcataaaaaaaaaagtaaacaatttgtaaaatcgaatttttcccctaatatgtacggctaaaagaatggaaatcatgaatttttcaaaaagatataattggtcttcttgaattgtgaaacttatggctttccgtacgtagatggatttgtgaagtaaaagagtgactgattatttttgatgatacttgtgagtttcactaagttggtgactttgtatatgatataatgattggttctttctaacgattgagcttatatgttttctctagatttatttctataagagtaaaatataggtttttatatgatctaacatattggtttttctatgagtaaagatttcttattttaattcagtgtaagtgtatttggagtatcggcgaagtcaatgcaatgctcttacgacgacagaggaaatagtgtcccaacaatccttctcaggatgcaaaaacgtctatacactgaaggaggtcttaaagtaagtctctaccctcttctgttccgtgaaaatttcggattagtttggaaaagagtttgatataatgtgtgattgtttatttaccttaaggcagaaggaattttccgaataaatccagacaacggcaaagaagagcatgtccgtagacagttgaactgtggtgtggtaccacgtggaattgatgttcattgcttggcgggtttaataaaggttgaaaaaggaaagatttaaattagtttctataacattttaagttcaaaaggtttgatgtttgctgttgttgaatttcggattaaattaggcgtggttcagggagctacctacaggagtgcttgatgtgttgacaccagagcaagtaatgaggtgtaacacggaggaggattgtagccggctagtgatacttcttcctccggttgaatctgcgattcttgattgggccatcggtctaatggcggatgtggtggagcatgaacagtttaacaaaatgaatgctcgcaatgtagctatggtctttgctccaaatatgactcaagtcagtaataaaattgaattttcttttaatgaaacagttgattctttagttatatagttttgaatctcatgaaaatgttttgatgttgtagatggcagatcctttaactgcactcatccacgcagtgcaagtgatgaactttctcaagactttgatcttaatgaacctcaaagaaagggaaaacgcagacgcgaaagcaaggtggctcaagaaacaaacatctgatccatcagaagaatgggaatcacaacactccgagatattaagccctgagaaaccaaacaataataaccctaagttcttgagagtggctactctgtgtaggctagaggctgacaatgaagaagagttttggaatataaagaagagaaacgatcatgaaggtgttttagatacttcatcgggtaatggaaatattggaccggtacaaaggttgtgtaagcatccattgtttcagttaagcaaatccaccaagaaagcttttgtaagtaatcgagatgaaggaagaaaaggacgagaagcttggagttcacgtctctcttctttgccttggtaaaattttcttacctcactttatttttcatgtttttgagagtgtaaaaaatattgtgaaatatgattataggtgttagttgtttgaaaatagggataaatttacatccaatcaattcagaaatggaaacaaatgtatcctagttactttctgagagaaaactcatactctattcacaaaaacagagcattccaacaacagtcataacagagttgtcgtctgtttctattagcgaattttaaagaattgatatcgtatgtagaatatcaggcgatatttagaaaaatcagatcaaagaaggttatatgagcatatgaccactagaccggctagtatcaaaatattccaggtaattaagtctcaaaatcagatatagatcttgtaagctgtgttagatatttaatttgagattcttgaaacaaataccaaaaaataacaaaattcaaatctcaataattgttggaagaatgttcccgtacatccgaattaaatcacgcattcaaagaagtaacttttttagtaattaatgcatatattaaggtcgtcctagagtggggaatgtggctaaaataagtttgaccactgtttcatttgaaattattccttgttaatcttgatttctatttaaatgcttgaaagcatttattctccaattcttcttacactataaacttaaaatgtttttttttaaaacgaaacattgattttattaaaaacaaaagaaaagttgttttaaaacgctgttttaatttattgactagatcataacccgtgctatacagcacgggcattaatattttgtataaattaaattgtatactttgtttgaattacataagaaatagtatagtataaaagtgatgccataatatttttcaatgttttactatttacatataatactgcattggattgactttgtttaaaaatgttattgttataataaatacaacatatgtagttttaagtaaatgtgtaaaatttgtatagaagttattttggtaagaaacatgtttcctttgtattagaggatctaatttttggcctaacttagaattagtctttgtatagtattttggttatatttgtggacttaattggggcctatattagattatctttaatagggctgacgaaaaaacggacccgataaccaacccaatacccgaaccaaaaaatcgggttagggcgggttaaaattttaggaaatttccttattgggtagagttttactaaacccgtggatatccgattggaccggaaattatccgttatctaaaaagagtattcaaaaacccaaacattaatttaatatccaaaatattaattatatgatattattttatttgattttaaatatatagtaaactgcgagttgtatatgttttcttgatattatttatattgtttagtgtttaaaattatacacttgtattttgattgttaattttagagtttcacctgtagtataccatcttatattaatatcgatttaaacccgtcaattctaggattttccagcttgtattaaaaattgaatcacatcatacacataaaaaaatctaatatgttattaattattgttgtatataagattataaattcttaaaataatatgcatgaaattgaatataaatatttaaattatgacccagtacttagtaataaattttcttaaatctatttttgacccgttataatattttttcatgtattgaacagtttatattcgtttttaaaagtttaaattatggcatatgcgaaaaaactctaattatttttttataacgatgatattattttttcgcaaaaatagaatcatataaagatgagaggtgaactataataattaataaaaaattaatatgataatttagatatcaaatcttatttgttgattttaattggttaattttttgaaaattaataatgtatttcgttttttaatgaaatttaattaattaaattagtatttgactttttaatttttaaagaaatgaattaatttactctttaaattttatttctaatggcatacctatgtaattacttacaaaaaataaggttacatttaaaatgtacttcccaaataatatagaaggatgtgaaactagataaaaaaacgttgtattatcggtcagatttttcttttacgttttatttattttcctttttattaacgttttcgtcatgtttcaacttcaggcagttacaacttacaacagtttttaacaaaatagaaataaattagaaagcgatttccagctacacaagtaacaaaaatttgaagattatacttaaaaagagagagagatattcatctccccaaatttaaagagacatttcaaaattgaactagcgaatgcaataaatactaggaaatatattcgtagctcctttaccctatgataattaatattcagtcatctactattctactttctttgttattataagaagaagtagaattacattaaaatctgtgaacatttgagtgttaaataaagtgaagcttcgttaagtttacctaccattcctatttctttgtttttcatgacattttactagttgaatgctaaccaaaattctttgatcagatctaaactaaatataatatttgtaaccgtaaaatataatgtgaagagagtactgtacatagtgaatatattcatattccttttcaagaaaatactagaacattcatacacatctttaaaaattactagattctagtcacttggcataagcaaaccaagctatccagccaaataattagtgttgggctagtggtgaacgtcatgcgaatagtctggataccctagtttgagtttaagttgagagggtttctaaacgatttttggaaatacattaactttggttcagactttctcgattaattaccattaaaaatcaaaaggtcaatgttgtcgaaaatgtaaaagtataggcttcaaatagtacaatggtacaatcaatgcccaacgaaacgaacgaagcatatgaaacaaatatagtggtagatacatgtgatcgtgtatgattagaatttgctactctcgaattatttctgtttagtttctagagagtttggttggtttactatttgcagatagatcatggagaatgctacttcgacctcaatctctgggaaccatatactcactaatcatcttcaaacgatttgtcccaaaacaacgtatattactaactgcgtttgatgttttgaatatgtatgataaggttaaacatatagagcgtatagattttcaaaagcatggtagctgttggtgaaaatgcatggcttattagtgtttcttttagagaagctaacgttgtatatagcattaatttacatatctaattttgtcaattgtaatgagactttggatacaacaacatccggctgcgaaataattgtgactttatatgtatttttaataaattaaatggtccaactaacacagaaaacgtacgagtacactgtctcaatatttgtttctcattggtccacgtccaacttggccagccactgaccacttcaactacaatttaaaatgaactgacaaatctccaaccaaacactgacccgtaataaattctatctatctttagagacttcgagtcctttcccttttctactttcctcttttggattcattaattaactacacaaatcaatttgaggaaaatcacatgattctaacacacttctttcaggtaaagtgtcaaaagtttcacagaccatatcaattcaaatactccatgcgaaattaatttattaatgctatgaaagtgtgcaaccggtgcacccatgggaaacaatcataacacaaataattggtatacatattttgtaataaacatggtaacaattagaatggttaaaatgtttaaacagtgaattgagataagttttaactcgtgatcagaactatttttatgctcttttgtttaaaatggtcgtattcatgtgttcttatacgtataaagtcacaaaaagacgaccattttttaaaagtgcgttcacctatttgtacaacttgcggtaacgattttgtgttttaataaacggtaaccttaaaacgcagaccacattttccgcggcacaaacgcgcttaacgccatctctataaattaaaacccacccaatgcccaatattttctcatatgttcattgcaatggcagatttcaaaattcttttgcttatactcatccttatatctctctttgaacttgatctacttcattttcaccatgacttcttctctccttttccggtcaagatcggtttactcctgatatccatcttcttctatgcctactcaaccacccggtctaaaccggtttacctagtggatttctcatgtcaccaacccacggattcttgcaaaatctcatccgaaacgttcttcaacatggccaaaggcgctcaactctacaccgatgaaacaatccaattcatgacgaggatattaaaccggtccggtttaggagacgatacgtactccccacgttgcatgttaacctctccaccaactccatcaatgtacgaggcgagacatgaatccgaattagttatcttcggagctcttaactcactattcaagaaaaccggaatcgaaccgagagaagtcggaatcttcattgtaaactgcagcttgtttaaccctaacccatctctctcgtccatgatcgtaaaccggtacaagcttaaaaccgacgtcaaaacttacaatctctccggtatgggatgcagcgccggcgcaatctccgtcgacctcgccacaaatctactaaaggcaaaccctaatacctacgcagttattgttagtacggagaacatgaccctaagcatgtatcgaggcaacgaccggtcaatgttagtccctaactgtctattccgagtaggtggcgctgcggttatgctctcaaaccggagtcaagaccgagtccggtctaagtacgaattgactcatattgtaaggactcacaaaggctctagcgataaacactacacttgtgctgaacaaaaagaagatagtaaaggtatcgttggagtcgcactctctaaagaactaacggttgttgctggtgactcgttaaagacgaatctaacagcacttggtccgcttgtgttgcctttatctgaaaaactccggtttatcctctttttggtaaagagtaagcttttccggttaaaggttagtccatatgttccggattttaaactatgtttcaagcatttctgtattcacgctggtggtagagcgttacttgacgcggttgaaaaaggtcttggacttagtgagtttgatcttgagccgtctcggatgactttgcaccgctttggaaacacttcaagctcgtcgctgtggtacgagctggcttacgtggaggctaaatgtcgggtcaaacgaggagatagggtttggcagttggcgtttgggtcgggttttaaatgtaatagtattgtgtggagagcgttgagaacgattccggctaacgagtcattggtgggtaacccgtggggtgactcggttcataagtatccagttcacgtgacctaagttttaagtaatactactacgcgtgtgaagtcacgttataagttatcataagtcaacaatatgttattagctttctattaaagtgtagtttttttttttttttccccacaaatatgtattatttgcttgtttttgccaacaatttggtctctatttcttgaatatgaaaatcgaggaatttttatatattgacaaacaagtcgattatttttgttatggtttgaactttgatgtttacaaaaaaaactcatttagtaagacacataatgttgttctactgaggaaaatattatattttcatgcaatggtttcggtttgtcacaaaactcattttatttaaaagccggatgaatttaatgggcctaatataaaaggcccaataagccactggttagagtatatgtggactggtttcaccaccgccgcaaaaagggagactgagataaattcgtacagcaatcggagttactatgtggacagtgaaactggcggcgatgccggttcaatttctcatggagcaatctccgttggctatttacagccaccaccaccgcataaagtaatgatcaagaattcttctgaaattttctgagctcaatttcttattctgtgaattgatttgtggcaagagcgactccatgggaattgccgaattggagccatctcgtctctgctgcttatgcaacaggtaacttttcaattgctagtttgtcgtttgtgtttttaatttcggttcggtttacatggttttgaaaaattcaattgatttcggttgggtttgaattggaattaaaggagaaaaacactgaaatcacgcactcgaggctttttttgaaaggagcgagtgtgtttcaaaacaagccatttggtgggttagaacccacagaaaacgtatacacgcgctcatcacgcgattggtgagagtgggtgtgaaatcgcccgagaggtgagagtggagtatgacatggaacgctctgattggcttataaaataaaaatagtagagatgttgctcctcccttcctatgtttatatttatttacttctcttttccgaagtatcaaaactgttctcaaacaaaaagctt

SEQ ID NO: 385 - DNA, 68415 bp, Arabidopsis thaliana
gaattcttctgaaattttctgagctcaatttcttattctgtgaattgatttgtggcaagagcgactccatgggaattgccgaattggagccatctcgtctctgctgcttatgcaacaggtaacttttcaattgctagtttgtcgtttgtgtttttaatttcggttcggtttacatggttttgaaaaattcaattgatttcggttgggtttgaattggaattaaaggagaaaaacactgaaatcacgcactcgaggctttttttgaaaggagcgagtgtgtttcaaaacaagccatttggtgggttagaacccacagaaaacgtatacacgcgctcatcacgcgattggtgagagtgggtgtgaaatcgcccgagaggtgagagtggagtatgacatggaacgctctgattggcttataaaataaaaatagtagagatgttgctcctcccttcctatgtttatatttatttacttctcttttccgaagtatcaaaactgttctcaaacaaaaagcttggaacaaaattaaaaccaatgcaattcatatagaagagctaaagcgttttgtttttttatggctaagattttgtgaatggtcttctcattttcaaggatgttcaacttcaacaacatagcatggaactttctttgttgatgttaatctctaacatgtctggtggaaaaaaatcacatactcagagggagtgtatcacttgccttgattatcctcattcttttggtgactttactcctggtttctgaggaaaacccgcttcatgattctctttttgatgtataacgtcagttttcatcttcttcaggtatttatttgctcttcacagcttttagtattcatttcttggctatgtcttatactattcagtaacattatgatccaaagcttttgaaatctaaagaatttatagtctggttttgtgatactttttagtttcctattcatgttccccattcataatttcttgacaaggttggtatggaagattttctccaatgagacattcttatgcatgttcctttttctgtaatgtgatgtaagtagattgcattttgtgagaatatgtggtagcagagcaagtttctgaaagtatctcaaatttgcttactacaatctttgcttttgttttttcttagttagcagaacaagaccatagcattcataggagactcattgggacgacaacagttttaatccctgatgtgtatggccagcggtggtcccattccaagatgtaaacctttcaagcatacatacgaaaaggagattgtcatagatccttcaccgatcagtccacactttttccagcctcgtctgcctggatttcacagccacctcgtaatctctctctcctttactctctttctctgatatgcatgaatttgtttgtttcatctctctctggatttctttttttgcagaacattctgataagttcagagttgttctctcttatcacattcccatggatttcttctcaggcacatagatggaacaacaaatgagagcaatgtggtggtgaaactgagatcaaacgcttctgatataatctgggaagtgaagatggagggacgaagactcatccaaggctggctaaagctccccaccagccgagtcggcgacgtagttgttttcagacatgatggagatttgttgttcattgtcacttcttttggaccaagctgctatgagattcggtatgaaccgatgcaacacctgttctccagctgtgttcttcttctaaaacgagccaaaacagattcttgacactaactctcacaccatacaatctcaacaagtataaactggtaagtaagtgttcatcaatgtttcaacattgttgtcggagtttgtaatgttttcgagttctttatgggcagcctactaccggggacaattctgatggcggatggtgtcgagaaagtgaggaagataacgcttgtggatcgatacggtgtcaaaagggagatgagtcttaaaccagaggacagatatggaagaatgagttctagccatgatacttccctgtggtccatagatcttaaagggaaagtgaatggtgcagtagagacctgcggtgtcactttccatcgcttggacacttactaaaacttcagtgatcaacacattttagacaactttgatccaaaagcctgcggatgggcttacgggatggacatcttcgacctgaaagaatggtaaaatgcagataagctcttcttcttgacaactaaaacttatgacatcgaaccttgtaagttagctcttcttcttgacaagtgtctgatactcatcattcatctccaaaatgctgattaaatccagcattctcataaccaggccgcttctatctctatctcccacagaaagactagcattggtagcctaatgtcaatgtctgttagaccatcaatcacttctgcttttgttccatttaacatcatcatctccatttataaacagtttggttcagaaccatcatcttcatctcttcttttgtttgtaaaagagacgtgtataataagatagatcgtcccggtcccacataatctaacaaacttaacgtttggattagatcatcaccgtccgatatctcacagttgaaagtaaacagattttcttatattttggtcaaccataataagaaaaggaagctaagcgttgaagaaaaaaggaaacaatcgaaagtttcctttttttgttttttttaagaaaccctaatgcttataaataaacacctgaatctcctaacatcaccactcattctctcttcttccatgagaaatcaaaattcatttgtgaattgatttgtggcaagttaaaaaagcttcgaacatagagtaataatttggctctcttatgaattgcatttggtttggactatatgttatctgtgtggaatcaaatcaaaattatcaatctggttcgtcggagttggatcaatagtggaagcgacaattgctagtttgtcgtttgtgtttttaatttcggttcggtttacatggttttgaaaaattcaattgatttcggttgggtttgaattggaattaaaggagaaaaacactgaaatcacgcactcgaggctttttttgaaaggagcgagtgtgtttcaaaacaagccatttggtgggttagaacccacagaaaacgtatacacgcgctcatcacgcgattggtgagagtgggtgtgaaatcgcccgagaggtgagagtggggtatgacatggaacgctctgattggcttataaaataaaaatagttgagatgttgctcctcccttcctatgtttatatttatttacttctcctttcagaagtatcaaaccaatgcaattcatagaagagctaaaacgtttttttttttttttaatgattcaatgaatgactgacaaagattttgtgactggtcttttcaaaaatcttgaacttcaacaacatagcaaggaacatagaaaataaaacagaccacccgaaacagagcaagtaaagaaaccgaacacaaaaaagcagagcacaaaactgaattttcttttatttaaggccgatagattttatggggctaatacaaaaagcccaatatgtcactgactagtatatgtggggctggattcaccacaaccgcggaaaaaagtgagagagataaattcgcacaagcaaatcggagttactatgtggaccgtgaaaccggcggcgatgccggttcaatttcatatgagacccaccgtagcaacttccgtcgcctattcacagccaccaccacataattacgacggaatccaccgtcgattcattaacgttccgacgaaatcacaaacttccgaatccgtcggcggattaggccaacaaatcctcctccgcaccgtcgattcgaacccaagaaaaccaatcccgaaggagacagagattagcggatcagacgtgctctgggcgattcagagagcgacggctcagaggaagagaacaaacgccggtaaaaagaagacgaagaatcggctcagcggtgtggagctatcatcctctgcgggcgagcccactggagataacggtgttgattacagtaacgtgacgccgttaaggatcaagagtgattggggtcacagattagaggaattcgagaagcttctcaaagagtttcaaaacacggaactttgactttgacctttttcctttgccacatcacatatattaaatccacaaagtatttttctgtaaattttccaattttaatttgtacatgtaaattttccaatatcgttattgtgttaacgagtactctgtaaaatttatgaaaatatcggacgagcatgtaaatgattattgtcattagtaagagaccaacacactagcatgtagataattattgagcaataataacgttacttaggtacatgtgtacagactctagcctctttgtaaacttttcctggtcgacacaaatagcctttggacggagcacaatgagcatcatctgaacatatacacaaaccctccaatgcacatccatcttttactatcgtcgggtttcctttgatccctaggatctgatccgtccattcgctcgagaataaaccattcggatcataactctcttttactttcaagaatgctggagcattcttgtactttttaatcactccatcaaacgctaagtttctattcttaccccaatgtggtaatgcattatacttgagcaacgcaatttgctcgatttcttcgataaaatcttcatagagtcgcggtgttaacggatcattggctcggtaatatgttatatcaaagtctatggcttccgtttcttttccaagataagccggagaggatgtgacataacgcattaggatgccatagtagagttcaagcccgcatagagattttgaatcgatcttgagaagagatttgatgtcgttgatgaaacttttaacttgtgtgagaggaatactgaacgttgtttgatgataaaatacgcctttaacacgtgagtcccatgcacaagctgaggtcaatttatcttccagaccatctagacatgatcctgacgacatcatgcgattttggcttccaatgaccggatagccggtgaatgtaatacctaatgcgccgttgaatattcgaaacataaaggaggagtgagttaatattcagtgtgagatcgaccatgtattaatgtaacggaatttgttaattaccattgtttgtcaaaccgtatgaggtagaaaacagcgtagatgaaattgttgttgctgtcacacacttcccatgggcatctctcaatgtctcttgcgtctcctctacattattgtacaacgaaacgaattaaaacaaaattttatacaatttttctaatatgtctctcttacttttctggtagtatatatataagcgacagaaagatgttgcgaaaacaaaaaatgatatagccagatgatatttgtaataatcgttagaatttcaaaaaaaaatcaaaagatatatgccgatgcaaaacatatatatatattatattaactctttaaaagtttgaaaaataaagatagctagataagaacctgatgatcttgtggtggctagtactgcagagagttgtgaacgaaacggaaagaaatcatacaagccgttgcccaacgtattgaccgctactcggtcgtccattcgatacacaactttaccttggctcggtagccatacaaaatccgcaaactcatgttttttcccgaatgttagagcttcatcattgaaatctaaatcgtttctcataacatactttaacgatcttttgaacatcggttgtaattcaaaagtcaccttatcacgaaaaaaatatacatacagtgaaacaattaaaaagggtttgaacatatttatggcaataatattttttgtagtaaaatccaaatatgattttctattttttttggcaaatatatatatgaaaattgaattgatctaacctgagagataacgccaagaacgccaagagaaaccttagctgcgttaaactcgttaggagtcgtagtctcgcttaaaactctaatctttgcaaacccgtcgttgaccgaaccaggactaaccatcctgatctcggtcacgtaatcatggaccgcacttcctttaccccacaatgagctaccgtgagcaccggtccccatcataccacccacggttactccccaccaatacggtgcataaggcaacgccaatccaactttagctgcttcagcgattaattgcctaagcgtcacgccactctcaactgtcaaagtcatggccttcgcatcggcttgcaccgtgtggtttagaaactttgtgctaatgaacaatccgtcgtttccatcagtgcacgtgagcttagggatgctatgggaatatcgagtggttacacgcattttccgtccggctttagtagctgcagcgacgatagatacaagctcggcttcagttgttgggtaagccacgttggcggctctacacgtggagcggtctgggaaggctcctaatgagttggtgactatacagttcgtgtttcctgacacacatttaacaggatcttcgggtggtgttgagattaccgtgtgcacaagtgtaaataaacaatataacccgagaagggtgcgccaaaacgaacaataggaaggagaataaccaaatgccatggtttttattgagttttgtctaatggaggcgtttctaaatgtttggtatatatagtggttgtggcttaaaggccggttcagtgatgcatcatgctagcttgttgatattttacataaaatatgtttggttgataaattcataaaaggctggatgagatgcatcatgctagcgtgtaagatatataacgactaataacattcgatccattacttttgagctgtcaatgttagtttcatttatatcacatggtcttaaagacttgcaaaatcaagtaaatgtagattttctatattttcttttaacttggtttcatatattatggaaaccgtatccttgtatgtcagtgataacctcatcggcgctgccatgatttaatattatcattaaaaaatgtttcgatatttaatattttgcaaattgtgtatatatgttcaataaaaaaggatagacgtacgacgacttgcatagtttagtgggaatacttatttgactatatatatggcccattctatacgggcgtcaagggaaggcacgagacgttgcgcattttggggaggatggtttttgtttttcattcggtaataattataacaataattggggtgtggtcatgcgatatgatataaaaaataaaaattataattgtatcatcttaagaaactgtgtatgcacaaaatgataaaatcccccacatttactaggaaaacctatagctagccagaaccagaacagatatctactataactactcttccaattttcatagtaaaaggaacaagaatagatctgtggaatataaataaataaaagatcctcctccgcacggccgattgaaatgatttacgtactaacactatagcacgaatcaataaaacattattgttgcaacacaataacattattaggctcacaataaatattgacccacgcatatagacgatggctgttactgatataagaagcaatgaaaattaagaacttactgtttaaataacacttattatcccatcaacacgtgtacaaaccctagcctctttgtacacttttcccggtcgacacaaatagcctttcgccggagcacaatgagcatccttcgaacatatacacaaaccctccaatgcacacccatcttttactattgacgcgtttcctttaattcctaggatctgatctgtccattcgctcgagaataaaccttttggatcataactatcttttactttcaagaatgcgggtgcgttgttgtactttctaatcactccatcaaacgccaagtttctgttcttaccccaatgtggcaatgcgttatatttgaacaatgcaatttgctcgatttcttcgatgaaatcttcgtagagtcgcggtgttaacgggtctttagctcggtaatatgttatgtcaaagtctagggcttcggtttctttccctagataagcgggagatgatgtgacatagcgcattagaataccatagtgaagctcaaggccacacagagatttttgttcgatctttacaagtgatttgatgtcgctgataaaacttttaacttgggtgagagggacactcaaagttgtttgatgaaaaaattcgccttttatacgtgagtcccatgcacacgccgtgatcaatccatcttgaaggctgtctagacacgatcctgacgacatcatacggttttggcttccaacgacaggataaccagtgaatataatgcctattgaaacataaaggtaggtaagcaagaatattctctgtacgtaaaatcaatgaaaacgtgtaagtaaaatgaaaagaaataattaccattgttggtcaaaccgtatgagggagcaaacagtgtagatgaaattattgtggctcccacacacttcccattcgcatctctgaacctctcttgcgtctcctcttgattattattataaacgaaaacaaattaaagttacgtgtagaattctgtatatcaacattttgttttcctgataatctcttatttaaatatcggtagttgcctagttggatccaagagttataattttatatacaaattcaaaaataacctgattattttgttattggttaactaatggttctattaagggttatggaccaactacttctaataaggccactgaaaatttatcttgtgtttttggttaactaatggtttaaatttaatacctaaaaaatttaataggacttaaatgaaaatgaaacctactgagtaaaaaatttcatacaaaatgggagtctggatcggataatgtttttctttgatttaaagataaactttatggacaaaattgtacccttttttctttgtttttatacgaacaagattgtacctttacgttcagtttttaaaagtcaacgcaaacccttagaaaaaggatagacgagaagtacctgatgttcgtatgatggctattgccgcagagagttgtgaacggaatggcaagaaatcgaacaaaccattgcccgatgtgttgaccgctactcggtcatctcttcgatacaccacttttccttggcttggtaaccatatgaaatccgcaaactcgtgtttctttccaaaagtaacggcttgatcttcaaaatccgaatcgtttctcatagtatatgtcagcgatctcttgaacatcggttgcaattcaaaagttacctttaaaaaaacaaaaacaaaatgtaaacatctaaagaaaatggcctagaaatatgatatagctttgtagtaaaaactgaaactgaaattttaagttttctaacctgagagataacgccaaggacgccaagagaaaccttagccgcgttaaactcgttaggagtcgtagtctcgcttaaaattctaatctttgcaaacccttcgttgaccgaaccaggactaaccatcctgatctcggtcacataatcatggactgcacttcctttaccccacaatgagctcccgtgagcaccggttcccatcataccaccaacggtcagcccccaccaatacggtgcataaggtaacgccaatccaactttagccgcttcaacgattaactgcctaagcgtcatgccactctcaaccgtcatggtcatggctgttgcatcggcttgtaccgtatggtttagaaactttgtgcttatgaacaaaccttcggttccgtcggtacacacgagcttagtaatgctatgggaatatcgagttgttacacgcattttccgtccggcttgagtggctgcagccacgacagagacaagctcggcttcagtttttgggtatgccacgttggcggctcgacatgtggacctgtctgggaaggctccgtatgagttagtgactgtacagttcgtgtttcctgacacacatttgacaggatcatcgggtggtgttgagacagccgtgtgcataagtgtaaatatataatataacccgactagcgtgcgatacgaaggaggaaaagtaaatgccatggggtttgattcagttttgttgaatcttaatttgttgtgatttgtgaatgtcggctttgtaaatatatttggtatatatagatattgtgtggcgttaaggcgggttcaatagtatttaaataaaatattatgtttagttaaatcaaaagaggttgagatgagatggttcatgcaatcttgtacgtaagagagtattaaccactaattaatcatattcgattattttataatattccattcatttttatggactgtcttcttaatttcatttctattacgttgtcttaaaagacttgaccatattcttatcaagtatcatagtctatggcaatctcattagtctttaatcaaaaaaaaaatattcttgtttagtcaaattattcacccggtgattttatgaaaattgaaaaaaccaacgatgacttagatattttagtgagctaatacatgtacacgataatttcaactactgtagtagcattatattaataactcaagtctgtaatgtcttgaattcatatattaagctatatatggccttgaatgtttgtacgtagtttttgaactaatttttagttttagttttttttccaaaatttattttatagtcattcaagatttaaattgaaaacaatttattaatctaagaaataaaaaactagtttttcagtgtttaactatttttcaaagaaaaactaaaatctgtaatttttaggacttgggatttttcctcaaaaatcatcaatcatattttttatttctttttttctaacgaaaatataatccattaacataaaaatcaaaaactaaataaagtaggacacccaacaaactaccattcaaatttttaagaaaaaaaataatctaaaactaaaaaataaaaaccaaaagccagaaaactattttaaaattatagacattcatggcctatatactacacccactagttgagttttattataataaaaaaacattagttgtggttttgtccaatatacagtgaataatcaattttatttgaaagaagataagatcgccaaggtacgcacgcctttcacaagccgttgccttcacacacaaagtaaatgattcaatgaaagtccatgggagtaatcttagtaaatgaaagtccatgggagtaatcttaataaatgaaagtcagtactagtcatagttcaaacttttctccaaattttttgataaatcctacagaatatatattactgcattgtgtaatgatatgtaatcttcaaatacatataatggtagcactaatctgaaacataatctaatgaatttaaaatcctatttaatttctaatacaaaaataaagttttaatagaaatagtgtttgtaagaaaataaatatcagatattgaagaaaaaaactagtcttccttttttttttttgttaaagggttttaaactattcttccttgcacacacatgtcagtatcttgaactttgcgaattttatttcgtattcggttcaaattttgaagtccacgatactcaatcctaaaattttatcttgttatttaaggtatatgtatatctcacaagtttttttttttttttttttggttttatatctcttaagtagtttatttgtcgtttgctaaaaaaaaagtacgtagtttatttgtcctcaattattaacatcattattgttttcgcaacaaagggtcttatttaaaaaaaaaaaaaaaaaaaacaaagggtcttatttgtagcgcaaggcagaaaatgacctaattaatgatttatgaacatgcgcatttggtaaaataaataataaacccataaccctcactcctcagtggaacaagtttcaagatacgacaccttaaaatgtactttgactttgattttttttctttctaattccttttcattagtcaaaagtagaaactaaccaagacatcgaaattattaggcatcgtgcctcacgatttttttttttttttttttctgcctcttacatttttattgctaccacaacattaacaataactcgtcatgataaatatcgaccacatataaagaagataagtatcttatatctaaaacaagcaatgaaaaattagtaatgaaaaaataaaaaagaagcaatgaagattagtaacttagtgattgaatcacacttatgtcatcagcacgtgtacataccctagcttctttgtagacttttcctggtcgacaaaaatatcctttggtcggagcacaatgagcatcctccgaacatacgcacaaaccctctaatgcgcatccatcttttattatcgtcacatttcctttgattcctaagatctgatcagtccattcgcttgagaataaacccattggatcatagctttcttttactttcaagaatgccggcacattcttgtactttttaatcactccatcaaacgctaagttcctgttcttaccccaatgcggcaaggcgttatacttgaacaacgcaatttgctcgatttcttcgataaaatcttcgtatagtcgcggtgataacggatctttggctcggtaatacgtgaggtcaaagtccaaagcctctgtttctttcccgagatacgccggagaagatgtgacataacgcattagaataccatcgtatagctcaagcacgcacaaagatttcgactctatcttgacaagagatttgatgtcgttgatgaaacttttgacttgcgtgagcggaatactgaaagttgtttggtggaagaattcactttttatacgtgagtcccatggacacgctgtgattaatccatcatgaagactgtctaggcatgatcctgacgacatcatacggttctggcttccaataaccggataaccggtaaatatcatgcctaaagccggtgaatgtttaaaccataataaaggtaggagtgacttaatattcgatcgatgtaaaatgatgcaaatgtacaagtaaaaataaacaaaagtttagttaaataccattgttggtcaaaccgtatgatgtagcaaacagtgtagacgtaattaatgtggctcccgcacacttcccattcgcatctctgaacctctcttgcgtctcctcttattttatacaaagcaacaataaataaaaggtcatgtataacatttaataaatagaaaactattcactattcagtgatatatatttaaagattgtgtatcatatgcaaacaataaataaggatgaacctgaggatcttatgatggctaatgcggcagaaagttgcgaacggaacggcatgaaatcgagcaaaccgttgcctgatgtgttgaccgctactcggtcgtccattcgatacaccactttgccttggcttggtaaccatatgaaatccgcaaactcatgtttcatcccaaatgttacggcttgatccccaaaatccgaatcatttctcatgacataccttaacgatctcttaaacatcggttgcaatttaagggttaccttttttgagtaaaaaaaaagtgttagagctatgactgatattgttacgtaataagaacaaaatatgaatttttaattgatctaacctgagagataaccccaagaacgccaagagaaaccttagcggcgttaaattctttaggcgttgtagtctctcttaaaactctaaccttggcaaagccgtcattgaccgaaccaggactaacaatcctgatctcggtcacgtaatcatggaccgcacttcctttaccccataatgagctcccgtgagcaccggtccccatcataccacccacggttagaccccaccaatatggtgcataaggcaacgccaatccaactttagccgcttcagcgattagctgcctaagtgtcacaccgctctcaaccgtcaaggtcatggccgttgcatcggttcgcaccgtgtggtttagaaactttgtacttataagcaaaccgtcggtcccgtcggtacacgcaagcttagtgatgctatgggaatatcgggtggttacacgcattttccgcccggctttagtggctgcagccacgacagagataagctcggcttcggttgttggataagccacattggcggctcgacacgtggaacggtctgggaaggctccatatgagtttgtaactgtacagttcgtgtttcccgacacacatttgacaggatcttcgggtggtgttgagatcgtagtgaagactagtgtagatatacagtgtactacgaaaatggtgcgccaaaatgcagcatttagggaaccatacgaaggagaggaagtaaatgccattaatgggggggcctcttttcaaacgtatattgcatttggtgtttttttgtgtgtgtagtagatagatatatacgtttggtgtatgtagaggttgtgtggcgtaaaaggacggtttagtgttacttagttaattatatctggttgataggaaaagaactgagatatgagatgcttgtaagataagattaatgatcatcttctctcattagtatttcaacgagaaatatttttgtctaaaaaaaataaaaatctatataccaaaacttatcacatctttttatacttatgcaaacaaagaatgttcagagaactttgtattgagccaatctctttaattaattttatgatatatccaatactatattattgaatatatatatatatatatatatatgattgtggtatatgagagacctcaatcaaaccaaaactaagccgatgaatttaaataaataaataaatttgataaaagttttaagtccacagattatatatgattgctatgtaaacattctaataaccacagaaatgtgttcagcagaaatcaaaagtaatatgtcccccatcaacatagcaatgaccagttgaccacataactactgtacgtactgtcacttggtaacaattaaaagttgtgcatgtatttttttggcttgctttattaattcgtaccaatcacatttgtttatttacggaagataagttttcaacttaaaattttacttaattgacaataaatggagagatctggagagtactatatcttatatatcatcaaattagaaatactttacttttttaaagttttgcaccattttttttttttttttggtttaataaattttgcgccaattataatgtttctttctgttacaaaattacaattgtaatcgttacgacaaataaatatactttatgcaggctgcttaatgttttgtgcagttaccatcactattcgtagttttccttttcacacaaagtaactaggaagaattgcaccacacggtccaaacctctaccgtagaatcttcacaaaaatatgatactacaagttataaatatattaggtttattgtatgttaagatattattagttgatttaccaaacaactcagtctgcctaactttaggtacgtacgtattaatcaaactagtggagccaaaaaaaaaaaaaaaaaaaacagtgagacacgcacgtattgaatattaccgtccacttgatttaatttattagaaaagtcagcatactgaacgtgtagttttccgactagtcaaatgtacgaacgaatataaagaaacgtgtaggtgtgtgtgtgtgtttctttttttggttttggctttgtataggttttcatatttttttacttttttgataaatgatattctagttttaaatttttagaaaaaataataattgtagtacatataagatagcattcggtcattcagcccaggcccagcattttacttgggagtagtataacccgttgcaatgcaaaaggaatgaactttcaaccagtctaaaacccaactatattagaaatcaaatgtaattatacaaacacttttcattgtttaagtgataacagttaaacaaatatgtttttatcaaatatataattttattataaaaaccatgcaaaagctttcaacaaacggtcatctctcaagtacttattagtggagcttctacttgaaaatcagttaaaacatatacttttatcacaaaacattatatataatgaatactgactagatttttaatatatatatatatatatatatatatgaatactgactagatttttaatatatatatatatatatgagtaatgcattaagaaaatgaaaataaccatatacgtttattaccactcgaaccttcttatgtcataaccccagaaattcaatgtcatgtgtaaacgaatacacatgattcatgttaactataattcgaatcaatttccataaaggcgaagcttcaagcataatagattctgacccaattgtaatcacatcaaaatgatgggaaattaaatacaaaaaagagaaaaattaaacagaagattccaatcacctttttattgattaatttctttcaaatttattgaaaaaaaaaaaacttttcacatttgaaacacaaaagcagactgttttttttttttttttgtaaaatcagactgttgtatatacattttttccgacatggatgttagacctcgttgggacgagcttgcactatcccatcgcacctaccctgaatcatcttcttggttattatattcttataaagagtcttacataaatattatctcgaccatcttttgttcatatatataccctcgttgttgaaaattgttagtccaataatcatcttcatgtagaattgtagatcgatgtcggcaataaattcgcattcggtgcattttctcaataaccattaaatttgtttatgacaacgctgcatggttgatggttcaaaaattaattagcttgatttggtttataaccctcccatggttattaaggtgtatggtttgattgcgaaagcaactcattccgaggttattataggtgattgagttggctatctctttctaattatgattttagtttttttttctccataatccttgtgggtttgttagagataagatatgtgtatgattaatggtgagaaatttaataaaggtaaaaagagcaaaatggttgagcgatatagacatcaaaggacagtgaattaaaggagcatcaaaaaaaaatcctaatatgccttgagagaatcatcctcgaaactcgttagtgtaagataaataagtaataaagtgagggaaaacgatgatggacttaggttaatttttgtcggcaaatccgttctcgtcggactttatctcccttgtgaagcggttttagcttttgtgtagtcacgatcggaaagagatggtgtgttatagtctgaagtatgctagtgtgtttgcatatacataatacatgcatgtataatatgaaactcctaacttttttattcaagtgacctttgatatttttagttatttacagagtctatacaccacgattatttatttcaacaagacaacaacaaatttaacttctatatgtatatactaattaataccgtggacacgtgcatggtaattttcggttccatgagatcaagtttcttatttatacaaattaggaaaaacaaatgtgaaggtttcacccagtacaaaagtgataacgtacgtaaagtattagtggccttttagtagtactacgtagttgaaaatttcagtccttataatatgtcttttactatagttagtaacccttcgaattttaatcaatgacatgtttatgtgtatatattaattatggcgttgaggatgaattgtcaatttttcgggaaggcatacttggataattgatctctcgacccatacctcaaaattatcattagaaattttgtgacaaaatagggaagtttcattaattatctaagggggacaatccccatattgtttatctccaaatgtcgggttataacttataatgacgtgtagaataagttcttattacagatggataagttgaatttttactctagatatatcgaaaagattatatgaagttttactaataatcggatgatcgttatgactcgagcttttcacagtaaataaatatttaaatatgtatcgcagaagagagtactagtcgtatttatagtcggcttggagcacatttgtataaattataaaacaatagtattatatagatgagcccaattttccacgtaaaatatatgacgaaaattaacaagagacaaataaactagtttttaaaaatcaaatataccacaagtatatatatgaaaccttaaactaccaatctaccataaacttataacttacaaagcttctttacaaaatacttttctatgatatttttaaaataaattcgaattttgatatgtaataccaaaaaatcaaacaaactaaagatggtacttgagaagacgggtatttatttgaccatagagagtatctcgttttctcggtcactacaaacatatatatgtatgcttttaatataaagacttcttaatttttgttttttttttgcataatggaagacgaattaaactcggattgattattctgatcaagaagaattaaatgaaaatccgaatttgctcaattatgtaattttgacatgttttttttttgttggtgcaaatgatacacatgtttaaagggtacataattataatcaataagagaatattaggttagcttatctttttgtactatataactcgatactatgtttgagattaatagattatgattgatttagaatttttatttatttaaataagtgtactatacgtcgtttgtttctccttgaataagaacaattgaaagcatactattatgtcgactgctattaatgatactcaatcataatctattaatctcaaacatacaattgacgactaatagtacttaattaagataacatagtccatcaatttctgtgcctactaaaacacatattttaatatgtatctatgaagataattagtgtattataatatatggctagaaaagacacaatgtcttgtatcaaaattgtctatcgccttttggtcgtaaaatattatgtagttcttgtaatttttaattatattttctaaattattttcaagattatgggcttataattttttttattttttttcacagaaaattaaaattttattgatggattagaaccttacaagagttgaattatataagttggcaagggaaaacactccttccaaagactaagccggcgagcacaatacatctcccgggaactaagatagatctaaaggggaaaaacccaaattaaataacaacaatgatactaaacctaaacttcccagatccattactaaaaaactcaaaactgaaaaacaaagtctaaatccaaagttattttaaaaaacagatctgagactagagatctaaccaaagaaaataaaatcaagactctccttaccacaaacggcggtgagacatcaaacaacaccccgaaacccaaaggacaaggtctcaagaagaaaggaaggagaactagatcttcaatggagagagatctgcatctgaggcgatgaaagatcgaaatgaacctgcctctgccatggttggaacggccagaactgaagctgcagacgaaggagacaaacaagcagcaaaactggaagagcaaaggatttagacttcacagatctagatctgtgaatttagaacagagaccgttggaagaaaataggattcagatcacattaaacccacaagaaaacgaaactaaagagattacaacaaagaaattccggttttggtgctgaaaaagccaccggaactggaaaccctaggcggggcggcgaagcttctcgtaatatgttttttttttcttctagaaggaaaactataaaattaaatggaagacattttgattattataatgaaatgtaatgctctccccaacaataacgaaatatctcctttttgagatctttattctcctcttttaaattcttatattaatctattttacaatatttcacataaccactgtaattatcacaaatctgactttcttttatatgtttcaacaactatatggtatgattatatctttttacacaaatgtgaaatgtcttatgtgtgtgtgcctctctctctttccctccatttccgttatccactaccattcgacacgtgacaaaatgggccaggcgatgacgatagagacgacgtcgtcgtattccatagctccatctccggtgtatattcctgtgttaaaccggcgtggtacgaagcggaccggtttaggctggggtacggagatcggacggaaggcaaagcgagatgatcatggcccacgtggctctcattgacggctgtaattgaatatgatgtgggtccgttaagctgcgaggccacgaggcggtctaaagccgcccagctagtaacaaagctagtgtcgaccacgttgctgacgtggatattatgattagtgtcgggagagcttacgtggcagttgttgattgcctgactgttagggctttcgaggtttgggagtttcatgaaagggtcaagatttagctcttctttacaagatctccccataagttcaagaaattggtcgagagtatcctcgttgaagatctgagatgatgtcgtcttcggcgtatctccgccgccgctcagggaagctcctccgacgggactgtttagggttttgtgaagattcttcttcttgaaaatacgacacaccacccatccttcgtcttgtgatgcttcccctataatactcacgaccttaaatattcaaaaatcaactaagatatattagcaaagttcatgttttgcactaatcccatttaggttaaaaccaaaaagaaaaagaaaattcatatttcagtttcatgtgcgtctgtatatgacaaaggagaaaagaaatatttgtgggaagaagtaactaaaactattatcattaaatattgggaatttaagaaaaaaataataacgaaaacgaatatgtgatagttttcataatgttattaaagaaaattacgatcatactttgcataaatattgttttttaaaatatattaattacctttatatatatattaattacatgatattttttacttgtacatcttatcatcagtaacaacttttataatggtcaatgaaataataattaatcaaaacaaaatcgagattgtgatgtaaaatgagatattcaaaaaagagaccaaatcctttgattgaataactcgtatttaggttatgatggaattaatacatacctcatgaacggtgacatcctcgggggaaataatgttgtcatcgagtctatattcatgcatgatccaatcagatttttggccgtgaggagctcggcctttgtagaaaacaagagtctttctcatcccaattctacggccattgctatatatgatcttgtcgcggccagttgctttccaaaatccagccgcagtggctctgttagttctcgttcccgtcggatattttttgtccttgtggctaaagaaataccagtcgttttgtggcgttgttcctattttacacatctctgcataacgacaaaaataatcagaagaaaaaaacttaaatagtaaattgtataataaccaaacctatgttggtctttgcagtaactaactccgaatatgaacaaacaacatcaacaactaagtgtagattctctgtactctagtcatattctcgtaaaaggatacatgagatcacgtcatgaatcgaaagtagtatagacaagacagcactttcatatatatggaaaaattaataaattcggaaaattggattatgagagtgtgaaagagagaaaattaattcataaaaaatttctttatggaaataaaccttgaatgtcccaaggctcgagcttgttgagatcaacgtcgcgaatgacatcaagatcgatctcgatgctattaactttcttccggagataatactgcaacagctcttcctcggtcggatgaaacctaaacccaggaggcacttgagattgtccgttcactgatatgctcatagattttgacatcatcaaagagattcaagattaactcaaaaatcaagcaagaatagagcatgtgaggtttatttaattgtaactatatatcatactgaaagttggagatgagagagctagcagagaatgactcaatatatatatatatattgttgtataaaaacaagatgcatgaggaaaacgcatgtgtctccttgtacacctttttttgtttttcttaattattaaaattcaactcttatcattagcttttccatttgtattcattatttagtttgaaaattaaaatataaccctccaagagcaatatattaatttcacttgtcaattattaatgattattattctcttgttcttttttcacaattattagtttcaattttttttggcgtctagttttaaatagttttgctattttattgtcattgtaattagtttagaaattaaaacgtgggcctcactatagtgatttagttacacttatcttttacaagaacttaaaatcatcaaatgtgacaatatcaggcatcgtaattatttgtgctaatatcaatgacataatatcacttggactatttcaaatacgtataatgtatgttgttatacattttttttagtcttttcaaagtttaggtttatcttattcattaattctttaaactactaagaaccatcgtaaacaaaataagtaactttgtgtatctttacatttgcaacgagtaaagaattattgtgaagaaaaaaaggaaaacataaaaaaagtgatatatagttgtcggagaaaaaaaaggtgatgtagttatcaaaagaaaaagagtaggccccgtaaggcaactagattgtaggaagcaagcccacatcgaacgatgacccttgaccttaaaaatctctatagaaaagctccctttaaacaaattaacaacccacacatcgtaatagtaatagattgtcttcttctctctttttctcttctaattcttgatatttatacaaatgatatctctctttatatgcacatgcacactgtatttacaaaataaagtcgaaatagggtgtcttaaaaagtttccctccggaagatgtggcttttttcatcgataaataaacgtttacactacaaaagttttttttttttaaacgaaaaggtttgatcgttacaaaaaaactagttgatgtgacaaagagtgtttttttttgggatgtgacgaaaatttataaaaatatattagtaataatgtgtatatgttatatatgggaaattgtcttcgaaagaaagtgggaaataatgccccaaacggtagatatagtttggtgttcgagagatgatagagttgggtaatgagtgttcctgtcccgtctgaaataggattaacaatcgatttcacttttcttagctaatgaaaatctctagagttatacgtttatttatttttcaaatctttgctcgatcgttcgagatgatttgtagtatggttagtgcaaaacgaatgagcctaattaaggggtgctgtttttatttttttaaacatttggttgttacgttctgttagagacactatataaaggtgagacgacagaaaggtaacgatgacgtcaaaaaccacatagttttatcatttagactgtggaattgtatgtgtaagtacgtgtacttgtgtagaaacgtaattaagaaaaccaaaattaatggagctaaggagtgtttatgtggttggaactaagactttatttaagattagttaagaggcctttctgcatttgtctaaacacagaatcattttgttgcgttttcggaattccatgcttttaatcattatttttttagtttgattaatgacattgcacccaactttttttgtgtcttaagtccatgtgtttattggttgcgctatgaaaatccaaagtttctaagtactatataaaacgggaaaactgtagaaatttacaggtcatgattctttccagtagccagtaccatgcgttttctaatatattttgtttgataaaagttgtttctattttaaacgtaacttttgattattaaatacggagataaatagataaactagtactcagaaagatatattacttgaagaatacattttttttagaaattatgtatgtgtgatttttttaattaacgtttggtaaaaaataaagtataagaactaaataaaagaaatttgcgttgtctaaaatattctcactcctctattatttgtgataaataaatttataatatagttgaatttataattaaaaagaaaaagtaggtttgatttcagaatcttcattctattttggtagagtttatggatttttgtacattcatatgtttgattgacaatatttagtactcgtttttttcattgtgaaattgtacgaatgtaacattatcatcatgtcaacccgaatcaatagagttcaaaagtaaaatttagcaaaattttaatgttttatgtactccatatatctatttttttttcttcccagtcttgtgaaaccttcattgattcttaacaaaattgataactttatttttttctcagttgtgttatagtttaactctttatccatatataacaacaacacgtgatttgattagcaattttaaatcaatgattaaataatagtatatgacttcgttgaaatgttttaagtttcacaataaccaagaataatttccaaggtatattatgcatttttattcgtactcttccatttttggtctttctatatagtctatattccatcaagatgcatatacagtatctaatataggattaagtctggatgcttggcaaaaacaaaaataagggtttaaatctggatgctgatccaactctacaaacaaatagttctttacaaaaatttttgttggtagaattatttaaatttctaatatatgcgtatctttaagtaagttctgagggcattacttatatattgttggtgttttttccatgagcacgtgaagtattgtaggtttcattgatgcctatgtcaattattagtttacaaaatgatgtcacaaaactgtcacatgcatatattaatatacatatctgtacgttctcaacgccgtgatatttttatttattcacttgattacacattattcttttctactatattaaatcatatgctaattaaccttaatatgttagggatatatctcatagtgtaaattggttattatttattttattttaagagtatttgtttttcatggtaaacgatacatttggtgatggataataagtaatgaaggaaactgatagaaattttgtttctaaataataaaaacttaaatttggaaactctctagaagatgaagaaagtttgcatgggaagcaatcttagtttggtgaattttcgtcaaaatatgttaagccttaatgggtgagacgtcatgactccacactccgttttctttaatggcgaagggcaagtctgtagttccatagactttggaccctttcacgatatccacgtgtattttgtaatatttctcttcttttaatggttttgtaatttgtttaacattttttaaggagtctttttgctaacgtcgatttatataacgtagtactaatactttcaaaaaaattaaaacacattttttaaaacaaaaaaaatttccttaataaaactaaactcgaagtctggaactaacacattcagactcatagtagtttgtctctagactctagtcggacgtcgccaaagtttgacttcttacattatgcaaaccatatatgtgttcaaatattgatatttgaaaggatagagtatgatgtatatgacgcatttcgttttatttacatgatcacccaatcgatggttacataattaagatttgtcccttcgtaatgattgtgtccctataagctggcaatatatatatagcaatcttttgtataactaggtgtcctaaactagagcatagcggtctgctaatttcggctaaggcctgaatcgttaatgatggaatcagaatgtacatctcatggaagtcgatatcgttcaacttatagagataggcacatgttaggtatctgaatgctttagtatcaaaattagaagctctcttccattgactaatttcgtaaaacatatatacgaagctatcagaatcaatgtttcattgtacggattactatgttatgtattaacagtcagttactatatttaagcagatcataagaaatgaataaattttccaaatatatatatttaatcagctaaactggttaaaaagaaactgattcaatacataatagatttgaagtcagttcaaattacgttaacggaagagtgtgctttatgttgctggtctactatatgtatacattccaaagaaatgaaatttcgcacagttcaaaactttatgaatcaagccataaaatgtgacactccgtaaactccattatattacatatgagatagtgtgaattctgtatacatagatttactgggctttagaaatggattttaagcccacaaatagtcttgcttcatttcaagaggtggccagtagtaaaaaataataatattaattttcctttttgataaaaatgatttactcttttcaattaaagtcccatctgccaacgaagattccaccacgtggcaaaggaaacgttgacggtcaaaataacgggaatccgtatcattcgctgtcacgttcatacgccacgaccaatcaacagcgtttataacggattttcagactttaaggaaacaaaatcgctggacacgtcacgcgtcaatttttgtactgtaataaaaacatcactcagatcaatgatcccatgcacgcgggaccacgtacgcgtgataaagtcttgtgatacacaccgttggatgataaagtgcaatccatctaacggtgattttgttcaagttgagaataaaataaatattttagttagaatactttttaatactatataataatattgggaaagtggctgagcataaacatgtgcatgcctgcctgtatcttgcagccttcatgtggatttatcagtgcgacactatccatcatcaaataactcatatctacactttctttcttatatatgtgaaatttatacattacattttgtaaaataaatatttatattccaaaaacaacgtagtagacgtgcctcaaaatcaaagagatgtggaacggctttagaagcaaaatccaaaattggaaaataatgataattattgccacaaaatattgattacgaaggtgatatatatattaatcactgattgatgttgttaaggaaaagaataaagttttgggctaccaaattttcgaatgttgaaattgacttttacatcgtgatctgacaaacgcatgtgttgattcaattgttcataaatcacaatacttcaaaatttcaatacgtatattttttcatttcactaatcactaatacattggtacgtttctatagattttgccactagcaagttttagcaaaatctgttatcagaatgctttaagttgagaaaactgctaatgctattaaaagaaacggctaatgattggtagacgcatcgatcgatcattcgttgagagttttcaacaaggtctaaataaactatttaaataaaatatcatagactataaaatggaaacgaaaaaaaagagcatatatttccacaattaccgttagtacttaatagtagtagtagtaaacagtgacacatgatacattttgacggctctgatcgaataaaaaagaaagttgtactaacagactttattaaaagacaagctacaatgattttttttttttgtaaggataatattttttttttataagaaaactgagaataggcaatttctgcaaatgttttgaggaagacaacctgtcttctgtgttaaaaaccaggtctgccctacatttataattatttcattgtttttttataataaagggtttacagttaaaattcaaaaatacaaaacatccaaaaaattcgaaaaaaggaaagatagaatttagaagattgtgccacaaagtcaagacccacaaaaacatttttgttttgggttatgtactgcacaaaaaaaagtgtaaataatttaaaataaacccaaaataaaataaaatagagaaaaattcagcagattattctcttcgatatgtattaaaaaattctcacagttatttttattaatgcttggagacgaatggtcaaagtttggttttatttttttgataataatgaaagtttaattatcaagaattttgcagaaatcaagagagaaggttgaagacagcgaagcaaatgtttatgtacacaagagacgcataaatatataaaatacagcgaaaaaggtaaaattgggtctctggcttttcctcatattttcaattgcttctctcttctctcttctatagccccattgtcgtgggttcccactagcagctttcttgtcttcctccattttcttttccttcattctactaaaacagaggtttttgcctcttcctctcttgtttcactctttagggtacacacaaattcactcttttttcttctttgtttgggaggggaaaagttacagttttttcctctgttttggatcaaaatttcgtttttttggttgtgttaagaaagcaacagagagagagagaaagattgaaactttggatgtgaatttagggttttgtgaattggggaaaaagcaatccagagatggctcaacagagacaatttcagatggaaggtggtaataataatacaacagataccaagttgacgaaaatctttgttggaggattagcttgggagactcagagagatacaatgagacgttactttgaacagtttggtgaaatcgttgaagctgttgtcattactgataagaacactggaagatctaaaggatatggatttgtatgttccttcttctctctctctttttcgtttctttgatgataaagtttctctttttctctgaaaaaatcagtttttttatttgattaggtcacgtttaaggaagctgaagcagcgatgagagcttgtcagaacatgaatcctgtgattgatggaagaagagctaattgcaatcttgcttgtcttggtgctcaaaaacctcgtcctcctacttctcctcgacatggtttgaatctctctctctctctcctctcttaattccaatgggaactagctttagggtgattggaaaaatctgatctttttacttgatcaacacgtgaagaagtcaagagtgttgttttacgattcttggtggaaacttgatttccaggaacaggtagattcagatcaccaggatcaggagttggattagttgctccttctcctcagtttcgaggctcttcttcttcctctgcttttgttcatcaacaacaacaacaacacactgctcaattcccatttccttactctacttacgggtaagaatacataatcatcacattaaataacaatccattctgattagtgtgcgtgtgtgtgtgtaagcaaaacttaaaatgcttgtgttttcttcttctgcaggttttctggttattctcaagagggaatgtacccaatggtaagttcattttataaatttgtagagtcgtttccatttcactgataaatctttgaagttcttatgtttgtgttttttgtttgtttgcagaactactacaatcatcatctctatggagacaacagttttcaccatatatgggacatccatcagcaggatcaacaggaatgttccatggtttttatccctactatcctcaatacaatgcagcacaaagtagcaatcaagctcaagctcaagttcaagctcaacatcaccaaggtttcagctttcaatacactgctcctcctgctcctcctctgctgcaatatccttacttgcctcaccagccacacttcagttctcagcagcaatttagctctcagcaacctcctcctccaatcctctccctcccaacctctctggctctatctttaccttcatcatcatcaccgtcctcttcaacttccacctcaggtttgatttcacaacacaatctacattgaaaaccatttgtcacattgttttgaatcatgcttgattctttgttttgttttgtattagctgcaacaacagcaacaaaaacagtagttataactacagcaacaaagaaagcagaaactgaagctagcagcaaagatggtaatgaagcaatgacaacatcaaccatcaagatagagggttgattcagaactactacaatagccagaagaagggacaaacttcattgtacactaactcatcatcaaatctctccaacaacgttctagaaacattcattcatccatcgtttttaggattctagaatcttaattagtacttaggaggaggaagaagaagaagaaaccatcatcacattctttctttttttttgttgttgtttcaaattgcattttaggtaaaagaatcaagagaaagcattggtggctttcttttagattcttaagaaaacttggattggtgcagaaagcatcatcagattattacattcatttggggaattttatttttcaggttcaaaagaaatgttttatgtcttcttttgaacctaaacaggatttttaagcttcggataagcttaaaatcatttcttttacatttgtaattcttgaaattgttataattcaatcacattgcttcttcttactatatttgttcgtttattatgattataaaatgtttgatcaaccaagaatccgttcatcgatcactttcacctggagttttctcgtgttttataatcataaaaagattgaacctttttgataattattttgaattcgtatgatcattttctgagagtaaaatgattattgtctttggattccaaaggggatcttatgaagacaaaagtaccggtcaaaagaccgttggaatcaaacggatctttttcttcgtcaatggataatatttcacttctactattcttttaacaattttataataaaaaccaaacaaacaaaacatagagaatacataagttatgggcttttgaaaatctaaggcttaaattcttataaagcccattaatttttatatgtgtaagtaagttggccatagaaagcttaaagccttagatatgtaaacacgcaagaatatggtaagttgtttattacgcactgtccacatcatagatcgatagatattctttccacgcaaagcaaagttttattaagatggttctagaattccttcttatccacagaaaatttttatattcaagaaaatccaatttttcatttggagtcgaaatttacgcggccactaacgaaatttgatttaattaaaactagtgggcatttaatatttgaaaataatactatttgttaaatcccaattgaaaatttaataacatttaatataattaacttttttgaaaaaaggaacaaaaaaagccatccaatttgaatgatacatagagcagctgaaaaaaaaaaatctaccttttagaatttattaaatccaaccaaaaatcaaacttagccacacaattacaatagaaacccacgtgtcatccacatgaccactagatattcagacgaatatctccacttccgtagagcgattaggttaatgacacgtgttaaggtggacctgcgaagcagaggaccacctccaccgaatcagccgcgatacagagaaaatcaaaacaatggctcatattaagccacgtcagctcagtgaaggcccgctttgttacacaccgttaattagatttctcaaattgtttatttgctctgagcttatacaacaaagtcttcttctttctctgagaagatattttcgtggttgtgatcgaaagataccaaactaaagagtttaactttcttcttccttcttctttacttcaacatctgatattttctctctctcttttattcagtctgaaacaatatttctcggtagattaagatctaaagctcgttgatctagattcttgtttctatttttgtgtgttttaggctttgttggttttaccaagtgttgtgattcagtttgttttgaggtctgagtctatgggggagattgtggttttaagtagtgatgatggtatggagactataaagaacagagtaaagtcatcggaagttgttcagtgggagaagtatttgcctaaaactgtacttagggttttgttagttgaatctgattactcaactcgtcaaatcatcactgcccttcttcgtaaatgctgttacaaaggtcgattggtctttcctttcattagcttatgttaaagttttcatttttatgttttgatgtttgaaattaaactcggttcatgctttttgattgaatacagttgtagctgtttctgatggtttagctgcgtgggaggttctaaaggagaagtcacataacattgatcttatactaacagagctggatttgccatctatatctggttttgctctgcttgctttggtaatggagcatgaagcttgcaagaacattcctgtcataagtacgatggtgatcccctaagtcctttatacctctaaaaacgcctctttgttagttttttggttcttatgcttttgttgtttgtttgaaatgaatagtgatgtcttctcaagattcgataaaaatggtgttgaagtgtatgctgagaggtgctgctgattatctaatcaaaccaatgaggaaaaacgagttgaaaaatctatggcaacatgtttggagaagactgactgtaaattttttatttccttttttgaggtttccttgtgttgaagtttgaaacttgaaagacttattgtcttttttggttatggatcagttgcgtgatgatcctactgctcatgctcaaagcttaccagcttcacagcacaaccttgaagatactgatgaaacttgtgaagattccagatatcattcagatcaaggaagtggtgctcaggtataataaatattaccatctgagttttacataatatatgttctggtccttctgaattgtgttttgtatgagttgtgagattttcatcttgagattgcattgtatatctcatgtttatctcattttagtagaagctaatatcgtgtacatgcttatgcaggctatcaattacaatggtcacaataagctgatggagaatggcaaatcagtggatgaaagagacgagtttaaggaaacttttgatgtgacaatggatttgattggtggaattgacaagcgtcctgatagtatttataaagacaagagtcgagatgagtgtgttggtcctgagcttggactttctctgaaaagatcttgctctgtaagttttgagaaccaagatgaaagcaagcatcaaaagcttagcctctctgatgcgtcggccttctcaaggtatgcatgtttccttgcttgaataaagaatgcctcaaatcttgtaattagtgtttttaatcaataactctacttaacttgcagatttgaggaaagcaagtcagcagaaaaagccgtcgttgctttagaggagagtacttcaggtgagccaaagacaccaaccgaatcacatgaaaagttaagaaaagtaacatctgatcaaggaagcgccacaacgagcagcaaccaggagaatatcggatcatcaagcgtaagcttccgtaaccaagttcttcagtccacagtaacgaatcagaagcaagattcacccataccggtagaatcaaatcgcgagaaagcagctagcaaggaagtagaagctggttctcaaagcaccaatgaggggattgctggacaaagcagtagcacagagaaaccaaaggaagaagaaagtgcgaaacaacgttggagtagaagccagagagaagctgcattgatgaagttccggttgaagaggaaagatcgatgctttgacaaaaaggtaagagacacacaagcttcatcataaaaacagcatctgaaacaaatacaagatcaaactgattcaatggagatgtataaaaatggattacaggttcggtaccagagcaggaagaagctagcagaacaacgtcctcgagtgaaaggccagttcgtgcgaaccgtgaattcagacgcgtctacaaaatcatgaagagctctttcagtttttcctctgatttcttttgttgattttataacagaaacttatttagcttttgcaatctttagtgtgctttttttttttatgtatttgattggcttcttcttctcagctaatatgagatactggggcaacttttgtatatatgtctgcaaatgatcaggctaagctaaaacagtaattccaatttcgttaagttgagaaatatttcttgttgtgatcatatccaggccgcttctctctcgatacataccaacaagaaacagattctataaaacttgatttatataccattgctatagtctatgtattaaaactcatcacattaattctctcacagtcagagaaacaaaaaaaggaaacaaaagctatcgaaagaaaaatcaacaaagaaatctttttttgtgaccgttaaactaagattttgtgaccgttaattgtgattatcagtttccttttctttgcttataaataaataattagtgagagtctcaacgcttcttctaaaacattcgacaaatcaaaactctctatctctcgcttcttcttattcttcaaccctagttctcttctcaagacaattttgtcttcaaagaggagactacaaagaggaggatatagccaagagaggggagagctttatggtggtggatgatgtcacgagagggctaccaaagaccgacgggctcaaatctgactttggaatgggctttgctctatgggccctttttgctactaaatccaacaaggtattacttttttcattctttttttttttgttttatttaccttcaaaattatttttaagtaaaactaattagtttcaccataacatttatataactaaaatgtttatatattttcattagtttaagtgtaaaatgtttttacacctatattttattataactttagattttttttatatagataagtgttaaatttttaaattttgtgtaaactaattggatacatcatccaaacccctaggaggtgtgccaggttcaatatatggtttacacattatttaactttttaacacttgttttgcttttattaaaaatgtttttaaacttacatattttcatattactattaaatctttaaggtatttttatttggataagtgttaaatttttaaattttgtgtaatctaattggatacatcatccaaacccctaagaggtgttctaggtttaatatatagtttacacattattcaactttttaacacttgttttgctttcgttaaaaatatttttaaacttatatattttcatattactattaaatctttaggtttttttttatttggataagtgttaaatttttaatttttgtgtaaactaattggatacatcatccaaacccctaaaaactgttctagattcaatatatggtttacacattatttaactttttaacacttgttttgcttttattaaaaatgcttttaaacttatatttttatactactattagatctttaaggttttaaggtttcatttataggtttaatatatggtttacatattatttaagtttttaacacttgtttttcatttattaaaaaatgtttttagacttatatttttacattactattaaacctttaatgtttttttgggataattttttttttttaattttgtgtaatctaattgaatacaagattcaaacatgtaggtggtgttttaggtttaatatggtttacaaattatttaggtattgaacacttgtttaaaaaaataaaattaaatcttagtttaagtggtaaattttaaacacgttgaaaactaattgcgcctaagcatctcgtacttagttggtccgtaagttttggtgttcgaagtttggaaagttttcacgtaatttaacacttaaactttaaaaaatcagttcatttaaaactttttgaaaattagtttaaatggtaaattttaatcacgttgaaactaaccgcacatagatatctcatatttagttgatccgtaagctttggtgtttgtaatacttataattagtttttgaaaaatgttgattgtttttactaaatttaagaaattaattcactaaaactttttaagaactagtttaagtgataaagtttaaatatgtcaaaactaaccgtacataaacatcatatccttagttaatctataaagtttggtattcgaagttttcacataactaaattttaaattatgttttggaatttttcttcttagtcaattcaataaaccctcaaaagtgaaaacccaatcattttgctaaaccgcttctgcgaaccaatatatgaaaccgattaaaaaagccactagattgattggtttaaattaaaaatttcaccggtttgacaagatacccaatcattatacacaggtaaaaaaaaagcaaaaaaaaaaaagacagcaaaaattacggaccataaaaaacggccacgtgttcatcatgttcaccgtcaacgaaagagattccgattaagagagatgtcgaaggagataagagagaaaggggacccaaaaaaagggttaggtggatctctcatgaaatcggtggagctcccccatatcttttttaaatagctttcttcttttggccccttacccagagatagattcttatatactactgagaatcttcaatttctgcaacttttgtatctcttcctggtgagcccttctcttcctctcgccacttttttagggttcgggttttctttaaaatctgacctttttgcttgcctctgtttttattattcgtgttagggtttgttgttttttcactttctgactctgccatctggaatttatctgattgggacactttgattctgtttatacaaacagtagttttatttactgaggggtcaaacttgaatctgtattttagggttttgactctttgtgttattatatggtgtgaaagcgttgacactgtttgtttgcttgacgagttcctcctttttgtagcagtagtgggaatgtggtgggatacatgtctttgtcctttgatttgatatttctggataaatttgctttcttttttgttgaaacagatcaccaaataagaaaactcttgtggttctattgaattgggtttccactatctttattgtagaggtaactttattttgtgtttgttggtattgagttctgtacatccatcaggattttcgttgttgtctgagctttcttctattttttttcttatgcagatggagtcttcaagtccccaccatagtcacattgttgaggttaatgttggaaaatctgatgaagagagaataattgtggcgagtaaagtctgtggagaagcaccatgtgggttttcagattctaagaatgcttccggggatgctcacgaacgctctgcttctatgcggaagctttgtatcgccgtcgtgctgtgtctagtgttcatgagtgttgaagttgttggtgggattaaagccaatagtttagctatattaaccgatgcagctcatttgctctctgacgttgctgcctttgctatctccctcttctcattgtgggctgctggctgggaagcgactcctaggcagacttacgggttcttcaggattgagattttgggtgctcttgtatctatccagctcatttggttgctcacgggtattctggtttatgaagcgattatcagaattgttacagagaccagtgaggttaatggattcctcatgtttctggttgctgcctttggtctagtggtgaacatcataatggctgttctgctagggcatgatcatggtcacagtcatggacatgggcatggccacggccatgaccatcacaatcatagccatggggtgactgttaccactcatcaccatcatcacgatcatgaacatggccatagtcatggtcatggagaggacaagcatcatgctcatggggatgttactgagcaattgttggacaaatcgaagactcaagtcgcagcaaaagagaaaagaaagagaaacatcaatctccaaggagcttatctgcatgtccttggggattccatccagagtgttggtgttatgattggaggagctatcatttggtacaatccggaatggaagatagtggatctgatctgcacacttgccttttcggttattgtcctaggaacaaccatcaacatgattcgcaacattctagaagtattgatggagagtacacccagagagattgacgccacaaagctcgaaaagggtttgctcgaaatggaagaagtggtggctgttcatgagctccacatatgggctatcacagtgggaaaagtgctattggcttgccatgtcaatatcagaccagaagcagatgcagatatggtgctcaacaaggtaattgattacatccgcagggagtacaacattagtcatgtcacgatacaaatcgagcgctaaaagctaagtaagatctgatgaagggtttttgtatcagcattctcattaacaataaaatcaataaagtttctacatttttcactttctcgtgttcctctgctttggtttatattggtatagttatatacttatatgtcgtcatcgtttggttgagcacaagtaagcactattcctcttcaaggaagaaactttttgtccttgtttcaaaaagggtgaaaggacacaactgcttagaacagatacgtcattcttaggtctgccttcatttaagattcattatcttcctaggagtcacagggacttgtgattgtgttagaaacagaatctgactgattgttaggggtttaattgatatgtcacaagtggaccatgtttgtcctgagagtaagtaaccagagctttaagttacatcagcaagtacaatgtaaagatgaaatcttcgtaagtcattcttaaaaaaactatgtaaaagttgactcttttttttacttggtaggcggttctggttctcttattacacagtagtatgaacgagatctctagattgcagacaacttaattcgtgttttctggcaagtttttgtgttggatcttgttttggctgtgttagacttaccacgtgagataaacagaggccacaattgagagaacatggataaggtttcttcttgtgagcttattaagatcgaatctgtgttcttgtttgtcaacaaagaggttaaaatttcggatttgatcgataacaaaatgtacttctttggaatcctgtaaatattacaaagaagtaaaggttaaaaagggaattttaccgtttattcgatagctcgtaaacacaaaatctgatgcaaaaacaaagatatttacaggcaaacactggttagtacccttaaagccaaggcatcgacaattacatgtttagcagataagaagcctcaattcacgggttaacgaaataagagacttcaaaagattcaatttttatctattgggttgtaacaaaaatcaagcttttcatgaaatgtaagaacacaaaaccaatggaaactctcttctcttctacttcttcttcttcatcatcatcttccgtgtgttaacagaagtccccacaattgtctgtcttcgctgcgagacaaaactgccacagccaataatgtttctctgagggaccttgcttctgtcagagactcgctctctctctcctcttcttgctctgctcagctctctcaccaactcatcttcagtcctcaaacaaacatctgttctcatctttgttttctttcctttctttctcatatctcattttcaattttcccaatttctcttcaacatcttcatagcaatttaagaccactattccattataaagctaactgctttagaaactcctcacatttatttcttccccatcattgttttagagagggagaaagaaaaagagctcagctttctgatggagaggagtattcaaggacaaaacaagctctgtgtaatgtatcttatctcaatttggaacgttactagtttttatctttcttgtaatcttttctttcaactattgattcaaagatgtggacttgcatttactccttccaaaagagtccacaatggttgcattcaatgctatatgtgtttgttataccaaaaacaccaacaaatctgctctcaactgtttccctctctttgaaacattccatttttcattctaattttgtttcgctagactgacccactaaccaaaacccacactagtctacccaaatttaatatctctcttctcaatctcactttctcttcttactcacttggtaggtaactccttcccctgttttttcttttgttgcagtgtttggaccaaaaagtgaatgtgagaagaagcctacaagttcaagaaactgtagaggatcatcaaagctttgcccttgaagaggaagaacaacaactctcaactccgagcttgctgcaagacacaacaataccatttctacaaatgctgcaacaaagtgaagacccttcaccgtttttgtcattcaaagacccaagctttctagcactactatctctccagacacttgaaaagccttgggaactcgaaaactacctcccacatgaagttccagagtttcattcaccgatccattctgaaaccaaccactactatcataatccatctttggaaggagtcaatgaagccatctcaaaccaagaacttccattcaacccactagagaatgcgcgttcaagacgcaagcggaaaaacaacaacttggcatcattgatgacaagagaaaagcgaaagagaagaagaactaaaccaacaaagaacatagaagagatagagagtcaaagaatgacacacattgcggttgaacgaaaccgcagacgccaaatgaacgttcatctgaactcactccgctccatcattccatcttcatacatccagagggtataataaacaaaacccacaaatcaaagttccaacctttatcaaatgtcgaattttcttaactaatatctctcgtagggagaccaagcgtcaatagtaggaggagcaatagacttcgtaaagatcctagagcaacagttgcaatcccttgaagcacaaaagagaagtcaacagagtgatgataacaaagagcaaattccagaagataacagtctcaggaacatttcgtcgaacaagttgcgtgcgagtaataaagaagaacaaagtagcaaactcaaaatcgaagccacagtgatagagagtcacgtcaacctaaaaattcaatgtacgaggaaacaaggacaacttctcagatcaatcatattgctggagaaacttcgattcactgttcttcatctcaacatcacatctccgaccaatacatctgtctcttattccttcaacctcaaggtacttacttatataacaaaaaacccattattcaaaatcatcgacaatggtgaaaaaattcaatcttttttgtttgttgctcagatggaagatgaatgtaatttgggatcagcggatgagataacggcggcgattcgtcagattttcgacagctgattgactaatccaagtaaaaagtaaaataaaaaaagaaacgtttactttggtaacttcgttttcatgattaaattctttatttggtcgtatgtgattggagtcttctcggcatggaacttgactttggttttagggtactagtctctacagaagctgtggtccttctttggatagatttataatgaaagtttgacccctctctctttttttattgtctttttgttttgcttttgcctctctctcggggttttgacttttgtatcataaaactagaatataaaagtttacaaattatatttatctataaaatatttttattttatactttacgattgttattaagtaacgtcctcttaaattcgtcccgccaatctgtcccgtaaaaaaaactcactgattttatttatgatatgtttatgaatcattgtctaaatattttttaattttgtagtaattaaatgctatctaatatctctgcgatttgatgattataatcgaattattatagtcatgtagaaaaacaatatcaaaaatgataattttgtagtaattaaatgatattaaatatttcagaagttttattttagtaactaatcgtgtagttaatgtggagagattttgggaagattatcaaatatttaattcaaagattttctttctaattatcaaaaacaattattaaatgccagtggcagccactgtaaataaatctcaactctaggatttatttcacaaagtggctgcaaaaatgtatatataaatatctaatctttacttagatggcatgggtttgaaaagttctgagtaactgataggcccaatgactaaaagcccatatgtgtttctcatcataatggaaggcctacaagtagaagaattcgctcgtgtttatgaattatgatcttgattgtaatcttattatcaaaaaccaaccgtaaaagtatatgaattgcgtatttgtaaattgtaattattatatagtattgagattgtgattaaaagtaataatgaatttgttgaattattattatagactatagtatagtagcaagagtgaaattttgttttcaagaattgagtcctaattttataaaaggagccaaaaaacccaattctatctaatccaatgaaaactccaagatcgtctctacgtccgccacgtcagcactatcctgatcgggaaacccaaaacgagtggtcgaatagtttccgactggtaacagagaaagcatctccacaatccccaaaattctttcaacacttgctctccattaatcttttagataataaacctaattgtttctgttttgtttttgtttctgtgagattcttccgaggcttgaagctcaatagctatggcttctctttcagtctcttcctcttcaaccatcatcgattcaagagctcctccttctcgactagcctccgcctccgcctcttctccgtcgtgcatttcacttcccacacttccgattcagtctcatacccgtgccgctaaagccactgcttactgttcgttttccataaatctgaagatttttcttttcacttttaatttcgagtttaaagtttcaaactttcgaaatgggttttggtttttaggtcggaagattgtgaggaacgttgtgacgagagctactactgaagttggtgaagctcctgccactactaccgaagctgagactactgagttacctgaaatcgtcaagactgctcaagaagctgtaaatactcttactttatttatacaatgatgattctacctcttgcttctgggttacatgtactgaatttggttgtttggattgaagtgggagaaagtggatgacaagtacgctattggttctcttgcctttgctggtgtagtggctctttggggttctgctggaatgatttcggtgagtagaagaatactactttcttcttaaaaccctagtgttaaatttcctttatttgattccaaaatttgttattgtgaaacaggcaatcgataggcttccattggttcctggtgttcttgaacttgtaggcatcggttacacaggagtgagtttcttcttctctttgtatcacttgaaccaaagctctcatgaacctgttttgaggatatagatgattcatcacttcacttttggatttaggattagttctctgaatttagaatccgaacatctgcaattcatatggagatatgatatcagaaattgattgctgcttctcgctagtgtttcaatcttaaaagacgtgtgtagtttgtttcaattgtgtgatggaccttattaacatttggtttttctatggcagtggttcacttacaagaacctggtcttcaaaccagacaggttaaccaattctctctttaactctgtgtttggttgcatgtaatactgagaatggaagactcaaattctcgaggaaattgtttgttatctgtttcagggaggctttgtttgagaaggtcaagagcacatacaaagacatattagggagcagctgaatcaaaggaggaagaagaagaagaagagcctttttgaggccattcatgaattggaatgaaggatatcaaaagaatctaacacaaaggccacgtccttccttcaatctttccttcttgtaactaaataattttcatcctttctctctctctgtctctggtcttttttagctcaaagtatcatccatttatgtcaaagtgttgtaaattcctcaagactatatatgagatgttttgtttcattttccaaaatttcaaactttgtccccatttagtcttctacccttcatgcatggttagcttagcttaatgctgaactgttgaataacgatatgggccttatgctaaaagaacaaaaccttatgggtctaaaaaaaataagcccaatataaaactatggcccaaataagtttaggtccattagagtgtgagaatagcgcgtgtagtgaaccgcacgagaatgcgcgttcgattgttggtgaagtagtcgtctagattcccgggtccactgatgtttctagtgtatcagacacgtgtcgacaaactggtgggagagattaacgatcttaagtaggtcccactagatcaagatattataacgaattgacctttttaacctttcaggtagtcccggaactcgtggcctagaatacaaagaaggttgtgaacaagttgatgttaagatggacaagaatgtaacttgaacaaaagctgaatcatctcttcagccactagtatgttgacatatggcagtttcttttgtagcctcgaaataaataaattaaaaagtttgaggttaaagataattatagtggctgagatttctccatttccgtagcttctggtctcttttctttgtttcattgatcaaaagcaaatcacttcttcttcttcttcttctcgatttcttactgttttcttatccaacgaaatctggaattaaaaatggaatctttatcgaatccaagctgattttgtttctttcattgaatcatctctctaaaggtacttaagattgatttattgtcatggtctttcttattgtttgatgaataacttgacttgattgttttttgttttgtggattagtggaattttgtaaagagaagatctgaagttgtgtagaggagcttagtgatggagacaaattcgtctggagaagatctggttattaaggtaaattaaactaaattttagggggaagatgattgttttaggtgtcaaagattgagaattttaatgaaacttgatatagactcggaagccatatacgataacaaagcaacgtgaaaggtggactgaggaagaacataatagattcattgaagctttgaggctttatggtagagcatggcagaagattgaaggttgatttttatttccctttatatgtcttattttttgtgtttgcagaggtttgtcttcaaactgatttgctttttttcatttggacagaacatgtagcaacaaaaactgctgtccagataagaagtcacgctcagaaatttttctccaaggtaaaatcggttaattttgaaatgatgttctcatcttcattggcttaatgcttaagacttattgaaagccaggcaagttttctgcttcttttgcttcttagtcaggagatagatagattacgtttttagagtttagtaatgagcaataagtcttaaaatagttggagaaatgacgagatgtaatcgttttcttttgtttatgcctatatcttgttaatccacaaacatgtacatagattcttcagaagaatgttagtttctttagattcttcagataaacttgtgtcttcttaccgattctgaggtagtggcaaaagtgggctgagtgctagaaatttttgaatgttccttgtgataagccatagaggtaaaccatttttgattttccagttctgtcatttaaacttgttagtgtcattagatttttgtttgtttacgtttgtttagagggtaacaaaactactctcatctctctcaggtagagaaagaggctgaagctaaaggtgtagctatgggtcaagcgctagacatagctattcctcctccacggcctaagcgtaaaccaaacaatccttatcctcgaaagacgggaagtggaacgatccttatgtcaaaaacgggtgtgaatgatggaaaagagtcccttggatcagaaaaagtgtcgcatcctgaggtgattttcatggtcatatggcatctttttgcagtgtgtcacattgctcctcatgttattaatacagattgtgtgcttcgtttatagatggccaatgaagatcgacaacaatcaaagcctgaagagaaaactctgcaggaagacaactgttcagattgtttcactcatcagtatctctctgctgcatcctccatgaataaaagttgtatagagacatcaaacgcaagcactttccgcgagttcttgccttcacgggaagaggtaaaaaacaatctttcattgctatttgaggttttaagacgattagtacttttcatgaaactaaaaccgtgggggaataacagggaagtcagaataacagggtaagaaaggagtcaaactcagatttgaatgcaaaatctctggaaaacggtaatgagcaaggacctcagacttatccgatgcatatccctgtgctagtgccattggggagctcaataacaagttctctatcacatcctccttcagagccagatagtcatccccacacagttgcaggagattatcagtcgtttcctaatcatataatgtcaacccttttacaaacaccggctctttatactgccgcaactttcgcctcatcattttggcctcccgattctagtggtggctcacctgttccagggaactcacctccgaatctggctgccatggccgcagccactgttgcagctgctagtgcttggtgggctgccaatggattattacctttatgtgctcctcttagttcaggtggtttcactagtcatcctccatctacttttggaccatcatgtgatgtagagtacacaaaagcaagcactttacaacatggttctgtgcagagccgagagcaagaacactccgaggcatcaaaggctcgatcttcactggactcagaggatgttgaaaataagagtaaaccagtttgtcatgagcagccttctgcaacacctgagagtgatgcaaagggttcagatggagcaggagacagaaaacaagttgaccggtcctcgtgtggctcaaacactccgtcgagtagtgatgatgttgaggcggatgcatcagaaaggcaagaggatggcaccaatggtgaggtgaaagaaacgaatgaagacactaataaacctcaaacttcagagtccaatgcacgccgcagtagaatcagctccaatataaccgatccatggaagtctgtgtctgacgaggtacttacttggactaaagatcaacttcctttatttcaaatcattttctcatataaatattgtacattcagggtcgaattgccttccaagctctcttctccagagaggtattgccgcaaagttttacatatcgagaagaacacagagaggaagaacaacaacaacaagaacaaagatatccaatggcacttgatcttaacttcacagctcagttaacaccagttgatgatcaagaggagaagagaaacacaggatttcttggaatcggattagatgcttcaaagctaatgagtagaggaagaacaggttttaaaccatacaaaagatgttccatggaagccaaagaaagtagaatcctcaacaacaatcctatcattcatgtggaacagaaagatcccaaacggatgcggttggaaactcaagcttccacatgagactctattttcatctgatctgttgtttgtactctgtttttaagttttcaagaccactgctacattttctttttcttttgaggcctttgtatttgtttccttgtccatagtcttcctgtaacatttgactctgtattattcaacaaatcataaactgtttaatctttttttttccaacctggaaagaacttcactcaaggggctcttgttcttgatatatgcaaacgacagagttccaaaacgtaatcttagcccatccatcacccttaagttgtctcataactcataagtaagcacaaaagcaccacacaaataagcaaactctacttccttatgtcatcacataaatagaaaggcaagcagccaaaggcaagcagtagcaagtacaacagagttgttacaaaaaaggattaaataaaaacagaagttataaggataaatccaaccacacccatgaaatgaccccatatcttttatttggccgtctccttgtcttcaaagctgcttttgcacctcaccagactctttttcagcttgctataatcatctgccatctctttctccatccctttttgttgtctgagggattcacgtctcatcttgcggagaactaacagcgtgaggacctgtgataaaggttctgcaacgtcgaaaccctgctcctcgaacattttaaatgtctctctgtagacatctagttcactttttggagtgtcctcacacataccatctactgtctttacacaatcgataaaagctgcagtcagataggctgcagtcggttcaccaaaacttggatgcgtgtaagccaatgatgggaagtgaggacgttgtggtgttcttttgtagacctcatcagactcaaactctttccacgaagctaaagtcttggtaaaaggcaaaacaatttcctcaccagctgatcctcctgtaggagctgaccaccaacacaaaacaatgagaattgcgtaagtgtacacgtatctagctagttgttcgtcgtatcaatgcaagcctcctatcgagagtataatatacctgcagtctcgttgttgagatctgagtggtgctcttgttctactcttctcctcttaccgcggccactggcatcataattaggatgatcagcatcaattataagcaagcccctctccttcacaggcccggcccgtgacccatttgtaagaaacatgggtatagggccaccaaaatttgtaaggtttttagtattaaaattaggcctcaaaaatatttgttattgcaaaatataggcctcatttttctgagattttcaaatttagcctcagtttttacatgtgaggctgaagacttttcctgtcaaatttgatgcatgtgctgcttcaagctagctagagatgtagaagagtattcgcttcttgtcttcaggtgttaaagagaatggaggctaaggctttacatgttatcgtaattgttgtatagtgagaagaagtattgatttgttgtataatgttacagactttgtcttgttatatgaagactttcttcaacctgaaatttttttcataaattgtgagaaattagtaggatttgacttccatcacaaaggtcacaaaactcaatgaaggaccaaaattaattaggtggcatttggtaacaaaggtcgaccaatcctgaactgttataactatagttataagccgagatagtgtatgattgtcactattaccaaacgatagtgctagcatcgtaacgtgagtccccattccccaagtttaattttgttgcggagagaacgattaacctttagatctgacacattccgtaatttttaatcttgctttagcaacaaagagaaaaaaaaacttttcatatttcttctatattatacggatacgtaacaataacaaaactatatgctagtagtaaatttatgaagattgattaaaacaaagagagtagcgttttggagtaaaaataggagagctcgaggtccaatggtgcaaaattgttagctattcaacggaccattagtctactattccccaatttctataatctctctacttcgcatctccaccctccatttttcacgtatacccctcaggatctcgacacgtcagatttctctttaggtccaaaatccaattatcttttaataaccaaaataattcggaaaccaagtgatttctaacaaaaacaactgtgcacacacgcttgtcgatattcaattttttcacaattcccaaataaaaaaactttaacaaaaaattcataattccaagtcccacgaatgtagcttttgatacaaagtcttaaatattcttttaaacattatatacaaaaacatcttttactcattgattgttcttgctgaaaacctgaaatgcctcctctgtttcttccttcttcttcctctgctctgtttctacttcttctcctcctcttaactctccaaaccctaacctctatctctctctctcagccacaggctctccgttcaccagaaaagtgtggaaacttctctgtctccttccctttccaactctcttcctcctcctccgcagccgcttttcgactctcctgcgaaaactcctccactctgtttcttcacataaaccaccaaagctaccgaatcatcgagttcttcaccgacggtctcctcgtagacttcccttcgtctccttcttgtcgccaattcaacgacttacgctctttccctttctccgcaaaccaattcttctccatctctttcgaaaacgtaatcggtctttacgactgcgaagattcttctctctgtaaattcggttgcgaaaccaacgatctcttcggttgtgacggcagagaagaagacgaaacctccggtggagatatcggatgttgctatcctttgtctgatcatagcgcgtggcgtgtaggtgatgatttctctgtgtttagtagatatggatgcagaggattctcttcgtggcttgttccaagagggacgaacagaggaaaaagaggcgttaaattagagtgggctattccaagaaactcgccggaggctatttgtgatcgtgaggctcgaactgttaacgctacggctattgaaggaagtgttcgttgtgtgtgccgtgatggcttcgtcggcgacggcttcctccatggcaccggttgcttaaaatgtcagttttatttcttcttttcatttattttcgtgtatgaaacagagtacgtttcaagtaaccttattttactattctaaacaatgaatagaaatattttgtttcactatgaataattcataactgagtcatatggttcgttgggttactaaaaaacttagttttgattcagctcagtaattcattttgccttagtttaaaaagacaagtgtttcttgagttacaagcaacttacactacttggtttactgttgtaacagcttgcttcaaagacggaaaggaattatatggagacaaatgcaagatcaagaaacacaacgggaagaaactcactgttttagccggtaatttaagataatctcatctgaataatttgaaccaaacttcttgctaaaatcattaatcatatgcaggtgttttggctcctctgttcatactaggctcactgttagctctcttctgtctcctaaaacgtccggtaacaagtcacaaagatcaacagttcgatatatctacaacaactaccactactaatagtgtttcgtttcgcaaaggttacaacaagactcgtctcttcacgtaccgtgagttagaagaagccaccaaagggtttcaagattcacaaaaactcacacaaggcaaaaccggaacaatctactcaggcaatctaacaaacggaacacgcgtgatcgttcacaaggttctctgcgaaaaccagattgaattcatggagatttcgtctcagattgatcatctatccgcggttttgcatagaaacctcgcgagaatcataggtttttgtatggatattggatataatccactagttgtttacgagtatccggtaaatggatcgcttggagaccgattgcggctagggcttgattggtgcaagagagttaacattgtagctgaagtcgctggtttactcgcgttacttcagtatgagaactatccaccgattctacacaccaacatttcttctggtaacatcttcttagacgaagattttcaagctaaagtcacaggttttggtttgcagaggaaacagaggattgatactagtatgtacgatttcgcggttttgcttctagagattgtgactggtttaaagcagagagaagagacggtaactcaagcgttacagaagattagaagcggtaagcttgaagaaatcgtggatccttcaatgtattttcatgagcagcctgtggcttttagagaacagattggtttagtagctgatatagcgactcggtgcgttttgtttggtggtgatgggaaatttggaatggttgatgcagctagagagctgttgcagatcgctggaaacaacggtggaggcggctgcgataagaaaagagatggaattgaggaaacgttttcgaattcaagtttgcttcagatgatttctatgtctcctgattctatctatctccctaaaacctaaaacaaaaacagaggaagttaagggttttttttgtttgttttgaatgtatgtaaattaaaaacgctttgcttgagagtaaagaaacgtccttttcttgattactagattgtgttctgagaaaataaatcgtgatcgcgattggaagtcacgattataacaacgtgcaggcaaagagtaagaagaaacaccataaacaagtacaatgttttgtttttcttccatttttaaatactgaattttctttaaaagaaattgaaaggctgagaaagaatatctctcgaatcattaaattcgattttgaccaaatcgttatgctattattaaactctttttgtctggtatatatatatgatagctttgtttttgcagaacttacattttgtttttgtccctttgaaacgaaagaagatccaaaggtaattaatactaatctctgattgtttcttggtttattagatctttccaaatgctctgttttcttctgcacaatcaataaatctgttagttttaacgattgatgtgacaatagatgagtgaagaagcatatgaagaaactcaggaatcaagtcaatctcctcgtccggttccaaaactgaacgagaggattctctcaacactatccaggagatctgtagctgcacatccatggcacgaccttgagattggtcctgaagctccattggtcttcaatgtggtattgtctcttaacttataacccaagtaagccttctttaatctctctctctctcttggtctgttaacgagagagcctctctggtcaggtggttgagatcacaaagggaagcaaagtgaaatatgaactcgacaaaaagaccggtcttatcaaggtaatgtgacttcccaaagattgtgatcttcttttcttttaactgttctgatggatgacattgaatttgatctcaggttgaccggatcttgtactcctccgttgtttatccacacaattacggattcatcccacggacattgtgtgaagacaacgatcctcttgatgtccttgtccttatgcaggtaactgtgttttcacaaccatcaaaattatcatcaaataccacattgtgttgtaacctgagttagcttctgattcgtgtaggaaccagtgcttcccggatgtttcctccgtgctagagccattggattaatgcccatgattgatcaggtttgcatagatctttcttagagatcatctaaaagtgcaagctctagaaattgatattgcataagaatcatcaaacttgcaatccaagaaatccaaaatttacatatgagctttgatcttggtactaaatatggctttgccggtgaacgtttcagggagagaaagacgacaaaatcatagccgtatgtgctgatgatccagagtacaaacatttcacagacatcaaacaactcgctcctcatcgtctccaagaaatccgccgtttcttcgaagactgtaagatccttatctcttgtcaaatcaaataactaaggaccaaaactaaagaagcttataaatcgcgtttggtttcagataagaagaacgagaacaagaaagtggctgtcaacgatttcttgccatcagagagtgcacatgaagctattcagtactccatgtaagatttaacaaaccctaaaatcgcaaactttgtttgtcaacaaaacattgagtaacgaatctgcattgtttgtgaaaatttacagggatctatacgctgagtatattctccacacgttgaggagatgaacaacaacaacaacatatgattctcttcgcagcatccgcatataaatatatttaaatggaatattattttacataattcataaccatatgattggctttttgcagttttttgttttgttttgttttctgtttgtttttttccttgtgatgatgcaattttgttcaattgtataatttgaaactggtaagatataatgacaaacgcagttttgcctaaatctccgattattacgtgatgttgatttttccactaattggccttaagaagctctataggcccaaataagatgggccattccattagaaccatctctaatctcatataacatcgttagaatttagggaataaaaactataacaagtgtatacgaaccaatcaaaaaccaatatatgaaccgacacgtgctaaaatcaattttaatttttcttaaaagagaaacctaacgaaagatttatgttcactagattacagtacagtgaatagagagatataagatcatatttatagttggcaaatattgagatagtgtggatccaaatgagaaagcgactaaacaaagagtagcacatatttagacagagaatgggcttttggatttatcatcatctatatataatcgtgtatttattttgggcctcacttcgttttccttttttagggaccacagctactctactccaattcatttctgtatacagtaattgtaatcaacgaaatgacgatttatttatctaagaatatggtccgacatgtgtacgtgtacgtatatatggttacgaagatttaagagtgtgaacagtaaaatgaatgtgaatatataagagctgcaggggaagcagactttcgctgctactgcagagagccccttttattattcatggagtcaattaatacattataatatagtaatatgaaagttttgataagataaagttacaattttataaggtcaataaatgtatataaaatccaaattttgcaaaacaaaagcctccaaagtccaaattcaatagtgtttttggccttcagagttgagacaacctgaggggtttgattcctttgtatccatccttccatacaaaactgaccccaccttatatatttgcatttatatttcatctccatccattatcaatttatttgtttatcactaatttgtttttgttttgtatgctctcagttgtaatacatgcagagtgacaccaatgagtatgtatccatcttatagaataatactgttgaaaaatggaaatgatcaattggctattctaatctaaatttcaagaattggataaaggcaataattctccaccattgcattaacttttcttcttcttttttttggcacatgaactttcaagatgcatgctcaaagaccaattatgttgtttaaataaaggagagggttggctagagagagagagggagatggagagaagatagtcctagactctgggggcaaattgacaactggagcatgttgttgccattatcgcaccaccgattcttcattttttataaatttcaaattaaacaaaaaaaaaaaatggaccgccttctacttcaccactacctcttcgatggcgaccgatcttgtattattatcatatgtctcttatattcaataatgggcgatttaactaaattaacacgagtgagtctacgcagatcgcgtcggtccaaaaaaaacctacaactatttatattattttacagtttctttatgaaaagaaaacaaagaaaccctaattttctaaaggctacgttttcttgtcttgcccgcacacacacacctcgatgaatcgagcaaaagccagccctgcccttgccccaatcgattcatcaaactatttacaccatatatattatattcctcagtgttcttttttctttcttgcgaataaaatgtattgactggatagatatttacagagttctgttttttttgttaatggttaattaaaaaaaaaaactttccaaatgattgttttaatattgagatgcagttacaatccatgagagtaagtatagagtttggccttggcatttgaaaggaggggaagactctagtggtgtaagagagtttaaggagatggagtacaaaagaaagtagcagcgagtgggcatttaaattaacaaaatttaaataaatgcaagtctgtttttttcagtatacaattacaaagtggtccttacgctaaccccatcttttcttcttacattatcatatgctaatatctctctatatatatacaccaactctccatcactctcataagctaatttggtacattaaactactaccataaagtggatttgccaaatcatagtttaatcccacaaacaacgactaacaaactacttcgatcgttatttctgtgggtcaattcaatcgatagtgtgacatagattagggtacaaaattggcaggtcaggatcgagagtctaagacctcagaaaggttgatttgttgcggttgtgattacgagaccattttatgaatatttggttgtaaaaagtttgaatgttaacgcaatgtttagctttaaaaatacagtaaactctatataaattaatatattttattaatttagagagatatttgtctagtttcttcatttaaaataaaataaaataagtttttttgttatattttataattttaaaaacaatgacaagtaagaaaataattatcatcttttgtagttcaattcaaattttaaaaatatgaaacactttgatagaattgaagagcaagatgtatagaaatagagaggtcccctttgctaatagggcatagctttgaaaaggacgacgctacagtttcctcgtaatttcttgatatttattgtgttattctttctctctctacaagaaattaaagtaatagagagatgatcatgtaaatattgaaaataaaaaacaaagtagagtggagaacaaaaagaatagtggtcatagattataaagaaagagttactcgtattgccttttgctgtgcttcgctatttttgcaaaatttggaaaaaaaatgtatccgtcatatttatgttgctgatattttccagcctactattcaattcattcaatcacatattaattaggggcgtgatactactataagatgcgtgtgaacgctaccctttttgtttttatttttaagataaatcaaccaaagtaaagaagataagccatacatttgatataggttattagaatttttattaagatgcaaaacgttcctatagttttgattaagattcgaatcaataacgatgaaacagaagaaaacaatgtatcgacttagaggctttggtgtccaaccaattatgtactgaggattagatattggaccacgtttatcaatgttcctttacctactgctttatcatttcccccaagtttctagttttcttgcaatcgagttctctgaacccaactgaatatatataagctcagccgtcaatgaaaagatgtgataagactgatggtaaaatgaagaagaaagtttaagtagtacgtaatcgactaattaataacgtcgattaacatgaaaatacaaccacactagctagtacatctcagactagtataattctattttaataaagttaagctttaatcattaaccagccattcatttagacttaaaccgaaattggataaagggacatgaagggtgcttagtctctttcaggaccacgtacgtacacaattataagattaacattgactatacatgataactgaaaacaatcaatttattagttgttaagggtttgcagggttcaagtgttacgtgtcatgtttagagcaacatatgtaacgttactatactaacaacgttacatgctgaaacctttgtccaaaaaaaaaaaaaacatgctggaacaaacaaatgcatcgatttttgttttatgtagaaagttatatatcttgagccataaactctaagattctttggccggtccaagaacaagaccatgtctattattattattgttttcaaaaaagttttctccctcatcgatggattttgtgacaatccaagttagtatatcatgattttgtgaattccatggaattgaacgcatccgcaaatgtatttacacatgattagtaattatttcgtgaaattgatgattagaaaatagacttcgcagtaaaacaaattcaaagtatactaattgtgcaagtttacagaagcatgatttgtattaaccaactatctttagttataaaaatcatttcgtgtattgacaattcaattatgcttttattgcaaatacgattatgcggatttatcttttagtttctttttccttttcgatttgattcaccctgaagaacgattacgtaggatataaagggataaacaatagtgacctgttttttttggttgggtttaagccttaatattaatatatttcaaaagctttcataaactttacagaaaaattaaatgttagttgttttggggacagttacaaagaaaagaaaaaaaggcattaagaggatactatggcgaagataataaatcaaagagaaaagagtagattaagagagtgcacgagtgtgtcggctaattacccttgaaaaatcggaaccaaattaagtgactagttttcttattggctatatgagttaaagaagttgtaaatgtatatattcttatatagtgattatgtatctatcaagatctagattggcttggccagttcatttaaagaaaaagtaatcagccaaccaaacattattaagatggagattgttaggtaatctgatcataatattaagaaaatgtgattaccaaaagaatgatatattctcaatccgcagatgaaaattgactattcaaatacttctaatatcttatcaagcagtgatttatatttaatctaaataccatcgataactagatcaactgaagaatcattcatattatttgatacattaagttttttttgttaactaacacttaatacgtattttaattttaggtttaaaaaaacgttccagacgagatatctgttatagctcagttgttacttgttagggttttattgtgatcctaaaatgaaatttaaagtaaaataaatataaaaagcttacgttttaataatttgtattaaactaaaataatattcaagaaatattagccaatacgtttgatatcacattctgggagactcataagattttaaaaattcacacatttgatttaaaaactaaggtttagatcttcttttataccagacatgatgcaacgtagcaacgagtacacaaaaattgtaagtgaacaaaaagaaagtggtgattggaattacaataaaggacaggggtataaatgtgtgaattaatataaaaagtcaacagtaacgaccaagactgaaaaaaagctttgtgaaaccaaaactgcagcaaacccataaaaaaagtttactttcgataattagcatttattaggacgagattgttgattaagtacttattaatcatttgattatttaaagtttcaagatccaaattcaaagaaaaaacaaaagatttctccctaagcccacgacattatcagctctcttctcctcatatcccaaccatcaatcatctaactttaatttctattcgttggacaaatctgattattttttatttttgttcgatctcaagcattttaggtggcaaatgaataatatggggaaatatttaaagaattataattatgtaaggaaataaaagaaaaataagagaaactaggatagtggtaaaaggacaataaggtcacatgaactgaaccagatttattcatgggtccctctaaattggttctcttgcccatatctctccatcatattcattctcatcacaacattataactctgctgatttctctcttcttgttttctcattcttcttctaaaaaatcttgacaactttttgtttttgttttctttctctgaattttttaaaagagagagagctatgtagctatgaaacagtaagagatatagatatagagagacagagaaagatgatgatcagtgaagttaggctaaacccactttctatttatgtataattaggtcaatcacatcaccaatctcctcctccaattctcctcctctccttccaaattctagggttttgcttgtatctcaccccctttctcaattccctagggaaactgtgaatttcatcaaattccattattttttggtcacacccttaaagagatctgagagttctaaagatgatgacagatttatctctcacgagagatgaagatgaagaagaagcaaagcccttagcagaagaagaaggagcgcgtgaagtagcagacagagagcacatgttcgacaaagttgtgactccaagtgatgtcggaaaactaaaccgacttgtgatcccaaagcaacacgcagagagattcttccctttagattcatcttcaaacgagaaaggtttgcttttaaacttcgaagatctcactggcaaatcttggaggttccgttactcttactggaacagtagtcaaagctatgtcatgactaaaggttggagcagattcgttaaagacaaaaagcttgacgccggagatattgtctctttccaaagatgtgtcggagattcaggaagagatagccgtttgtttattgattggaggagaagacctaaagtccctgaccatcctcatttcgccgccggagctatgttccctaggttttacagctttccttcgaccaattacagtctttataatcatcagcagcaacgtcatcatcacagtggtggtggttataattatcatcaaattccgagagaatttggttatggttacttcgttaggtcagtggatcagaggaacaatcctgcggctgcggtggctgatccgttggtgattgaatctgtgccggtgatgatgcacgggagagctaatcaggaacttgttggaacggccgggaagagactgaggctttttggagttgatatggaatgcggcgagagcggaatgaccaacagtacggaggaggaatcatcatcttccggtggaagtttgccacgtggaggcggtggtggtgcttcatcttcctctttctttcagctgagacttggaagcagcagtgaagatgatcacttcactaagaaaggaaagtcttcattgtcttttgatttggatcaataataatgatgatgatgaaattagttggtattttaagaaaaaaaacatacatatataattctatatatatgacaacataatgcattgatttcattataaatttatcggataattgatatatgttctaataatatgcattgtcaatagagagattttatggttttcggatatatagtctctttttatgtgttcttgataatgttgattgtgtatatagatgaagtagtacttctagcctttgtaagtcttttttcattactctcaattatatatatcaatggatcaaattattatatttacatttggcaaaacagatctataggttaagtaataagattgcaaggctgtatagagtaggaaaaaatgagtacaaataagtgagatattataagaagagacatgaactaggattgggatcagtgtaaacccatgtctctcttgtatgtctctgtggtcagaaagtttcagagtttgatgggctgtcttagaaaagtgaattgtctctatatatatgtgtatgtgtgttgcattttgtatttatatgtagatatgtatcattaattattgtccctgcaattaatttggtgatgggtttctatgtttggttactaaatatggctgctgctgctgctttttctctgaagctattgctggatattagttaggcagagtttgcaggagatgggcagtgacaaaacaataattataaaatcgtgttttctttatatcattgtgatgtctatattagcaaaaagagaagagcttctttttttcatcttggggcgattgaaaaaggtatgatctgttgtcacatatattttctgatgcactagttaattaataagtccctatattagcaaaagctaaaggctataaaattaggaaaatttaaataacatttttattttgtggtcagttatgctttgtgttttgggtttctctttgcgtctcttggtctgagctctgaagtattattacacaacacatacattgcagagacacatttaatgtaaaatatatattatctgtacacacatatataggttacaacttacaacatatatgtgaagatgatatgtagatcatatacaagtaactagtatgatttgattttcacatgtgtgtactataaagctagcatgcatctagttatatgatctggttaattcttactcatatgatggttatgacatggttttcttataattttataaacgcataagttattctcaaatttagatttagggtttacatatagagtatagctaactcacactaaaggtttgcaaatgaattttggtgatatttaaagatgcatatatacgtctatagctaacatgcatataagtgtttaaagccgtgatattaatccattatcatcttttcttttctgtcaaaatgtaattcattagcatcaaattatcataagtcatatttgaatgatattacatattgttactttaagataaatcattgaagattacagttacatctactgaagttgcaatttagcgagtgcatcacatatacaattatatagtgtttaagttttgagtttttgcatgaacaattgtgatttcaataaacactgattaagtagctatatttttggtagatttgcagatacttcctttttctttatgatggggatttgcacttctattactcttacaaaagaatcactttattgttttttgctcagttttcatcgatccttattaaacagaaaccctgaataatatttgtgattaagtttcacgaaaaaaaatctgatagtcttagtagtagtacattcgaatagattctgtgttcataaattttttgaaaatattcataaaaatggcaattaatgaaatctctctaagattttagatcagtctagcaagatacattttttttttttttttgtcaaaagcaagatacagtttaatgcttaagaattaagattggcttttatactctcttaaaaatctaggatataaacattatccaatttcgtaatttttagccttttttgttttttgttttctgtttttaccgtaattcctcgatttcttcaatctgatgtggtggattattttaaccgtaagataacatcaaatctcaagagatagatcgatgtcaatgagaattgtagaacttaactagagaaaatgttagattgaaatgatgtgaaaactgaaaaccctagttagaggggaattgggattttggcgacttttttgaaactcacagaaaaacaacctacagtctttgattgaaacattcaaacgtctcgtcgtttcaatgagccaaagtaaagtgacattcaagtttgactttgacctctgcgattccagtcttccaatatttcccactcagaaaatcctacattataaactcttctataaacatttcccgagattattaactttaccaaagcgtacccattgagtattgactcatgtttatagataaaatgatactctattgagaaaaataaaacgaacgtaacaaagcagacaattataagctgacattgtcttccttcttattctaaacaaagcagacaattataagctgacattgtcttccttaattcttattctaaacaaaataatagatagtaaagcataaataaagaaaatgaaaatatcatatcattgtacaacaactctgcttaatgatcagtgttgtggtatagtagagcaactaaacccaaaatttggctcaagagctgcaataaaacaaaagtttagatcagaacacacagctccactccaaatattcaagttaattcaaatctgatattacttacttgtgttcttggtccagagaagttgagtatcaatcaaagaatgattcttatcatcgagccgtttccaagttttgattgtatcaacagctccccaacgtccatacatagtcttctcaagctgagcctcaactactcttactctccttgcccaaccaacctgtccgtacccatgatacctaaaacaattaaaagaagcgtgtgttacaagtaaggcttttatgagaaaagtagcgtgtggtacaatttacccggctccgcctgcgtaacaaaggttgatcccatggagttcggcacagaagtcgttgacgtggtcgtgaccactgaaaacacctttgacttcacctctttcgacaagtttggtaaagaaaccagagttgataggtggagaacaagtagattcttgtcttactccagtcatctccgtcgatttgttgaacaatgcaaattccggcatcggaatgtggaggtaaaccaatcctggtgccgtactattctgtggaaatggccacctcttgtgttccatctcaagccatttagaagtgtgttcataccaattctgttgagaggttttgacccaatcatatttgtaaccaaaaccatcaagcttcgtgtaagatccaccgtctagtagatagagattgagaatggatttgaagaagagaggggagccaaaaggaccctcgatttgtagattgtaattaccaaaaccgtcgatttggtatagccaagcatcgggagggtttacttgagacaacgagtttgggagtttcatgatgtatttcatcattgtttctctagtcatgtcggattcttggtcgtgattccccaaaatagccacccatggaatccccgattcgatcgcaggagcaaatgccatgtccatcgattttgccacgtcacttgtctcgcacaatccatatacattgtctcctgcaatattgtatgtggtgttttaggttttttttttcacgcataaacattttttatacatacactaagttaactaaaatatttgtatagataacaaaacacaattattgtataaaattttgtattatttgaagaatttggtaccagagaagacgatgagatcgggcttctcggaagcgatagttcgctgtaaaaaggaggtagtattgagatcggagcagtaaggaaattctgcaggtgaaacgtctgagcattgcgtctctttgccaaaaccgtagtgcatatctgacacttgcagtatcttgaaccgaccatcagtattaaaccggagctgccttctaccgaagtcgaaggcggaaacgtgacatgtcgaaagacataagtagatcaaagaaacacttagaacagaggatatgacaaacctcctccgagtttcctccattaattcttttaggttagtgactatgaaactggagatgagaaatgataacgagaataatattttattaggtatttatagcaattttaattagattttttccccaaagattatgatagcatcaacaaacttttattctaatggtatattctacaattttatcagtatctaaccattttggcatatgcttttgatttgttcttgacaaatatatatttttgtgattttctgaaacaatataaattcataaatattaatttctagataaaataactatgattttaaaaaaacacttattagatacgacgtggacgagcccaaatagacaaaaacccattttaatgctaatttacacagaccaaagaaacaaaatcagaggaagaaacaacaaacaatgctcataataatacacaattaaggatctctagtaaccctattgaaagtttgaaacaaactaatcacagcttcttcaagtgttcttgtctttagtagcagcagcatgagatttgaaccatggaatccacaccgaagttgtcttctgatatgctctataagcttcagctctgtattgttgtttcaccatccgacgctcgacaaggatcgttacatagaccagacacagagtattgaccaatgcaccaatcaaagtccacccttgaccaaggttccaagcaaatatgaccaatccccaccaccacaattgctctcccaagtaattaggatgtcttgagtaacgccacaaacccgagtccagattggggattttgggctttccttgctccttgagcttttggtttccggttacaaactcgtgaagctgtgtgtctgcgaagtacgccatgacgattccggtcaaacagatagccgaggaaatgaagtcccagatgtttagtggctcatcaatggaatggatgacatataaaggcagacatatcccaatgaggaagatctgagcaaattttggaaaaaagaagcaacatgagaaacagaaagcatataagctaagcatcaaatatatataaaggtaacaatggttcaagcccttataaccaaaagactatcctgttctccaaatcatcctcataaaggcaagcttagattaaaaacgagctctttgaggcaattcatcgaacagttggtggtcatgtacctgctgagaaacgtagacagagaagaaggagagccaccaccagtgtttcccgtactgtttccgtaagtcgttgaacctccagtcttctctagctccccattcccaattttcccgccggaagtagttatgagtcaacctaatgctccaaatccatgtcagagttatgacaatcatggatctcagcttattgtactgtgacaatggatgcgaagcgaagtaatgaaccagcattacaggtatcactgtccaatacacatcgatcatctgcaaaattaacgaattttttcaaaaactaaaaaattgcgaattttaacaaatgggtaacagatttggagactatggatgcgtacccagtggctagattggagtaaaccgatgacccagaagagcacattgacgtttaagaagaagagaaggtttgctaatagaagaggatgattcaaacaccatgattgaatagaagagagctctgaatcggaagatgaagagtaattactgagaaaggtgaggtagaatacgatagaaggaagtggagcaagaaatgcgacaatggcgtttctaagattccgattcattttctctcgaataagtcgttgatgttgggttggcctgtaggaaggagaaagagaatgcaatttataaactgagcttaaagaatatctttggacttttgggttgggttctttgtggcgtgtatgggcccatgttggcccactttgatcactgatatgattagagtcttctgtttaattatacttttggtgaaaattaaaatatgatcaactgtagataaagatattagctttttgtaaaagagccgaaaaagtcagtaatgaagaaaataattggactatgattttgtatcgtaatgattatggtatgagatttctgactattaagtaatgaaagtaatagtgtaaaatatatacattaaacaatataaactcaaaaattatgaaatgtaagtggttaagcagaaatagggacaaatgattaacaaatttcagagcatggggaaagggaatcgcaataataataactaggatttaatccgcggtaaaccgcggacaatcggtttatttggtttttatactaaatatttgaataaatttgatattttaaatttataaatataaattttttaatcaaacataattaaataataattgggatttttttttgttgttatttagtgataagataaatgtgttaaaatgtgtttaaaaatgtgtatgtaattttagtgaaagtaaaatatttacaaaaatgtaagattcacaaaattggtataatattttttatgattataagtgttttttttaactatttgacaggttatacacttttttggcaaaataaagaccatatgaattatgttatttataattatatgtctttaaagtgaagataaaaaaataaaattatttcacttatttttgttgaacggtttagattgaagggaattaattttattgaacggtttagattcaatcagatcatataaagtttagaagattattaagaccaaattatctttaatgattttgaatagcaaataacaaaatccaaaattgaaatcaaaattgaggccaaattagacaaaattttactttgtacttccccttttaataataaggggatagtgaattc

SEQ ID NO: 386 - DNA, 106329 bp, Arabidopsis thaliana
gaattcctcggcgactttttagcccaaatccttggtctcctggtgcttatgggaactggaccgtagtaaaggtatgtctttttctttgatcttttaggcatatgcacttctacagactgaaacattaagacttataatgcctagtaacttgaaaatttgcaggagatgcttgatgttccaatcgtctacataattggagctttcattccagcatcaatgattgctgtgctttactacttcgaccatagtgtagcttcacagctcgcgcagcagaaagaattcaatttgagaaaaccgtcttcttaccactatgacttgcttcttcttgggtttctggtgagaatttgcagaaaataaaagaattatctatctgacttcatcttttggaccctgtttcatacttaagaatgtgaatgcagacattaatgtgtggtctacttggagtccctccatcaaacggtgtcattcctcaatctccaatgcataccaagagcttagcaactcttaaataccaggtaacatcactgaccgcggtcttatttttcagtctttcctgagttttgagattgacgtttgctctctctctgcagttgcttcgtaacagactggtcgcaacagcacgaagaagtatcaaaacaaatgcgagtttgggtcaactctatgacaatatgcaagaagcttaccatcacatgcagacaccattagtataccagcaaccccaagtaaaaaaaaaaatctgaaaaactttctatgttttgtcaatagaacacgaaactgagagttagttctttccattggcagggtctaaaagagctcaaggaatcgacaatccaagctactacattcaccggaaacctcaatgctccagttgatgaaactctgttcgacatagagaaagaaatagatgatttactaccagttgaagtcaaagaacaacgggtaagcaacttgcttcagtctacaatggtaggaggatgcgttgcagctatgcctatccttaaaatgatcccaacatcagtcctttggggctattttgccttcatggccatcgaaagcttacccggaaaccaattctgggaaagaatcttacttctgttcaccgccccaagtcgccgcttcaagtaataactaaagttgcaatctttttctcacattcaacttcaaaaaggctctcttttttctcagttcggtcacatttctatttgtagggttcttgaagattaccacgcgacattcgtggaaaccgttccattcaagacgattgcaatgtttactcttttccaaacgacttatctcttgatctgctttggtctcacatggataccaatcgcaggagtcatgttccctttaatgatcatgttcttaatccccgtacgacaatatctcctccctagattcttcaaaggagctcatcttcaggacttagatgcagcagagtatgaagaagctccagctttacccttcaatctcgcagcggtaaccaaaaacccatttacaaagtcaataactctgttttcttttctttagcttcttcttattgttatttcaaacacgatcttgaacaggaaacggagattggatccacaacatcgtatccgggagatttggagattcttgatgaggttatgacccgaagcagaggagagtttagacacacgagtagtcctaaggtgacaagttcaagttcgactccagtcaataatcggagtttgtcacaagtgtttagtccaagagtgagtggaatcaggttgggtcagatgagtcctcgagtcgtcgggaatagtccaaagccggcgagttgtgggaggagtcccttgaaccagtcgtcatcgaactgagattatatattcaggaagcttaataaaacaactaatctaatgaggatggattaagaatgtttaattagttaattaatttgatctttagctcttgaaaaagaaaagagcttcttgaatctctctttagtttatgttttgtgtgtttaatcccctttcgtggtgtttcatcttcagtcttatgtaaaatactaaaatgtctgtcttatttcgttatatatgtaaaattcgttaaatattttcaactgttatgtttaccggtcagcattacatacaattaaaaattttgggatcactgaaatttagataatttggaagttggaactaatatcttgagtttacatgcaattgtttttcaacaggtgaaataatttacatacgattctttatgattttctcaattattaaaagacatcggaaaatgttcaagaactcgtggacgtgcaaacatatgatttatcaatgtcacacacatggtggctgcaacttatttgattaatgaactctgatcctgagtgcaacatccgaaatgaaaccacctagttttacaagtttcgaatataccaccaaaaatttagcttcaagcatcgaacagctcttacagaacataaaaaattatgacgccaaaacaattatacaaaatacaaagataaatacttactgtcttaaggctgttctaaatcttttaagagctccgtttcgaatataaacaagctacccaaaaatatatatgaaattgcaagaaagaaggctgtatcctatatatgaaacgatagattgctacttttaaatgatgtcaaaacaatttttgttgaatcgttcatatatcgcttatgctattttcaaattagaaatacgatttcgtaattaattcttaaatttgaaaaatgattttggaaaagacccatcgattatatcgaaccgtatttaattttattacgaaacctttacgaaaaaaaattaaggataacgttctacaaagataaggattatgtgcgcaggagatctatttacacatgcaatgcaagtaaacagtacgtaaagaatatgcatcatgatgtgttgcatagatacttttctttgatttatacatgaaaaacactcccatgggaaaagagtgggatacatatggaaaatgaatgattacaatttggagcaaaagcaaattaattaatgcttttgagcatgataagagtggggtggctatctggttcaagtatagtcttgtcgttcgaataagcactttggtactatatatataagacaattcaagggtcaacttctataccaaatcgaaccagacgacgaagacaaaagttgaagaacacgatcgaatgttcgatatcaataagaggtgaggctccaatagcttgaacatcgtcattatgagggagagtgaaaaggaatggtttctaattatcgatataaaagtaaaaaattagtagcacttgagtagaaatataggtatgagaagtcacgagctaattgagaccgacctcttgggaaaagattttttttttttttaatagatattaaagttagggtttattttgctggtgtaatcatatgataaaaaaaaaaaaacatatgatgatatatcgtatatgatttgttggtagtgatgatgatttatatcataatttctaagaactgtggttaaattcggtttgaagcatcaagcaaggaatcacaaatcttgtacttatgagagtaatcgtaaatcgtaatacataggtaacaatcagttctcaattttaatttaagttacggatttatctaagatgaatttacgatttttttcgttagagatgcgttataactttaaagatgtatagatatatgagttgtagacgaaataaaaagaaattagccacctttgctaattgctcactatattctattgcatgtcttattatgtctaaaatacctaattacgtaccacaacaaaacttggaaaagaaaacgtgggtggcgaacgaaagaggagctaataaagggtacacagacttgcttatccttttattgctaaattttgtttttttttggcattaaccattgactcgatcgatagtgaaatgtattttgtgtatcattgatattcttgctgtctgcaataatgatagataataagttggcttatgcataggtcaccgtctaaatcatgcaaaggaactttgttttatttgttttacgtagactaaaacagaactctttcgcattcattcgtctcttcctcaccttaaaagcaaacccccacttttgatggaaggagattagacatactcgttgacccttttctacgtggcatttcccacagtaacttgaccaaaacccactcttattactaccacatgttctaattctgtaatctgcgaactataatgtacaaattaaaacctgttggtcccgatcgtatattaatagttggctgagtgtgtatattggcttgtgcggttttcacgataagttgggtgggtggcaaaatccaaaatcttagataaattggcttgtgcggttttcactattccgccgtactagctagttaaaaaggcccagtaaatgaaaagaaaaagtttccagataatctgcacaataactaaaaaggcccagtagataaaaagaaaaaaatatcggcccaaaacaatggaaaaggccccagtaaatggaacacaagccgtgagatggcgaattgtttaatatttaaaaagaagtgttgactttttattgttcaagatgatattgagattccgatgtacaaatctctttgctgtggttttgataacagaaattattaatcagggctttagaaaccggtttaacaaaatagtacatcttagccgatgaagattcatatactgtagcagcttcaattatgtttggttaaatttggaattgcaaacattttggttaagtttagtatttttgaaatttgttgactttttaaaaagtaaagtaactgacaaaaatacaacattatagttttgggcttaggcccatcaaagcattctttcattaggcagtggcggaaatatttgttatagtggttaattttaatatcactatattataatatttaacttatttatctcacattaaaaactttattattaattaatttaaatattttgagcatttctatttcttttttttaataattattgttttctgataaaaagatttgtagttctagaaatatttcaaaagtgtgaatttgttaatttatcattttctactaaatttttttaatatacttgcgagttaaaactggtttaacatattttcttactcaaatttatttatctaaatgtataaattagtattcatattaccgcatttgtgtataggcgttaatgtagagagttccaccattgatgtgccttcccgtttgaatttaagcgttataaacacattttgtacaatatgtgaagatccttataatcagtttgtgatttattttctttctttgaacgagttctatattgcaaatgagtatgatgaaattaatttgtccaatgaaatttaagacataccaatgttgatgcattttttcaattattttattttcattggacctttttggaatcatatttgttagttgataattctgttaaccaaaagagagtaagcaaagagttgacagaagattcagctagaatgcgcaaagacaaaaagaagcgtcttgagcagaaaaaataaaaaaaggatctggagctgcagatcaaagaccttcaaaataaggttatggattcggcaaagaaggttaatgagctggagctacaaagaaatcaaattgagaaggagaaaaaaaaattgactagatacatgaaaaagttaatgaacataaagttaattatatagtaaacagtgtaacataaattttcagtttattaatagaaaattgagaaaatttatcaagatagactagtgtggggatctatgtcaaaaccataaatgtgaccaagctcttagtaaaatatgttaccatttagataaatatgatttgtttctttgtttgtaatcaacatatattaagataaaacttaaaactacacagatttagtgaaaactttttatatatcattgaaataatgattatctaccttacatagatttctagtgcataatcgcaaatgattcacgtgtataaatattagcctcatgagtcgtgatgtactatcgccctaatataattgctgtgtcctttgaaacctatttaacaatgtcgcaaagcaagtaattgcttaatttctctctttcagtctctcacacacatttaacatttttattaattcgtttacaagttgttgttttttttttaatatataaattattattattattattatttttcattcataaaattccaataatccgaaaaacgttacaagaccaaacggtccagcacagcacgcaggccgaaagagacataaaaacaaaggcccaaacaacacagagagggcccaacaacaaaagagccaaatactgaaaacctgaagcaggccaaacaagcccaagacaaacaaaggaagcccctgcaccttggctcccaacctgcaacaagcacgacaattcgtttacaagttaattacatatctaatgatctactttttctatatttatacagaagaatggatggcaaaatcgtgattataacagggggagccagtgggacaggagccgaatccgctaggttgttcactgaccacggagctcaagtggttgtagttgacttacaagaagagcaaggcaaaacgtcgccgtttcaatcggcaaagacagagcaagtttttaccgttgtgatgttacaaacgagacggaagtagaggacgcgtcattaagttcaccgtcgaaaaacatgggaagctagacgttctgttaagtaacgccggcgtcgttcttttcagccaacccggcgtcttggaaacaccgggaagcatccttgatttgaatcttgaacggtttcaccgaacaatggctgtcaacgttcgtggagcggctgtgtctatcaaacacgccgcacgagccatggtggagaaaggcacacgtggctccatcgtttgtacgaccagtgttacgtcggagatcgtggtcagggacctcatgaatacacggcgtcgaagcatgggctcgtcggactgattaaataggtttgtggtgatttagggaaacatgggattagaataaacggcgtcgcaccgttcgctgtggcgacggggtcacggggatgactagtcacgacgaggagacggcgaagcagacggaggagtattgcgaagccagagggatttttaaaggtgttgtgttaaaggctcgacacgtggcagaagctgctctgtttctcgcttcggatgattcggtttatatcagtggtcagaatttagcagtggacggtggtttttgcgtcgttaagcctatttgaaactaaataaataaataaaatcggttatttacttattaaagtgtgtatatttttttcaaccaaataaaaacattattatataggaacaagtgtcactattatggtgcataattcagaggtcaaaccaattcttgagccattaaaaaagtaaaactcacatggcacgatagagttgacttttaagatacatatacccccatgtataaatatccacacatagctctctcgtagctctatccttcaaattttcataacgtctcaacaatgtctggaaaaaggcaatttcctcatctgattttgtaacctttctgctcaactttatacccatatacataaatgtgtgtttctaatgatttgttttttttttccagattggatggcaaaatcgtaattattactggcggagcaagcgggattggggctgagtccgttcgattatttaccgaacacggcgctcgagtcgtgatcgttgatgtacaggatgagctcggtcaaaacgttgcagtttcgatcggtgaagacaaagcgagttactatcattgcgatgtcacgaacgagacggaagttgaaaacgccgttaagttcaccgtcgaaaaatatgggaagcttgacgttctgtttagtaacgccggcgtaatagagccgtttgtgagcatcctcgacttaaacctcaacgagttagaccgaacgatcgccattaacctccgcggcacagccgcattcatcaagcatgctgcacgtgccatggtggagaaaggcatccgcggctccatcgtttgcaccactagcgtcgcggctgagatcgctggcacggcaccacacgggtaaaaactaatattcacaacaaagactttttaattctttagacaaaccaaaagtgcactaactaatttcgttttcaaaaccatgtaataataaatagtggatcgctgcaacggagtattataattaaaagaataacaaagtgatcatgttgtcacgatttattgacaataattttttatcgttaaaattcaaaatagaatgaattgcttactaataatataggtacacgacgtcgaagcatgggctgttgggtttgatcaaatcggcttctggtggattaggaaaatatggtataagagtaaacggcgttgctccatttggtgtcgcaacaccgttagtttgtaatggtttcaagatggaaccaaacgtggtggagcagaacacgtcagcttcggcgaatctaaagggcattgtattgaaagctcgtcacgtggcagaagctgctctgtttttagcgtccgatgagtcggcttacgttagcggacagaacctggctgttgacggtggttactcggtggtgaagccgtagctataacaacttggccacaaagatcccatgatggaatattggaattttgtttttttggtcaaaagttgacttgacttaattgttgtagaggcatggggattgagaagtttctgaggttgcaaatttccttgaaatgtggatgttgtatttttatatggtaacattcattatccaacatattgcacatctcgaggataatttatttaaacaaatactacaagcttatttgataaatcgtctttctagtctctctattttgactatgggttttgaattttgatatttcagtgaagaatcctaaccatttagtactaatttacacgttatagtttcaaaataattgattaaaaaacaaaataggaaaaaaaaaattgattaatataaagtctacgataaatacagagaacggagcatatctagtcgctctttcaggtctacttgacttataattaatctgtctctctgtctacttttgaaatccttcaaaaatgtcgggactcaggcaagtgtgactccaaagcatttttattatatgtttactgatttgtttaatttacgtgtacgtttatattctataccgcagattggatggcaaaatcgcaataataacaggcggagctagcgggattggagccgaagcggttaggctgttcacggaccacggagctaaggtggtcatcgttgactttcaagaagaacttggtcaaaacgttgccgtttctgtcgggaaagacaaagcaagtttttaccgttgcgatgttacaaacgaaaaggaggtagaaaacgccgttaagttcaccgtcgaaaagtacgggaagcttgacgttctctttagtaacgccggcgttatggaacagccgggaagctttctcgacttgaatctggaacagtttgaccgaaccatggcggtcaacgttcgtggtgcggctgcgtttatcaaacacgctgcacgagccatggtggagaaaggcacgcgtgggtcaatcgtatgtacgaccagcgtcgcgtcggagatcggtggtccaggacctcacgcgtacacggcgtctaagcacgctcttctcgggctggttaaatcggcttgtggcgggctagggaagtacgggattagagtcaacggcgttgcaccatacgcggtggcgacggcgataaatagccgtgacgaggaaacggtgaggatggtggaggaatatagcgcagccacggggattctcaaaggtgtggtgcttaaggctcgccatgtggcagaggcggctttgtttctggcttcggatgattcggcttacgttagcggtcagaatctggctgttgacgggggttatagcgtcgttaagcccatttgaaggagagaatattctataaatcaacacttattaacgccttaatattttactttcaacgagcttttcacgccattatctttttttttttttttttgggtcaaatcacaccatggaataatcgcctataacgttacgtaagcaattacgtatgtactatagttaattcggataaataagggtaacgttattaatacttactattaaagtttctttacttgtaatttactgcaaaaaacaattgttggcttaatggttattaattacaaagtatcagtccacaatcacatcaaagaatttgtcgggacaagaaacagaagagttgacgaagagaagtcaagaagaagaagagtcgtcgaaaaagaaaagtcaaaaagacacacaaatatcttgggcttggcttcatcaccaaataaagaaaaagccgacaaaagtccagaggcccattaacagctcaagcccaagatcagattcaaaaacacaaacaaagatttcagaaactcaatcaaaaacttcctcctgtacaaattacaatgcaaccgttatcaagttcttttttttctttgatccttaaataatgatgataagattgaaagtctcagatcatggttgcataacattagtctataaaaggaaacataagatgtaatcaaaatcataaagttgtcatctttaccgttatcttatccttttcattttctcttcacaaagaagataaaactagaagtactaccatcaagttgtaccaattaggcgtggagccatggaaaatatgcgtgtaaaaacatcgcagatatggatggacatgtgttgtttcaatggtagacacaattagttttttgaaaaaatggcatttggaaattgggatgtcactgttgagtaactttatataccggaaaacttactattttttcccaaactcatctaaattatatctaatttatatgtctttatcaactcaaaactatgaattaaaagtatgatggaaatgaatccaggcataaaatatttacttcacatgagtagcaaatagaaatatagatttgggatatttttttggttgggttaaaggttgatgtcctcatgtggatatcaatttgttacttaaacacaaacactggttaaatttagactgttataggatatcaattcgtggttagcggagttaattattgtttcttttacacatgtcaacaccgtgtttaatcttagttcaaatctcaaaatgtgtgggtaagttatagctagaccacaagaagaataaaaaggacaggaaaaatcaagaaaacgtggagtaaagtggtaaaagcaataaaatgtgaaatgcaactcttgggttataaattaagtgtacacatatactcagtcgacattttatctcagtttgtatacctttcgacacatcaatgtcgggactcaggcaattgctttatctctctataaacaattgtgcatgtatcttacatacaaatgttgatcagttcaataattacttgtccatgcagtagattggaaggcaagatcgtaattataacaggcggagccagcgggattggagccgacgccgctaggctgttcacggaccacggagctaaggtggttatagttgacgtacaagaagaactaggccaaaacgtcgcagttttgatcgggaaagacaaagctagtttttaccgttgcgatgtgacaaatgagacggaagtcgaggacgcagttaagttcaccgtcgaaaaacacggaaagctagacgttctgtttagcaacgccggagtcttggaaccactggaaagcttcctcgactttgacctcgaacggtttgaccgcataatggctgttaacgttcgcggtgcagctgcgtttatcaaacacgcggcacgagccatggtggagaaaggcacgcgtggctccatcgtttgtacgacgagcgtctcggcggagatcggtggggggcatcatggttacacggcgtctaaacacgggcttgtcggcctgattagatcggcctgtggtgatttggggaagtatgggattagagtcaatggagtcgcaccgtacgcggtggcaacgccaatgactagccacgacgaggtaacgggaaagcagttggaggattattttgacgccaagggaattctcaaggggatggtgcttaaagctagccacgttgcacaagtggctctgttcttggcttctgatgattcggcttatataagtggtcagaatttggcggtggatggtggttatactgtcgttaagccaagccgtgattaaaactacaatcaaaatcgggactttttacattttgaagaataaatgtggtattaactattaagaaacatataagcaacagtatgtatgtaaactgtaatacattaattttgaataaagcaagtcaaaatatataattttaacttacaatattgaaatcgttaaaaatgcttatatcctattttgtgtgtagtttccccctataaatctttgttttcccattttattttgttaatattgaccttgatatttttggacttctctttcatttattttatcaactcttaattttaaaattattcatgattcatgttttcatgtacatgcatctataagttatctaactgtcaatttacacgagtaacaaacgatcacaacagctggtcgtctcgctttaaaaacaacccacctgccgaaaattccactccatgcataaacaaaccactttatttttttagaactaatcaaatgataaaaaaatttgtagttagtaaatcatggcattgatcgtttattggtatgacttcatctgctttgcgatagttgcggctgcaatcgtcacgtccttgtggtttctatcccgcagagacagaggctgcgtagtaattgatgatacgtcccacgatagcttgttaccactttatagatcgaacaaccgtggttcggctcggttatgggccagttgctggacaagattacatcccggctggctactctttactcgttccacctcttttctctccatggctgctttattggcttgggatgtcatcaagtgggacgcaagcatcttcgtctattacacagagtgatctttcttcttttagtgttctaagccaaaattctgaatgtaatcagatccgcattgttcatgactaatgttatttggttttgtaacagatggaccttcatgcttgtgatcatctactttgcggtacgtcgtaacagcttttcgaataagagtgttaaatccgggtattgtttatgttcattgggttctctgcagatgggtattgtagcttcagtatatggttgtttgatacatttaaaggagctaacacttgaaactgatgaagatgtggtagtagaaaaggtcggagatgagttccggcgaagattagaggtttgtggttgtttcatgcagacaatttttcaggttagtgtcaacagtcacggagtcccaattttttgcttcatacacactttcacacagtaactcttctgtctggtttgtgttaaagacaagtgcaggggctgtagtgctgacggacattgtgttttggttagttatagttcctttcctatcgactactcgctttgggttaaacacggtaagaacgaacatttcagcctatgtttaacaatgaaactactcaagactctactaatcgaatttatgatttgatgcagttgacgatctgcatgcacacggcaaatgcaggcttcctcctgcttgaaacactcctcaatagccttgtaagcaaaaatgaagttaaccaagacaatagattttaagaaaagagcctaaagaaattcgtttgttctgatttcagccattcccttggtttcgaatgggatatttcgtgctatggagttgtctctatgttatattccaatggatcatccacgcatgtggcttcacttggtaagcaataacgacttacattgatgatacttaacccacaacttagcgcaaccaacctattctaatcaactcgaacctatctcaggtggccatatccgttcctcgagctagacaagccatgggctccgatatggtaaccatcctcattaattctatctaatcaactttataatcgttttaaagatttgacggattgtgattatacactaacaaaacaacatattcacaggtacctatgcatggcaattgttcatatcccttgctatggagcttatgccgcaatagtaaaagccaagaactcctgtttcccatatctattcccaaatgctcttgtaacttagattagattgtgtgaactataaatcaatcatgcaataagatttgaaagtaattcaaataaagagcataaaaatatccataagaaaaacctagatatgaaattcaaacaagttcaacataagatccacaacatccaaaaacaacttccaaattccaaaaaaaaagcagtattcaattcaaaatgatagagatcgagatgaaaatcattcctgagctccttctttctggtaaacgtaggtgagaccacacttaccacagtagtgacgatcgaaatgactcgccatgaaagtcccagcaccacaggttgcgttagggcactccttcctcaaacgctgaaccttacctgaaccatcaaccttgtagaactgaagaacagcgagcttgaccttcttgtgcttgtgcttgatcttcttaggcttggtgtaggtcttcttcttcctcttcttagcacctccacggagacgaaggacaaggtgaagcgttgattccttctggatgttgtaatcggctaaggtacgtccgtcttcgagctgctttccggcgaaaatcaatcgctgctggtccggtgggattccttccttgtcttggatcttggccttgacattgtcgatggtgtcagaggactcgacctcgagagtgatcgtcttccccgttagggttttcacgaagatctgcatctttttttgcttttacggcggaagaaaatttctggggaaactctttaagtggtgagaagaaataaaagagtagtggttgagaaactagggttttggagctcgcttttacaattacgtaattacccctttgaaaatgggttttattaattacattgggcttcaaaggccttttaacgaatctcagaaaattaaaaaatgagttggagatgcgggggatcgaaccccgtgcctctcgcatgcaaagcgagcgctctaccatttgagctacatccccaatatgtttacttgtgtctgaattaaaataataataggattgttgttccttcgtctcttttctcttataagtggcctgttgcaatctctctctgggtttctcctgagaaaatcgttggagttagaaaccatggatgatagttgcgccgtttgcgcggagaatctcgaatgggttggttacggatcttgtggtcacagagaggtttgctctacttgcgttgttcgtcttcgtttcatactcaatgatcgtcgatgctgtatctgcaaaaccgaatgccccgtcgtctttgtcacaaaggttagggctttttccttaatctgctcaaatgtgttgctcttaaatggtaaaagataaacttttttaagatagtgagaatctgagactaaaacttgtaaatttgcttgaatcttgggttacatttgctgtgttctattgcaggctttgggtgattatacaaagacgattagtgatttctcgactactttcccatcagtaccaaaggaaggtcgagtaggatccttctggtatcatgaagaaaccaatgtttactttgatgacttgaaccattacacaaggattaaagcaatgtgcaggctctcttgcaatttgtgtaacgatacaaacaagactcgaccaaagaaagagcctaaccattgtgttcggtttaagagcgttgaacacttgaaagatcatttaaatcatcagcacaaattgcatatgtgcagtttatgtcttgtaggtcgtaaggtcaggttctgaaactaccctcttaggtttaagatatctctgctaacgatttatcatgaacaagctcatgcttttgttttgacaggttttcatttgtgaacaaaagttgtttactaagggacagctgaaccaacatataagtagtggtgactcggaagttgatggaagtgagagtgaaagaggaggtttcactggtcatcctatgtgtgagttctgtaaaagaccattctatggtgataatgagctatacactcatatgtctagagagcactacacttgtcatatatgccaaaggtaattgctatttgtagttgtgagagttatgaatttgattgacctcgaaatgatttcattttcttccatttggcaatgcaggctgaagcctggacaatatgaatattatggaaactatgatgatcttgaggtatgaatgtaatcttattgggtgttctgactctttaacagtacatgtctcttacttgtttttgcaacaggttcatttccgaagtgaccatttcctatgtgaagacgaaacctgccttgctaagaagttcatagttttccaaatcgaagctgagctaaaagtaaaacacattttttttattcacactgtttgttatggtgatacacaatgatgtttaaaggatcacttgcatttttttctagaggcataatgctattgaccatggaggtagaatgtctcggtctcaacaaaatgcatcactacaggcatgtatcgtttccgagtacaactcttgccagttaattatctttcccatcttttggtttgctttatgatgtttaatagttggttctgtttcagatacaagccagtttccaatacccgaacagtcgccgtggaagacgccgatcttctcttcgtgagcctaatcttgtgcttctggaatctcaagcatcttatgcctttaacgacgataataatcttcctcaacatgtgggacgctctggaaattcacgtcttggagaatcttcttttcctccactctctgtgcaagcaaaccaaggccaatcaagatttggacagaactcagagagtttagttagtaacaccacgactactcgtcaaagacatcgtgcaaaccaaggccaatcaagatttggacagaattcagagagtttagttagtaacaccacgactactcgtcaaagacatcaaacaaatagaagtgcaacttctggttcttctcaagcttggccagcactaaaccgaggcccggcagaaatatcaattacaagcagggtacaatcttctggtgcttctgctcaatctcaatctaggcaccatgacagagttgaaagtactagaactcttgcttctgcagttccacaagatgctcgtaccacagttggtggatgctcatctggttcttctctgagttccgccaatgcaacaaagaggaataatcatcactcgtcttcaacccctaaaatgtctgaaacaagatcactggcgcagccttctcattctgattctcctcaaatttccgctgtgaaaaatcgcaggtcatcatccaccagtgcaaatgcagggaacattcaagtagcgcaaggtgtttctgatgtacagtctgacaataaaagtttggttgaaaaaatacatgccagccttggacacgatgaagagttattcatggccttcaagaatacatcaggaaagtatcgtcatggttccatcgatgccagaacttacttggaatatgtgaaaggttatggtttgtctcacttagttctggatatggctagactctgcccggaccctcagaggcagaaggaactcattgatacccacaacgcctgcttgaaaggaggaaataaagggaaagctgtgaaggttgaaagtagcagtgactccaagggggatagatttgttgatacagtgaggaagttacaattctctgacaaatctcaggacaaagacaaagataaggatgcataccgttcagataaaggcaaaacaaaagtgacgacgttggtgaattcttcatcggctggagtgggattaggtgacacaggcaagcaacctaagaaaacttcaaagtttctcagaacacgtctaggagagaaatcaatggctgcagtactagatcttaggaattctaacccagagcctgaaccagaacctaagaacgataactccaaaaggagccagaactctcccggtggattgccacttcgtggtgcttggaagagaggaagtgcaaaactcttcgtctagtaaaaagatttttttgcacagatgaaccaagtctaaggatcaaatagtcatatagtgttcgtgtcttttgatgtaatgactagcttaagttatcagatatttttttatgagcatttatgttcgatccttgttgatattaaaataaaaggcctctcattaagcttttgaaaagcaataaacacaacaactagagaggagatggaggattccagtgaggaacccaatcaggaagcacgtaaaccttgccattaggtgaatcagctatatccgagaaagctgaaaagacttgggattgaaggaacgtggggttctagtagcgatatcgtaaacgacatagccttcaccataaccttcaacgaggaaatagatggaattagggcttaggcccgggaatgagcttacttgggttgtgttacttgtgagattcggattctagcttcttcttctccccaactcattagatgtaccagagaatgaacaagtcatcagagtgttggaatggacatccaagattccaagtcataaattaatgtatctatttgtcaagtgatgaatctgatgtaccaaaaagcttcaaaagtatgaattcaagggaaactttaaaagaaggctagtacaagaacaactccattgttaaattacaatataagtaacaaattattctgtcaaacaaaaaatatactaatcagagagagaatccttaggttcgagagagataggagaggcttttacacaacaacaacaacaacaataataacaacaatcttcttctccaacatgtctctatatcttatactcatatagttacatatagaaatcacacctctatgggttttatataagtaacattcatatatatatcttagaagatctttcaaagtagacttacactcagcttgttccatagtccaataactcccacctgaacggttgaaacacatagagcacttccgggcaactcttaaacagaagtgccacacagacgcaaaccgcagcaatcgccaccattgacaacatagctggtctgtacgctacagacctgcgtgttgtcccatacaccagtttatggtcacagagcttgcatggaatctgtgtgatctccaaggctgaagccatcggacctgattttggttctttctgctctctgtctgagaaagaaactgggatgttgaccacaacatgatcttcagttgttgactttttattgatcttgcgttgaatcaagtggatgtatgagaagtgaccgcgtaagcgtgcgtagtcttctggtgtgaagcctgtgctgtctcgacatgtcttccacgcttcaatccccacctatatcagatgcacaaagataagcgtttagctaagagaatcaaatttcatggctgaaataagagggaaaatcaaagtcaccattgcaggatcttctgttagcgcatccaacacatcttctgaaccgtctttaccagctgcaatatgaagaggtgttaagccggctggaccagcagcatcgggtctaaacaagctgtttctttgttgcttgggaatatatctcaagagcatttcaaccataggcttagagtttttcctcacggctctgtgaagaaggcacagttctgacagtgtggcattagaggaggaagaaaattcaccaacagctccatcaaagaacatgtttaatagctttctgatcacagcgcaccactctcgatccattgagaactcgattagccactggaagcgtattaatgggaaaacgcctggatttgggtctgattccccaagtttacttctgtgaagaagccaaccgatttcatgtatgaaatccatagcttgcttagcagaatcagttccagtgaactctaatgtggtttcaagtatacggatttcagaacaaacatcgtcatcttcaaccactaagaaagggaagaagctgctactgagtccttggtcttcaatctggaataaccatcaagtaagctctgagtctgatgaacaacatgtgaccgttttatcaatgatcagagtaaaaatagaatgtgctcacctccatgaatcctcgaccactcaatataggcatatcacaagagaagtttacacactcaacaatctcactgttgtccttgaaatcgtcatcctccctggtcgtcgaatcgtgtgttgtttcctgaatcaagtattttccttcaacagaacaaagtaacctgtaaaaaaggtacaaagacatttagacatcaaagaagaagaaaattaagacaaggaaggccaaaatttcattaaaaagaaaaacggaacaaaaccttgtgccacgctgacggagattcatgcctttaactgtaaattgagccttctccgttgcagctatagcaagcggtttaacgctaatgatgtgactataatcacgactttttagagacaatgaagtgtcaacgacaacctgacctgcaaccccggattgacgataaatactgagaaatccagagaggtattcacaaggtgaaagtattctcaaaactaaccgttatatacaaatgcaagttggttctgcaccctaacataaatccatccagttgtccacaagggatcatcggagagatctagaagcttccctaagctaaaacccagatcgtctgaaagctgccaagcaaaataaaaacccttgaggagtctggaactttataaagacgagtattgtcaaagaggggagaggaagtttagcttacttcttcccaagcagtttcagcttgacgaagatagatggtcaatacgatacagccaggtcttatgtagctctccatgtcagttggactatgcgataaccagtcaagaatctgtatatcgagaaactagcacatcagtttaacttccaacatcacaaagtaagaacttgagaataatcaagcagaccaatacctgtcctcgtaagacaataggaaattcatttggctctttcccaaatagtttgaacacaatccggcctgtgcgcatctgagatggaatcataacaaattacgaaaaggtcacaggaaaatatcagcaggctaagagatccagaaaataatggaatggatgaggtaagaatatacatacctgagcatcttcactagaacttgagggtgactggtcagatgctgaatctgaattcctacttgtctgaggcggactagactgatgtatccatgaaggataatcaagagaactggtcgctggattcgttggaggaggagatctttcgacgtctgtgtcatctgagtctatatagatatcattcaaatcaaaatcattcattttgacttgtttttctgatctgttctcggtagctgtcccatcttgccgagccgaaaattgctttaactcctcttgaggagcttgctcaatcccaagcaaagccgagtttccaatatttaaggaaccttgagatcctcctccttgtagaagaagttcaactaagtttttccctaactgttcgccagcatggcttacgaggctcttcagaagatgagacatcaaatcttgatcaccggtatggtctgcaaagggatagaaatttagcagctgatacaaactttaagacaacatagagatgagcagagtaaaacaccatactatgcatattggagagtatcttcaagagagtaatcaagagatagttgcttgagtgatcatcactaggattcccgttagcgccaggttcgggatttgttttcctccgacgtttattatggccagccaaacgtctacgacaacttctctttccttcatcaaactcctgaagaagatggaacctgcaagagagaagaagaagaataaagttggattcattttttgttgttgggaaagagagagagagagagacatacctactacattgctgacaaaagcgctgcaagatacctccgacagtggcactagtagccttggaatgcatctcacagaccttatggcgtctatgataatccttaactttactaagatcagcttcacagttttcgacctgacaaacggctccggatttggtcttcttggcaggaaaaaggccatcactttcaccattaagattcaaagtaagagcaccattagtgtctccttgaatggcaacagctctcctcttcttgtcattgccttcatcagagcaggaggaggagctattggacgagtttcctagagggaaaaactgacgtcccctagtagtttgggtggcgagaaagagatcaccatcccatttccaatcattcaaatcccactccacacttcttttacctacggacccatagaattgttgagcctccccaccttcatcaattctagcttccatcactcgatccaattcaacaacagcctaattgatctttgtagatccaaacaaataaaaacacaaactttggtcctaatcaattagtcttgcccagaaaaccttaaaaaaaggatccatgtaagccaaacacagatgcctataatccaaaaaaaacctctggaaacctcttaatatatagccctaaagctagctcttgaacgcaacagagacaccttttcaacactaatcaatacaaagaaggaataagtaaccccagaaatacacctttgaagagagcccaatagtgatggagatgctatgaacaagaagaagatgtgatgaatctgcgtttgtggcgtgatagagaagagtatgtatggtaatggttatgctagtacaataaaggttaggggagagacaaagagtgagagagagagagagatacaaaacagagaaagaaaaagagttaggacagagagagaaaaaaaaaaaccaattttatttagtccagcaaaaataataattaattttaaggaaaaacaaaatagtggtggggaccacttctacactgattttaatattattttaaaaaaattgtctaagataaaaattatattttgtgaattatgtgtatctcatttttctttttcccatgtgaagcagtgtacttgttaacttaccccacatttccccactcatggtagtcaataatcacctgtttcgcggaacattccaagagtttttattgtctatgttgtgatgtaccatacatagtaagtgttggttgcgacttcttgggaagaaatcgagtgttccgtgcctagtgaacaaccgcggtaaccgctagttgacaaagaaagtgtcggtgtttgtaaacgcgctttgactttgactcctaaagatataacaagttttctaattgggtcaacctttcggtctccatgtggtcattatggtctgggctttcttggcccactctttttatttggcccacttacataaacccgcttttaattttttattataaaatagtatattagatttggtttcttgtttttatcctttgatggcctctaatcatttaatttaacgtgggatattaacattttgttttgttagtgtgagtacaaagaaagagagaccagtcacatgatatgatgataaactcgaacgaagaatccaatgcgccacgtcttccatgttcctcgtcttggtagctttagaatctcaatggatctaattcctttcaattatataatctcattatcgtccttaaaagtatatattattccacattttaaaaaccatgcatgatgctgattattattggtggtatgacattgatataccttccgttcaaactcaagccccaatatgtatactgaattaggaaccgaataaagagacaaatcataagtgtattaaaaggtattaccaaccgcagcggcaaagttccggctaataattcccatatataatctatttaaaagagaaaatatagaaacggctaatcatgatcatatggttcgagaaagatattgattagtgttaaaataatgtagtcaccaaattaaaagacaccatgattcgtctcgaacatggccatattttgttcacatgcacgataacgactcccacatatacgacccattactcaccaaaccaccctttctaatttatttctattttcttgtctttttcgtacgaaagcaacgagatttcaaaaggtaacgcggaaacataaactgaatttaaaaggtaacatttgaagtcttttttcattacgaaattctactcgtttccttttaagctagtattggttcttacacttttatataaaaaaatgcatagaaacgtaacgtaggatgcctagtatttgactatacgtattaattaccaagtcatagttaatagttttatatctaaaagatatggcactaattaacaaacaaaggaaaatactccatatagaaagcgtcatttaagaaaattattatgattgtaattattatatcatgtaagacaaaaacaaaatgaaataaaacgatgtggcaatctggtcgttggattttgggtcattgtcaaataatccaacggtgttaatgtcgacacgctggcgttgaaaatccagtcaaacttgggagagctaatcactcgtacctataatttctctctaattaagctcaagacattgattgtcatttgttcttcttcactctctctaataattctccagaacattttgcacattccgtttcactccgtgttgttggatcccccaaaggtaaaacctttttccccagattatttctatttcgttcctctcttctcgatttcgactgattttccgtttttatgctcttctcttttccattttgaactccaattttgattctttaaagaaaatgagttgctttgggtgttgtggggaggatgatgatatgcataaaactgctgattatggaggtcgtcataaccaagccaaacactttcctccaggtatcaaagttggatcttgctatccaaaaaatcaagactttacttgtttcctgtttcctcattggagttttggttttggtgtgaaggaaatgatgcaaggcaccaccaagcctctgaaactgcacagaagggtcctccagttgtgaagttgcagcctattgaagtacctattatcccttttagtgaactcaaagaagcaactgatgattttggatcgaattctctcatcggtgaaggctcttatggaagagtatactacggggtattaaacaatgatctgccttcagcgattaaaaagttggattctaacaaacagcctgacaatgaattccttgctcaggttttgtgtggttttctgttactactgtgttatggtcacataaatgtctcactttttttgtgtttaagaacttgggaaattttgacactgcttgtaggtttccatggtttctaggcttaaacatgataactttgttcaacttcttggctactgtgttgatgggaattcacggatactttcttatgaatttgccaataatggatctcttcatgatattcttcatggtactgtttttgcttattaacacacttgtagagtctagacataatattcttgagttttaacatattatttaatctatgattctctcctcagggagaaaaggtgtgaaaggagcacagccaggtcctgtcttgtcgtggtatcaacgagtcaaaattgcagttggagctgcaagaggccttgagtacttgcatgaaaaagctaatcctcacatcattcaccgtgacattaaatccagcaatgtcctcctctttgaagatgatgttgccaaaattgctgactttgatctctctaatcaagctcctgatatggcagctcgccttcattccacccgagttcttgggacttttggttaccatgcccctgagtaagttggtttcttttgaagacattgaatagtttgatgagctctcaagtctcaaatgctcttcctttgttttcttaacagatatgcaatgaccgggcagttaaatgccaagagtgatgtctacagctttggagttgtcttactcgaacttcttacaggtcgaaagcctgttgatcatagactacccagaggccagcaaagtttagtcacatgggtactaattaatttctctctatccgatcacatcttttatcttcatatatatagcatgatcatcaaccatgtaaactgttacttatgatacatcaggctacacctaaactgagtgaagacaaggttaaacaatgcgttgatgcaagactcggtggcgattaccctccaaaagctgttgctaaggtaagaaaccaaacttttcataacctcagattgtgtttacgttttagactgcattcattgttcttaacctcaagttatggtgatgatgattcgcagttagccgcggttgctgcgttgtgtgtgcaatatgaagcagattttaggccgaatatgagtatcgttgtcaaagctcttcaacctttgttgaatgctcgagccgtagctccaggggaaggagtacattagccacctctgtctcggcgtttctcttcttaccagaaaatttgatttttacatatacacgatataccagtcaaaacttaatttatgtgcatagaaatctctgtaatgttttttaaaaaactatatttttacattaaatccgttacccttattatttggactcttgtttaattcacaattaaccagaatcatacaaattaaaacattcttttacttgatttttctctgttagtaaattatagattataacttaaatgtaaataaaaattgttgtcgttgttaatttgctcattttatattttgaaacaaaattaggattagtgactcggtacccacagataaaaacgccacaattcactctttatcatccattcatttttgaaaatagtcaaaaccaaaaacaaaaaacatccaaatttagaaaatccatataaatcttttatatatacgtaacatttctcttcctgtttctaatccattcctttccaatccacgtccaaaaaacaaaaccaaaaaaaaaaaaaaaaaaagacaaaaaaaaatgaacactccaataaaactcgcctttctcattctctgcattgccctaaccgcaaccgcatttatagtcccagcaaaacgtgacgccgtttcaccacaccaccaaaaagccgtcgatggaatctgcagcgttgtgcaagacaaacgtctatgcagcattaccttaagaaacgtcccaagcgatgatcccgccgttttggttcgttacttagccacggcagcagaagcgtccgttaaaaagggtttgaagttcctctccggaatcaaaccaaaatacaaaggaaacgccttcgccacaacatgcatcaccggctgcgagaaacagctacacaacgccttggacgactttgcagatttctggaaagccgcaggaaaaaatctaacgagcatggctgagaattacttcacatgtaagaagaagatgacttccatcttcacttaccattccacttgtctcgatgacatttacgacaagacgttgcacaaagtggtcgaaggagggattggccttgggaaaagaatgagtggtgagtctgtggatgtgttcgctggaatgggcaaagtctttaacactttcaacattaagaccaaacttaaccagaaagataccgacacgttgctcccaccacctttgtccttttactactattgattttatttatcaatatatattatatatcataaaacacaacaaaatgtactgcttcggtcgatggtgatgaataattttcatcgattgggttttcagatattttggggatcttgtaaccaaaggttccttttgatgtatgtttgtatttaatatgttatggattataatcatgtatggacctcgtgattggaaaggatatggaataatgtgattatctaataataaaaacgtaattaatatcgtatttgcatatatgtattttatgtttatacattcttactcatattttcgtttgttttttttcttcattgatgctccacattctgacgtaaattttgtaatcaatggctacatacatttttttaaaaacaccaaaaaccaacgcaatttgattccccgtaattcgtcattatttagtgacctaactaactttttaccatacatcctactcagccgaagatgaataccatttcgtcgctgattttacttttgtggatttgtttgtagtatataatataccctttatgtttagtaggcaaaatgtgtagttattaaaaaaaattgtggttatatattataagtacttaattggttttattaactagacatgctactgatcagccgaagatatataaataccattctgccgctagttaatttatattttttgttgctacaattctgttttctttcttgtagtgagtgatttactctctctttgttggttaatgtaaagatgtgatgatttactctcactattgatttatttttcactatgaaaatatgtagatttagatattttacaaaggggaaaaaatcaattgaaaagcaatttagaagttttatcttttgtgggtcacatattaattcttatacgtatgtattaagttccgaggggcgagggatacgaaaatgtaaatataatgtttctcgttaattaatcaaactgctatatatatatatatatatatatatatatatatagctacgtttatatacatagcatgttgcaataaatcaaatacgtacgggattgttgcggtgcatacgtgaagacaaagtatatatattgtatgacaaattgaactggtctggttacctatagtagagctcattttttaggattttctgttaagaagagctcatttaaagagtttgttatatagaagctctgaatatttataatttagttatataatctggttcattcatatccgatactgcatgcagaccagttaaccaatggaatgaaggtgaaaatatgcgctttaatgttttgacctatacatagtcaagctatgacatgactgattttaaaaggattttttgtaactcggttttatacaagtttggtttgtttggtccaacttgacatagtatttaactaaggattaaaagtaaaattacagctaatatcacttaaggaattataaatttctctttatttttatttatttttttcttctttattttatttttagtcaatcaaaccaccacaacttctaatcaggggacgtacgccatatttatcttatcgtgaccaattttaatccgcaactaagcaattacaaaaacaaatctttaaagttaattatagctttcttgaccgaatactctcagccattcgtcgaccgcaaatctctccctctccatgcaaaatccatgcacggtcctaattttagaaaccaaaaagcttctatataaacctccagcatccatcacaatagatactggcccaagtcattcaacaacttggcttttatctaataaagcccctccctctccgataaaccttaaataaaaccggagggagagcaaaaaataaaaacaaaaatatacaaaaacaaaaacaaaaaatcataaaaaatgattggaaaagttgtggtctcggtggcctccatcctcttaatagttggagttgccataggagtcgttgcctacataaacaaaaatggtgatgctaatctgtctccccaaatgaaagcggtccgaggaatttgcgaggcgacttccgacaaagcctcatgtgtcaaaactctcgagccggtcaagagcgatgacccaaacaagctgatcaaggctttcatgctcgctaccagagatgctataacccaatcatcaaacttcacgggtaaaaccgaaggaaacttgggttcgggcatctcgccaaacaacaaagccgttcttgattactgcaagaaagttttcatgtacgcgcttgaggatctcagcaccattgttgaggaaatgggtgaagatcttaaccagatcgggagcaaaatcgaccagcttaaacaatggttaaccggtgtttacaattaccaaactgattgtcttgacgatatcgaagaagatgatttaagaaagactattggagagggcattgcaagctccaagattctcactagcaacgctattgacatcttccacactgtcgttagcgccatggccaagcttaacttgaaggtcgaggacttcaagaacatgacaggcggaatcttcgctccttcagacaaaggagcagctcccgtcaacaaaggaacccctcctgttgctgatgattctcccgtggccgatccagatggtcctgctcgccgtcttcttgaagacattgacgagaccggaatcccaacatgggtttcaggtgctgacaggaagctcatgactaaggctggacgtggcagtaatgacggtggtgctaggatcagagcaacctttgtggtggctaaggacggaagtggacagtttaagactgttcaacaagccgttaatgcttgtcctgagaaaaacccaggccgttgcatcatccacatcaaggctggtatctacagagagcaagtgatcatccctaagaagaagaacaacatcttcatgttcggagatggtgcaagaaagaccgtcatttcttacaacagaagtgttaaactcagccctggaaccaccacttcccttagtggcacagtccgtaagtctcaccaaaccctaattcactagttaggttaacaaatatttttctctacatatatagctcatgttatatattattgcgcagaggttgagtccgaaggattcatggcaaaatggatcggattcaagaacaccgccggtccaatgggacaccaagctgtggctatcagagtgaacggagaccgtgccgtgatcttcaactgcaggttcgacggttaccaagacaccttgtacgtcaacaatggtcgtcagttctacagaaacattgtcgtgtcaggaacagtcgacttcatcttcggcaaatccgcaaccgtgatccaaaactcactcattgttgtccgtaaaggaaacaagggacaattcaacacggtcacagccgatggaaacgaaaagggtctagcgatgaaaatcggtatcgtcctccaaaactgtcgcatcgttcccgacaagaaactagcggcagagagattaatcgtggagtcatacttgggaaggccatggaagaaattctctaccaccgtgattatcaactccgagataggagatgtgattagaccagaaggttggaagatttgggatggggaaagtttccacaagtcatgtaggtacgttgagtacaacaaccgtggaccaggagctatcactaaccgaagagttaactgggttaagatcgccaggtctgcagctgaggtcaatgacttcactgttgctaactggttaggtcctattaactggattcaagaagccaatgttcccgtcacgcttggattataaggcgtataaatcaaatcaaatcaaatcaaaaaaaaaaaaaagagtagtacgtgctcatgtaaaaggtgaaaatacaacgtcgttttcggtagggtaatatgcgcggggagatgaagttgtaagatttgctttttgtttgtctcacgtatgaaagatgaggaaaaaaaaaatattgaaaatttatgttgtttgatttttgtttctatgttttgggatataataatttattcgctgtgttgtacctatgtttaataacctttttaaaatattataatttaactaatttattttacgttgttgtcaattctctaatttactgaaattattatggacattcatataattaacttgcccgatatttctccattttgggtttactttgagacagaggaacaatcgtgtcttcttttctaactcagtcctgtcttttttttttttttttttttttttaatttgcatacaaatggattacagtcgtcgcaaatgcttatttttaaaaataaaaaatgggtatatcaagtttattgtgatctttttttgtttccaaattgttttggttttagaagatatatggcaacatttttttgggtgaaacggatacaatgcaacagtggtttaattgattaacaccaacttacccaacagagatgcaagctgcacaaaaattttgcgagattttttttttttttattttaaaaaggaaactgctaaaatatacgtacgagactaatgctatgttacatatttccaaagatttaatcttcttccaacgggtatttataacatctagtttaaaacctctaagacgtaaaatttcctttctcttcttagacgtagtcatctgagattctgtcacgatagctagacccatatctctttcaacgttatgtaaattataatataagtttctaatttttatttttaaatgattattacttttgatccctcattgttttttaaaagtttttttacaccttttcattcaagattttattttaaagttgagttttagcatttaagtccaaacagaaagttttataatactagaaacttggatgataaatttgcaatacaatataaatataaactggattttggatcatgttatttgatataatttattcatcattagagatttcacaaattcaatttttcgtgccatcatgtagatttatcatacaagttattaatttaatttgatttttcaaaaatatctttttaaaaagttttaaaatttgatttaaatttttatctatttaaattttcaatttttagaatttgaagtaatagaaagttaatacgtttgatatacgatgtaaaaactaaccattgaataatgtcaattgataattagggattttcacaaacttaatatataacacaatgtcgatttgttacacaaatcccttatttagaattttaagtaatgaaaaattagataataaataagaaaaattaaccatatttggatcatttcacctgaccttgtttatagtaaggactaatgactattatagaaagttaatcctaaattccatatatatggacgtaagattgaaataacgtaaatacccttagtaagatttggaactgcaaatttacgttcggcatccttttctaagttcgacgtcacgagctccagcgaaagttaaataaagctttttgaccaaatattctcagccattcgttgacccacatcaatccctctccatgcaaaatccatgcaagttactaattttagaattcaaaaagcttctatataaacctccagaatccatcacaatagatactggcctaagtcattcaacaatttggctttaatctaataaagcctctccctctccgattaaccttaataaatccggagggatcggagagaaaaaagaaccaaaaaaaaaaaaaaacagaaaaaaaaaaatgattggaaaagttgtggtctcggtggcctccatcctcttaatagtcggagttgccataggagtcgttgccttcataaacaaaaatggcgatgctaatctgtctccccaaatgaaagcggttcaaggaatttgccagtcgacatccgacaaagcctcatgtgtcaaaactctcgagccggtcaagagcgaggacccaaacaagctgatcaaggctttcatgctcgctacaaaagacgaattaaccaaatcgtctaacttcacgggtcaaaccgaagtaaacatgggctcgagcatctcgccaaacaacaaagccgttcttgattactgcaagagagttttcatgtacgctcttgaggatctcgctaccattattgaagaaatgggtgaagatcttagccagatcgggagcaaaatcgaccagctcaaacaatggttaatcggtgtttacaattaccaaactgattgtcttgacgatatcgaagaagatgatttaagaaaggcgattggtgagggcattgcaaactccaagattctcactaccaacgctattgacatcttccacactgtcgttagcgccatggccaagattaacaacaaggttgacgacttgaagaacatgacaggcggaatccccactcccggagcccctcctgttgttgatgaatctcccgtggccgacccagatggtcctgctcgtcgtcttcttgaagacattgacgagaccggaatcccaacatgggtttcaggtgctgacaggaagctcatggctaaggctggacgtggccgtagaggcggccgcggaggcggtgctagggtcagaacgaactttgtggtggctaaggatggaagcggacagtttaagacggttcaacaagccgttgatgcttgtcctgagaataaccgaggccgatgcatcatctacatcaaggccggtctctacagagagcaagtaatcatccctaagaagaagaacaacatcttcatgtttggagatggtgcaagaaagaccgtcatttcttacaacagaagtgttgctctcagccgtggaaccaccacatccctcagtgccacagttcgtaagtctcatcaaaccctaattcagtagttaggttacacatatttttctctacataattcatgttttcgatatatatattgtgcagaggttgaatcggaaggattcatggcgaaatggatgggattcaagaacaccgccggtccaatgggacaccaagccgcggctatccgagtgaacggagaccgtgccgtgatcttcaactgcagattcgacggttatcaagacacattgtacgttaacaacggtcgtcagttctacagaaactgtgtggtctcgggaacagtagacttcatcttcggcaaatccgcaaccgtgatccaaaacacactaattgttgtccgtaaaggaagcaagggacaatacaacacggtcacagccgatggaaacgaattgggcttagggatgaaaattggtatcgtcctccaaaactgccgcatcgtgcccgacaggaaactaacgccagagagacttacggtggcgacatacttgggaaggccgtggaagaaattctcgaccaccgtgataatgagcaccgagatgggagatttgattagaccagaagggtggaagatttgggatggggaaagtttccacaagtcatgtaggtacgttgagtacaacaaccgtggaccaggagcattcgctaacagaagagttaactgggctaaggttgccaggtctgcagctgaggtcaatggcttcacagctgctaactggttaggtcctattaactggattcaagaagccaatgttcctgtcacaattggattataatttataaagcgtatatgaaaattattttagtttttaagtatatgaaaattggtgtatgaaattggtttatgaaaactttttaagaaagtctataatgtttttcctctgttaatttgcttcatctaattaaggtcatattgcaatgcagacaagtactcatgttgctttattataagttccttcttactgagtctatatgtttttcctctgttttcttcatcttgttttttttataacaaatcctcggttttcttaaagaagagaaaactaaagtaatgacaataataaaagtgttttctatgtgttttaacttcttataaacttttcatcgaacgaggaaaaagaattagattatcctttggtacagataatggaacaagcttcatgcccatataccataggcctacatcagggaaatattcaatatcaaaccattacgccaagttttaaaaaacactttatcatttaaaatttcatataagttttgtttatttgaaaatttagaacctcattttttggaaattattttagtttgaagtatcagccacatattttattttctattgtttgtcaatttctaattcattgaaattattatggacatgactattttagggaagttttaaaggcttattggcaaagtagacactttttcaaaaataatttgtaaagtaggtagttttttttttaaattagagaaatagatactttttttgctttttgtgagatagagaatttgtctaatagactaaaaaacaaaatacatatcaaatactaaaataccctttatcttgagagagaataaaaattatatgaagaaccatttttattttattttgtttgtctttatctttttatttttttattttagtattcttaaatacttaaaaaaattaaatattatttttttaaaaaaattacattaacttttagactatttatctgtcatcattataatgcacaaacatttaaaacatcgttttgtacactaaccattattcgttggtgtacaagtgtgtacaccgatatttcataaatcatcaccgacttctcttatacttattaatataagtaatattgttttaatattttacaaacataatgattgtataaaccaaatattattattcaatataatggtgtacatgatggtgtatataattaagttactcttaataatgtacaaaatgattgaaactattatgacgattggtggatagaatgatatatacaacttttaaatgataacatacaagattggtagacaaagtgtacaaaacttggtgtacacttatagagaatgtataaatcattattttaattagtggtgtacatcatctcgtacaccaatgttagtacattgtctcatagatttttaaaggtgtacgattatgtacaccatatttttcatcatctatgtacatcattttgtacactgttatactcagtgtatcattttctacatcagtaattatattaatttttacgttattgttgtatattactattagtacaccaattttaacaatatcacgtacaccgtcggctgagtttaaataaaaattgctacatatttttgaaatagcaaaattagactttttaaattcacataaaaattttaaaaactaatatgattatgtggtaaaattttatgaagaaatatcatcaaataaagtaaaaatatttaagtaaaaataaaaaataggatttgacttgaattttgtctttatcttactaaataacaaaataacaaaaggttatataagtcatttagtaaaatctttattaaacaaaaagtattattagataaaaaagagaaaaatgtctatttctcatatttctaaaaaaattacatactttacaaattatttatagaaaaagtgtctattttccaacttatctcaacttttaatttcaaatttcaaatatatagacgccagaacgaaatgacgaaaataccctaattaagatttggaactgcaaatttaccaaaaccctcgttttatcttttctcgacggcgacgagagaagccgccgtcacgagctccggcaaaagttctttcatcttcaccgttcggtctgaaacttaaccagacagatcgaaagagaattcgaaaacttgtgctaaaaaaaacatgagggtgttaattcggccaaatttcttgagcaatctgattcgatattgctctagaggtacgcattcacacgatcgtagcctgcgatcggttctctcgtcaaatatgattcgtctgtacaccaccggtacgtaaatatgatctgaataaacattgcattggattatagtttagtatttgattgaattgagatgtataatgacaggaatggaacctcagttgtctcctgatcttattaagataatggatcagaggctctcggcgatagagcatcgaaatgctgtccttcagaagcttatcaaccaggtaatcccaaagattaagctcattgttgttatttaagctttccttttggttgttgattttttgacatgatcgataaactgtgttttccgttgttcgaagacagcctgagtactcaccagaggagttttcaagagccaataaggaacttcggaagctgagagattcaatgttgctgatcaatgatttgagggccaaacaaaaggtagtgaatttgctttaccgtattatatatctgttccaaagatcatcattgattaggtttactttctgttggcaggagattgatggattgaaatctctggtgtcggaaagttcggatgataaagacatgcttgatttggctgtaggtgaattagacgaggcggtggaagaagaaaaaagacttcaaactttgctgcttaagtctttgcttcctaaagatgaagctgatgagagggattgcattttggaggtgagagcaggtacacttgtgagctaatggttcttaaacaccacggtgtcttctacattatccatgtagaaagctgtctgtagttgtttttcattttgacatctgaatgtttatgttaggtactggtggtgaagaggcttctttgtttgccatggacatattcagaatgtaagtcccatatactgctggtagaagcaagtatacttctttgtacttgaactttacttctgtttttttatccggttttggaatatcgacaggtacgaaaggtattcacagaagaaaggttggaagtttgatattgtagacatcaccgagtcagatatgaaagggtataaagtaagtaacttttgttcctccttatgtgaatattagtattccagtattgctctgttctcctgaagctaagatcttgaatgtaatttccaggaagccagtgctgcaatttgtggagccagtgtctacggaaaactaaagttcgagagtggaattcacagggttcaggtatgttataaacttataatatatgaatcacattctgattttcttgactaatcatacaaaatcaaataatcacacttgaacatctttgcacagcgtattcctatcacagagaaatctggtcgaattcacactagcgctatatctgttgccatccttccccaggctgatgaggtaccaatgtttctccaatcttagttttgccacctgttattaattttatcttacaagttacatttttcttttattatcgttcttatcggttaatcttacaaacgtacatactttttgatcatcgttcttactggtggctacttacaggtagatgttcagctaaggaatgaagatttgaggattgacacttataggtctggtggctcaggcggtcaacacgccaacacaacaaacagcgcagtccgaataatccatcttccaacggggatgatggtctcaatccaagatgaaaggtcacaacatatggtactgaacatttgtttcacccactacgctttactcccttaatcttacacatcctactgaaaaatttaatatctttgtaacagaacagagccaaagcacttaaagtactatgtgcaaggctatatgaaatcgaaaggttgagaatacagagcagtcgatcaaagctacggtcagatcaggtacatatcaaatcaacaaatctttttctcatgttttcagtcaatcttacattatcaatgtctaaatcccatgaacagattggcagcggagaccgatctggacgaatccgtacatacaattttccacaagggcgagtaacggatcaccgtgtgggaatcactcaccatgccattgaggatatgatgcagggagagaatctggacatgttcattgatgcccttctcttgcgccaagaaatggacgccattgcttctttcagctccacttcatgaatgacagagaggtagaccaaacccaaaaacccttaagcttgtcgtcagctgtcacaaacgttagcagtagcaataaaattccattgaaagctgtgaaatgaaaggagagagagaaatatagagaaaaaaagagggagccagggaagaggcagtgcatgggtagagacaaaacagagtcgtttaatgttttagtaaactcaatccatgctctgcttgttccctgtctctctctcattaccgctttgtcttctttcattgcaataccaatctaacctttgaaattggccagttcctttgagttagttcctttgtgtttgtgttatttcttagggtttaaatagattttggaatcgtgtttctgtacgccttttgtgatgtactacaccagaattcaccagaaatatttgtactcccttgttttgcaaagtcttgtactgcgatctggctaaagcgtatattcattattcccaactgtattcctaaccctctaaattagctggagggttctggtttttacgactatgtgtgttaaatcggaaggtagagagaaataatttagctgccacgtggtaggacccaaagtacatcgcaagtacactttttttttttgcttgatggttgatattagtacgcaattctctttccagtaccggtactacacaattacatcggaatttgtttggtttactttgaaaacaaaaactttggattggttcagtattggttgcatattttgataaaataattgtaccaaatgaatataaattagttgtgaatcttatattataaaattgacttgacgacaaaaaaaaacaaatattataaaattgacttaaatcaagtaataagaacatcgaaatcagagagatcccattctgcaattgcttcatcttctttataaatctcggtgccaacatccaccgatgtccaaatcctcctcgctggaatcgtaccgggatcctacaacataaacaaatcaaaaaccaaaaccggaatattcaaaagaaacaacagaaaaaccaaccggtttactgatcaatcaatcacctggttagaagaaaagcctactggacaagccaccaacatcaagatcccaagttctcgggtcacccacccaaccatcacccaaccgggtaggatatccatattcaccccaaaccgggtgaggcaaaagctgaagaatctcctgagcttgtgggttactataagcatcacaagtccccaccggaagctcaagatgctcggcgtttcccggcgcacagtaaacgtggtaagcctcgtaagggaagctccggtggtccgtacggtgaactctggtgccgttccgaaacgtgtggtacggtggacagttgtgaagactcttggggttgcaccaaagtggggtttcagggtttatgatcatctccgagtaacgagtaacgtcggtggttacgtcaccgtcgcagggcttgccgttgtttttccagcagcttccgatgtcgagaagatagaattgactcttggctccgcctccttgttttacatttagtgttagtctcactttaaagtttggtgactccggaagctaatacaaaaacacaacacatttcaatatttcatcacaaaagatcaatcaatttctttttgacaagaatgaaaaaaacttttcaaaaaggtttaaagttagtgttaattacttactgttttgagcattcctctagtgtcataatggtatccaccagagaatcctttagtggcatcagctctaaggtaaagcataagccatgggtacttagctgaagtcttaagcttatgtttaaatacccaaccaccaacgcctactctcttctcccacacaacctcgtaataacttatcccatccaacccatttccaaaatctgccccttgctcgtacgtaccattgaaccatcccttcatggtttgaccatctctctgaagctcggtttttccgtggttcagcgtcggttggttcatacaaccgctgccgaaacaggggaataatccgggttgattgaaaggtgggatctttttgccgtttttagggcaaagagcagattttgtgtcgtagtttccatttttgagcatgaccatccagaaactccatgggtttggtttgtctgagacttgacagagggagcctaggtagagttctttctcgaccgcgtaaaggtcagggttatgcaatgctgattctgatatgattcctggtttaggctttccaatccctagctcattatccgagtctgataccttgtgcaccaaggaagatccacctatcgaaaattatagttagaaacagagaaaacagaggagaaagaaagaagaagaaaacttactggtggttttgtttgattggtcttctgtgtatgctttgatgcatttagatgacaaatcgaagcaatctgcagctcgaggactacccatgtgaggagcttcgaagccaacctcattgcagaagttccaagcttcaaatgccactctgagaccgtctctcttcatcccaggatctccaaccgctgatctctcgtctccatgaaccaggaggatcaagtttaccacggccaagattggagccagttgcttcatttgtctcttttcctctctttctgcatttagttttcttgtgcttttttggttaatctatttaagctttttttttgtgtggactgcagtggtagttggtgaatgatttaatctctatgtgataaatgcttccaaaagtcaaagaagctgttactcttcttagtggcgattattgagggagtaaccatgacttgctcttttcgattcagatcaaagcagtacatgtagaaatgcttggatcaaaatacattctaatttgcatttgcgttcagagtgattatatcttaaaccatctgaaaacgaatcctaaaatgtattcaatggtatgattgcactctagagagcaacaagacaagtcaatatatgataaagtttcaaactttttcttctctattaaaaatcaaaagttgagcattctttgaagtaattaggcccatgggctagtaacggctttgtcagtgggatatataaaaaatttgtaggttgggtttccaaattcaaaatccatagattcgggttctcgggccgggtcaagatcgtcttatttacgtcgggaattttatacagtttcaaacatgtagggtaaaggatttgggtctattcgacacgtgacacgattctccaaaaggttagtgggaatcgaaccgcttaaactttttttcttcccccggaaaaaggtctactacgcctactgaaaaaaatgtcaataatctatcgagtgaattaatgagtccaataattagtgtcattcagcagatattttaaattaatagaaattaaatatttatgtgcaccaaaacaaaaacttacaataaaaatgacaaaacaaatccacacttcatcgaaaaatgaaaaatctgaatagcgcctcacacgatttattaatggtgtagtcactctcacatcaatgtttggaataaaattgcaactagtagtttttcttttcttagaaaagtagtatttgataacttgttccccaagtagtaaattcttgctatagacaaaagatatacgtgggtaggtgataaatataggaatatcattatatgtcaggaatgacgtcagaatcgttattggttcgataagattcattgattctgaaaaggcgcagaagaagtaatgcgagaccattccttccctggctccctggaagaaagaaaggtccctttctctgtagttttgacttttctttgttttattttgaatcgataatttaaaattcggacgtgtttcttgctcgtaaagtaaaataagcttcacgtggttccaacctagaatggtagtgcaaagatataatctgaccagaaaatataattttataatatttttagcttaacttacaaaataactaatgaaatatacatttatgggaattcgatttttcgtttgttttaacacatcaataattcccatcgatccgttggcaaaacgcaattatgataacaaagattactagtgaggaatgggttcttgcagcacttgtcaatttgtccatccatagtcacaagtcacaactaatgccaacgagaaagtcaactaaagcgatgcaagaaaatcatcataactcagcttcttcctttttttttgagatattgatgtgtatatgtacacacaaagacgtacatacaaaattcgagtttttatataaaacgaatcgttttaaacgatgataaggagtaaggacatatggaagctgctaataacatggctaattaactagctataataagagatcaaatatatcttatcactgataccaaaaaaaataaaaaaaataactatattgtacatatgagtgattcgcgggattatacagacatacggtcctcccgtattaaaactttatgttaaaataatagagttgtagttgaacaaaacagctagactaatcgtcgatcgctgtgatcaattcgttctttatatttttttaatgctataattaatcatcttggtcagcattagacaataatgggcagataaaatattgaaaatgttatcttacgtattatattgtattacaaacataaaggcataattcattttatatacacaagattccctattttataactacgccaattgtgctatggttacaatttaactttactaacaacaacaacaaaaagactatttttcacaaattttacgaagtagtagttattaatttcatggcatccattttctctttctctcaaacaagtcacagcttgttcgtcaagaaataaacagagcatatataaactcacatgagtccttccaaacttcacttacaattatataaaaatatataagcagagagagagagagagagctctctgcacatttttcaactgctgtttatacggcaagacaccaagaagccgctaaaccctaatcactttcttcttgttgcttttcgaggtatatatatatatttttatattctctgctttaatcatttttatactggaaactctgtactttatgttcttatctgggccgtagcttcggttattcctcattgtaaacgacagatcttgcttcaggtttcgttattttttcacatgttcttgaaaaaacaatatacagatctttagggtgttttcatggttggtgaaaagtctttgtttcttttccttcttggcctgacctttatgttccctatttagatatatactctctcttgaagatctcatcagctcatagatttagaaacttattacatatctcctctgttcttttaaatgcttaggatcgtgaggtatctgtgaaactctaatggcttcagagagcggcttaaatggagatccaaatatactagaagaggtttctgagaccaaaagagacaaggaagaagaagaagaagtgaagaaaacagagaagaaagacgaggaacatgagaaaaccaaaacggtgccgttttataagctctttgcttttgcagattcctttgatttcctcttgatgatcctcgggacgcttggatctattggaaatggtcttggcttccctcttatgaccttactgttcggagatctcattgatgcttttggagagaatcagactaatacaacagacaaagtctccaaagtaaatcaaacgaatgttttttgtcttaattgggattcatttcaagatttgactttcttactagttttttttatttaactcacacaggttgctctgaagtttgtatggcttggaatcggtactttcgcagctgcttttctccgtaagttcattggatctgtcgaaggatctaaactttgtgaaaaaagatttcaagaaaacaaagagtgtaaacttttttgatgtctatgaatgttcagaattgtctggctggatgatttctggagagagacaagcagcgagaataaggagtttgtatctaaagacaatcttaagacaagatatagcctttttcgacatcgatacaaatacaggagaagttgttggaagaatgtccggtgacactgtgctaatccaagatgccatgggagaaaaggtaagctactaaaaaaaagtcaacatggcgttctaatgtttgaaactttatttgttaaaacgacgacgtttttgtcaggtgggaaaagctatacaacttctagcaacatttgtaggaggctttgtgatagctttcgtaagaggatggcttctaacgttggtcatgttatcttcaattcctctacttgtaatggctggtgcacttctggctatcgtcattgctaaaacagcttctcgtggacaaactgcttacgccaaagctgccactgtagttgagcaaacaattggttctataagaacggtaattaggcttacttatacacttttacttagccaaaattaccaaaaccacaaagacttactatctacatttttgcaggttgcatcatttacaggagagaaacaagcgataagcaattacaataaacatcttgtcactgcttataaagcaggagtcattgaaggtggttcaactggattgggtcttggaacgctctttcttgtagtcttttgtagctacgctttagcagtatggtatggaggaaagttgatattggataaaggctacacaggaggacaagttctcaatatcatcatcgctgttttaactggatccatgtaagtacctttcattagcaatacctctttggttcattaacttccctgcaaactaatttgagatatctttttgttccttccttaggtcgttaggtcaaacatcgccttgcttaagcgcatttgcagctggacaagccgcggcttacaagatgtttgagacaattgagagaagacctaacatagattcttatagtacaaatggtaaagttttggatgacattaagggagatattgagctcaaagatgtttactttacttacccagcgagacccgatgagcaaatatttcgcggattctctctgtttatctcgagtggtacaacggtggctttagttggacaaagtgggagcgggaaatctactgttgtgagtctgattgagaggttttacgatccacaagctggtgacgttctcatagatggtattaacttaaaagagtttcagctaaaatggattagaagcaagattggacttgtgagtcaagaaccagttttgttcactgcaagcatcaaggataacattgcgtacggcaaagaagacgcaacaaccgaagagattaaagcagctgcagagctagcaaacgcatctaaatttgtggataagctaccacagggtttggatacaatggttggagaacatggtactcagctttccggtggacaaaaacagagaatcgcggtggctagagcaatcttaaaagatccaagaatcttacttttagatgaagctacaagcgcgcttgatgcagaatctgagagagtggttcaagaagcgcttgatagaattatggttaaccggactactgttgtggtcgctcatcggttaagcactgtgcgaaatgcggatatgatcgctgtgatccaccaaggcaagatcgtcgagaaaggtaaactacctaacattcttattcactttttgcatatggatacacatgtgtgatagcaaaatttgatgaacaggttctcacacggaactactaaaggacccggaaggagcttattctcagctgattcgtctacaagaagagaagaaatctgatgagaatgcagcggaggagcaaaagatgtcatcaattgaatcattcaaacaatctagtctgagaaaatcgtctctaggccggtctctaagcaaaggaggatcatccagaggaaacagcagccgccattctttcaatatgtttggttttccagcaggaattgacggaaacgtcgttcaagatcaagaagaggatgatactacacaaccaaaaaccgaaccaaaaaaagtctccattttcagaattgctgctctaaacaaaccagagattccggtgctaatacttggatcaatatccgcagcagcaaatggcgttatccttccaatctttggcatactaatctccagcgtaatcaaagcgtttttccaaccacctaaaaagctaaaagaagatacaagcttctgggcaatcatattcatggttcttggtttcgcatccatcattgcatacccagcacaaaccttcttctttgccatagctggatgtaaactagtgcagaggatcagaagtatgtgttttgagaaagtggttcacatggaagttggatggttcgacgagccagagaattctagtggaaccataggagcaaggctatcagcagatgctgccacaatccgtggtctagttggagactctttggctcagacagttcagaatctttcatctatattggctggtttgatcattgcatttttggcttgttggcaattagctttcgtggtcctcgcgatgctcccgcttatcgcactcaatggatttctttatatgaagttcatgaaaggtttcagcgctgatgcaaaggtaaactagttttttttttttttttttttgctaagataggtaaactagttactacttttcatacatataccaactagattctctcaatcatttgattaacgttactttaaatcattggcagaaaatgtacggggaagcaagccaagtagcgaatgacgcggtagggagcataagaaccgttgcttcattctgtgcagaagacaaggtgatgaacatgtactcaaagaaatgtgaaggtccaatgaagaatgggattcgtcaaggcatagtcagtggtattggtttcggcttctctttcttcgtcctcttctcttcttacgctgccagtttctacgttggagcacgccttgtcgatgatggcaaaacaaccttcgactctgttttcagggtacggaaacaaaacacacaacatgttgatgataaatgccttcccttgagagtttcttgatcccttgtcatgtttaacaatgcaggttttctttgctttgacaatggcggcaatggcgatatctcaatcgagttcgttatctccagattccagcaaagccgatgtagctgctgcctcgattttcgcaataatggacagggaatcaaagattgacccaagtgtggaatcaggaagagtgttggataatgttaaaggagacattgagcttcgtcatgttagtttcaaatacccagcaagaccagatgttcaaatcttccaagacctctgtctaagcattcgagctggaaaggttaggatttcaaaactttcattctttgagcaaaaaaggcagaaccttttgagtaaacctctgttctctgtttcacattccagacagttgctttggttggagaaagcggtagcgggaaatcaacggtgattgcattgttgcagaggttttacgatccagattcaggtgagatcactcttgacggtgtagagatcaagagcctaagactaaaatggctaagacaacaaacgggacttgtgagccaagaaccaatcttgttcaacgagacaattagagccaacattgcttatggcaaaggaggagacgcgagtgaatccgaaatcgtatcttcagctgaattatcaaacgcccatggattcatcagtggtctgcaacaggtaaaaactcaacctttagggttcttactctgattcccaaatcaatgggttatcgggtcgggtcaaattaaccggagattacttgcctgatttagggttatgatacgatggtgggagaaagaggaattcaattatcaggcggacaaaagcaacgagtagctatagccagagccatcgtcaaagatccaaaggtgttgctgctcgacgaagccacgagtgctcttgacgctgagtctgagcgtgtggttcaggacgcgctagaccgtgttatggtaaaccggactacgattgtggtagctcaccggttatcgacgattaagaatgctgacgtaattgccgtcgttaagaacggcgtcatcgttgagaaaggaaagcacgacacgttgatcaatatcaaagacggagtttatgcttcgttagttcagcttcatctaaccgcggcttcttgatcttaattatctttttgtccctttatttttattttatgtcaattatgccccgttatatttattattgttgtgaatttctattttgggtaattttttggttcttattatattattgagggtactgtaatgtattataccatttgagattgggtgttcaaaacaagaatatccaaaactatcattttcattaagccaagttgatagttttggatagtttctatgtatacataatcgtagctatccactccccattccggttgatcgctttgaatctccatagtccactacgctatcttcgtcgctttcgttttcgtcttcttcttcgttgctatcgccggaattatcttcctccggattgtagtcggacttttgtcattgttcagagaggaagagactgtagattcatcagtgttcgtcgtatcaatggggccctccgtagaagcgatttgctccgtctcggtctctgttttgcttgatccggaagctatgattggaataaacagaaaccctatattttgcgtaagccgaatacttttgtgagttttaagttgcattatttatagatgggatcgaacttgggcttaatcaaaggagaaggcccatttatttccaaaacacaaagtaggaaatatcaggtgggaatttgttgtttcccctgcctccttccttgtatatatcaaatgtacattgtggtcaaatcgataatcaaatccaaaaattcttcgaaaatttagaagttgtctctcgacattaatttgtcgcttggttttcttgactactagtattttctgaaactggactacatcctatttgacaaacaaaagaaagtacatcctataattttatttataaaagcattcaactaattatataaattcaaatatccaatgaccaatggtctgactggtttaatgcactgaaacatgattgtcgatcggataattgttttttcctttttttactatttttttgtgtactaccgagaataatcagagtgagttcaagatttatgtactatctatcacaaaagaaaaatgaaaataatattataaatatccgaccattgatttacatcaggcaaaaacttttttcttggcattacttcgatttaaacacaacaagtacgtagacttatatatcagtagtggtaattagctcttgaaatcttcagtcttctcacagtagacaagaacatcctgcaaaaaatcaacccacaaattaaaaatatatataaggatgatcatatagttaattttctgcataattaacaatctaattatacaaaaaaggatgaaaagagtgcttactcccaaggaacatctccaaccatcatccagtcaccttccttatctgcgtacgttagcacgtgactcttctcattgcacatgtcttcttcttcagcccctatatatttccattttttcaattcccatcagttttcatcatttttacaatttacccattacacagtacttacacactgcgcaatatataaactctacctacggaataataactctgacatataacgttatccagattttttttttgacaaacaaacaaacaacctatgaaatagtgatgggcgattattacggcgatattaaccttcaaacaaaagaatagtaatgagcggaagtattttttcattccgtaaaaaaaaaaaaaaaatcaaaacggacttataagaaagaaaaaaatatcgttagaaatttgctacctctaagacatataaatcattctgatatgacattatgtatacatagaaacttacagagaatggatgcgttgaacatgaaatcaagggttctgatcaagtcgcggtagccattaagagacattagatcgatctttcttccaattggaactccttccatgttcactttcacgtaaaagctccctacactgttacactcattctcttcttcctcctccacagccgccacatattccgcatcctctaccgccggagctgcaacggagtacccatagccaccgttgaaatattgagtccctgaggatgtcccgaagctgagtccgagtctcaggtccgtgcttaggtttcgagtacttgacgaagcaccgaatgggttgctcttgctgctactctctattgaagaagacgatgaacttctccctcttcccatatctctagctctctctctctctctctatcctttttataataattttaggttaagacaaatgagtaatgagccgccatgcttggtttgtacgtgtgtgtttatatagaagataaaactaggacttgtttttattttattttaaatttgatatggtcttaattcgtatttttgttcaaagttcacacaaataaaaagcgacggtggaatgatgagacagcgtccgctaaaaatgttgttagtgtagcagaccaaaacacgtgtcaaacgatgattcgatcaaagtgttggttatgattttgtgggttcggtttctcgctagttaatgtttgatatctaaccccaaaaaataaatatatacatttagctgttttgatgatatgaagtagtattaaagttaatattgagaaattacatcttcttaatcgtgttcaatgcatgaaaggttatcgtgacgcgcattgaggcgtttgtggaactacattacttcccacatttccaaaattaatgtgttttcatatgacctcgatacaattaacactttaatcaaacaaattattttcggaaagtgtttgggtaaatgcttgcttagtaatcggattaacacttctttcttaagttaattaggtatagttctttacttctgtttaacaaaagttatgacgaaagttacgatgtggagttgtggacccatcatatgtatgcaagcatgacaaatgtttgagcctacgatgattcaagtccaagtcattattaaccataaaacaatgcgatttagttccaccagatgatttgaataatcaaaacccccaataagtaagtcttagaccgattttatttcatgtaaaaagaagataaatctcatttttgtttctttacaattacgtttattcgaagcttagacataaaaaaaaattagtcaactactaaacaagttgtatcagcgctgccataatcggtctaaaacggactattccaaaccggtaaaaagtgcctatataatgatgtaaatcatacgtaatatatttgcgaaagagaagttgttagacgtaataataactaaataaatagagaaaatttgaaaattgaaaagaaaaaaaaaagcgaaggaagagagggggcatgagtaatgaatggttcaccttaaagagaggacctaatgagagttcctttgtctatggaacttaaggagacgtcacatttctcatatttgcaagcacgagaaaaaggaaacacacacactcacgacacaacgaccaacgactatatttcttgtcattacccacgtggcatttttgtttccacgtggactccctcaaccacaacatgtacattgtacaatggatgcgtgccttatggtaaaattatataatttcattgaaaatataatataagaatcaaattttaatggatgtgtgcttcgtgacgaaactaatttcatttcaattcatcaaacttcgttattataatttcatccttcacaaaataacacaacgtgcaagcatagtgtagcttggtttggattgaaccatgtaagcaattagagacatatacgcactagagttgaaaccggcttggttccctcgcttaattcaggtttcgatatttcagtttggaaaaaatgtactaattagttggaaccaattgagttttagagaaatattgaagaaacaaaaaaaaaatcaagagaaaaaggataaaggagagatgttccctaacaacactacaaattacaatttcctcactttcttattttcttactgcctccgcctcctctctgtcccctcttttcttccattattttcatttgcatcttctctttatttctttgcaactttaatcttatgatatgtaaattgtaaatatactcatttttttctatattgaataaaaaaacttttgttagaaaaagatacacatatacgatatttcctcaaaaataatatgaagtactgattttggcagtcattatagaattgcattttattggaaagatacacacatagttcaagtactttatatatgcgctaattttgagaactccactttactgcgtcgtggttgcttgtcagtcaaaacttgggcttgcttttaagatgcgtgattgcatttgcatgtctcgtggctttctttttctgtagcccctcttgttggactaatcatagccttttgtttcctccctttgctttaacattactgaaattatcggattgtttctttcatttgttgattggatgtatgtttacattattacatgtgtattcattgttataatatacaagttttaaaacattacttcccctaccaaataatttcaaatatatatatatatatatatatatattcatgaagcattttttattttattttggtttaatgaagcattaaattttgaacttgcttatgttacttttatgatattggaagaagtcgaattatttcttcgttgatatcgtatataaaatttaaaactcatagaatttctattcaaaaagtaattggtgattaaatgaatggagtgcctatatatgtattttttttttcttgcaatcaattttgatttagaatttgcatgcatgatatttttttaatatttttttatcctttaataatttttttttatattatctaaagttgtatttgtattccttacataaagtttggttactttcatctctaaggtaaactgctaatattaaagaaagtaatttaatggaagcaaaaagtgttaaaatatgtaatataatttgaatggaagagtagcccccgagggcaatcaagtggaggtcttccatggttaggatgcagaagcttaatacgtttatatagatagataaacaatagcctccataaagtaaaagatacttgcatgcgtgcgtgtaggtattgagtcgagatgttacgtgcgtgtctttttatagatactatatattattggttcttctaaatccttaaaaatgttaagattacgcacgcaattcatgaattgtatatagatttaccaaatcttgaattgattttaaatttcttacaaagcaaatacactggtagtgtgacattttgtccctgtggattctgtatgacgtaatctcgttcctcacattatgacacttaatcgagtgtttttttttccctatcattttttttgtaaatttatcctctacaaattatgtatgtttgtgaactattaaatacgatgttgatatatatatatatatatatataaactatataataaataagtgaattattttacgagtatggatcataaataaaacatggaataacaatagaatgtttgttaaatagaactcaaattaatgatcagttatgtacagtccggccttaggcccaggcactacccacttgggccgggcctggttatgtagcatatatataaacgctagtcaccgggatagttggacttggatggctctagcctgacccgtcaaagtttaacggaaacttgacatatgcaaagaccgtctccgtttgaactttgaagcgattgaaattttttgagaggcgaattaaggcgccaaaattttgagaatgataagtagattacgacacatgtactcacctcaatctgacggttacgatgcaatgtaaatacgaagaaatctcagggttaaaatcgtccaaatgttcggcgtcgtgtatacgcaattcagctacagacagtgtttgttacacaccattttgagaaatctaaattttcattttcccccgcttctctcctagaaatttcgaatttctgcttctctctctctctatcagttttctcagatcttattccagttaatattccggcgatcttctttctctctttgatcacttaattcttcaccggaatcagagagtcagggctttcgcacttgtacccgcgagctttgattaggtaatttcttagccaatgataccatcgctcgattttctctgttttcgttttcgattcatggctcgttactctcatattcagtgataagtcgtcgcgatctatgccccctttcgttaaattggtgttatcgtctcgattttgagtttagtaccagcgttatagtgttgtctttgcataatcggagagttttggtatgaaattcgttgctagagatatcacatctcgctagttgttcatcgtttcaagcatctattatctgctgcttctcttgttttcgtcatattatccagatctagcaccttcttattttgggattttctattaccaaattttttatccgagtgttagaaatttaccattcctaatgattaatttatcatccattatcgctgaatatagcctgcgttgtactgctttacttctctgtttgtgttgctattcagaaattatatgagtgattaggtgttcgttgatatttacattctttttcccagcagaattgttaaccttgtggtgatacatttcaggaaaagatgagcgactatagaagcttcggcagtaactaccatccatcaagtcaatctagaaagatttctataggagttatggctgattcacaaccgaaaaggaatcttgtgccagataaggatgatggagatgttattgctagagtagaaaagttgaaatcagccaccgtaactgaattacaggcgaacaagaaagagaaaagtgatttagctgccaagcaaaggaattcagctcaggtcacaggacatgtgacctcaccttggaggtctccgagatcgtctcatcggaaattagggactcttgagagtgttctttgtaagcaaacatctagtttgtctggtagcaaaggattaaacaagggacttaatggagcacatcagacaccagctcgtgaatcatttcaaaactgtcccatttcgagtcctcagcacagtcttggtgagctgaatggtggcaggaacgatagagtgatggataggagtccagagaggatggaagaacctccatctgcagtcttgcagcaaaaggttgcctcacagagagagaagatggataagccagggaaggagacaaatggaactactgatgttttgagatcaaaactgtgggagatattgggaaaagcttcaccagcaaataatgaagatgtgaactctgagaccccagaagttgagaagaccaacttcaagttgagtcaagacaagggttcaaatgatgatcctcttattaagcctagacacaattcagattctatcgaaactgattctgaaagccctgaaaatgctaccagaaggccagtaaccagatctttgttgcagaggagggtaggagccaaaggtgtccagaagaaaaccaaagctggtgccaacttaggtcgcaagtgcacagaacaagtaaatagtgtattttcttttgaggaaggtttgcgcggaaaaattggcactgctgtgaattccagtgttatgccaaagaaacaaaggggtagaagaaaaaacactgttgtaaaatgccgtaaggctcattctcgaaaaaaggatgaagctgattggagtcggaaggaggcgagcaagagcaatactccaccacgttctgaaagcacagaaactggcaaaagatcttcatcttcagacaaaaagggaagttcccatgaccttcatccacagagcaaagcccggaaacagaaaccagatattagcacaagggaaggagattttcatccatcgccagaagctgaggcagcagctctgccagagatgtcccagggattatctaaaaatggcgataaacatgaacggccgagtaatattttcagggaaaagtctgttgagccagaaaacgaattccagagtccaacctttggatataaagcaccaatctcaagtccttccccatgttgttctccagaagcatctcctttgcaacctaggaatattagtcccacattagatgagacggaaacaccaatatttagcttcggtactaagaaaacctctcaagggacaacaggccaagcgtcagatacagaaaagagattgcctgtaaccttcataaactgaagcggctttatctatacttaagttgcatattgactttatatactcctctttgacttttgtgtttacttatttattttcaggatttcttggagaagaaaagagattattctttcagaagagaaagttctcctgagccaaatgaagatttagttctgtctgatccgtcgtctgatgagcgagactcagatggttcaagagaagattcaccagtgttaggccataacatcagtatgcttcttaattcttatcctagaccatataaaaactggaggatcttattttcttcttaacagaatccatgttttgcttattctattgatcttctgattcaggccccgaagaaagagaaactgccaattggactaatgagagatctatgttaggccctagctcagttaaacggaactctaaccttaagggcattggacgtgtcgtgttaagtcctccctcccctttgtcaaaaggtataatgctcatttgtatgtcactgttgtgggtttatatactgcaccctcatttgttttgtcctggaaactgagcagggatcgataaaactgattccttccagcattgttcagagatggatgaggatgaagatgaaggcttgggaaggtctcttgtagatataactaatattacgtgtctatctttaatctttgttcctgtcttaagttgattatttaccatgtctcagggctgttgcattgttcgctatggctcttcaaaactttgagagaaaactgaaatctgcagctgaaaagaagtcctcagaaattatagcatcagtctccgaggagatacatctggagttggagaatatcaagtcccatatcataacagaagcgtatgtttgtataatttattctgcattctttcttttaaattatcaatcaaagatcttgttaattatggtacaggggaaagacaagtaacctagccaaaactaagagaaagcatgccgaaacaagattacaaggtacatcaacacattatatcttaatagttaatactgtactcgaattcacagtcatgaacattaagaaagcttagaagttcaaatatactatctttgcagtttaatcctgattcaaggtagtagatcggaaatttgatatcaagtattactctttagattgcatttagtcttgaagtactcaccatcttgcttcattcttgtgctttcatgtctctttgattagacacacacacacacctaactatactttcggctctaacatagacatgaaacttgcatttaacatagttatatcaagacaaagctaaatgctcaattcattcctatgtggagaataataaaaaattgagctgtgtattgttgtggaacatgagagtctggaaatgtctccatatttccactcattgaataaaaatatgcaagatccgttctgatctattgtgttcactgataatatctaatcgtctaacagagcaagaagagaaaatgagaatgatccatgaaaagttcaaggacgatgtcagccatcatcttgaagattttaagagtactatcgaagagcttgaagcaaaccagtcagagctgaaaggaagcataaagaagcaaagtatgttaacttctgtaattcctgcttttactacaacgaattctaacactagaaatacttgaaacatatgatgttatcaaagttagattcttcatggcaagatagttttaatataataatagcaggaggacaagtatttcctaaactcacttgataactttttatctctctatgacaggaacatcacaccaaaaactcattgcacattttgaaggaggcatcgagacaaaactggacgatgcgaccaaaagaatcgattctgtaaacaaggcaagtcattgttctgcttcttaagagtcagattctaaaaatggttaaatcatgaattcaaaagcacaacttaaaaatgacgtattggtttacagtctgcgagaggaaagatgctgcagctgaagatgattgtcgcagaatgtttgagggatgattgacactgagtctcacagaatcaatcaaccacacgtacgtcgttattctccattttaaaacataaactagacgaactgtgttaaccaggaaagaaaaacctctcaagcaaaaccagcctttggtttagtggtctcatgagttcaggcgaataaagaagatatagtagatgatgctttgactcattgtcattgattcgtattcgtatagaatagtttattgttcactgaaccactacaaaactacttatatcatagagccttattttatatagcagtttgaaggtttctttttaatttatttttgccagcaactgcagatattttttattaaaccaacaacttttaattaggttattgatatcttgatatatatcgaagcaaaaccaatccaaacatttttcttttaaaaaccagaatattttgcagacgttgatgtgaattttaattacaatattttactttaacagagatgtatttcatattgaatatcaaaaccaaactgaacaaagaatggtcacaattcgatatcaatcgaatgaaacagaaaataaaatgttggacccaacaattttactgtgatgataaaaacatggtagagataattttgtttgtaaatagagagatctcaaatcacagaggattctttttttacggtcggtaaaagaatttagaatgtgtcgagagggtaaaaatggagaagacgacaagatagtagcagtcgttagaaacaaacaagaaagaagggagggagacaaaataacacaaaggggtggatgaatcacgcggcattcacgtgaagtgcacgtgaacttggccaaaaaaagcctaattgtgggtcccatttaaagagaaaactaaagcctttaagaaagggcccatccatatatgtcttaataatggcgtgaaggttctttccgctcacgtgggccttttgtgcccgtctctctcgcatgtcactcactacagttttactagtgttttgttttatttttgataacaacattattgattttttttcggtctacctaagttttgacctttcttttttaattgtgaacaattgaacatgcgtattacttattgataatacttttatcttcaataaaaaaaataacacacgaacataatatagaaatagtgtgttccaatactggagattatttagtaagttcagttggacgctttgtcattgcatagtttggaatttattcctaaactttctaagaacacgttcttataggaatttgcatgacgaaaaaatcaatactagttgcattattgttggagcatcatcgggagtgattttttttgtgttttcctatttactacattgtgttttcctgaccttttaaataaaaaggaaatacacaaaaccatatataaatatatgtatatatatatctgactgtgctcaagtaaaattcacggatcagacgttaaaaaaatgatcatgcttaatattttctcattttagatgaagacaaaaaaaaaaaaaaggaattgcaatcgtagatttgactttatttttatttaatttttctattctttttccgaaagcagagaaaaatggagcggtggagagtagagaagtcggtcataagaatgtctctctctctatttctttgtctttcactatcgcccatacattatcttgcttctttcatttattccatcaatatttttgttttaaaatgaaagatttacacattaacatgaatacttatactactctttatcgcgtatatatagtatagtctatgttattatgaatttatgattatattttttctataaaacgtgcgaaaactcatttcacatatacaaacaaatatatacgttttgtattaaaaaaaagcaactgtaaattttataaatctgaaatgtaacatttgaagtcgaccaaagtttgtaaggtaataatttgtactaattctccatactgtgtcataatcacgattcaaggataaatatatgagttgtggaccaaaacaaatcctccatatcaatcaatcataaatgaaataagcgaatatacatatatacaaccgactatatatatatatatatgctgctcttcattaaccccaagaaagaaaaccaaagtgtgaagtccgaatctctctgattctacaattcacaaaaaccggaaaaaaaaaaagacaagtaaagaaagctttgttcagtttacttcaatggaagcaaaacccttagcatcatcatcatctgaaccaaacatgatttctccatcatcaaacattaaaccaaagtaagtttattatggtttcatctacactttttgcgacttctataaacatatacacatgcgtggttttgaaataatgggcgcttatggttctgtcggtgcttgaaacaattttgtcttctcctgactattttttttttgttaataggttatttatacgtgactcttttcttgcagattaaaagatgaagattatatggagctggtgtgtgaaaatgggcagattcttgcaaagattcgaagaccaaagaacaacggttcttttcaaaagcaacgtaggcaatctctcctggatttgtatgagaccgagtacagcgagggtttcaagaaaaacatcaagattcttggagacacacaagttgttccggtgagtcagtctaagccacaacaagataaagaaaccaatgaacaaatgaacaacaataagaagaagctaaagtcctccaaaatcgaatttgagagaaatgtttcgaaaagcaacaaatgtgttgaatcatcaacattaattgatgtttctgctaaaggtccaaagaatgttgaagttactacagctcctcctgatgagcaatctgcagctgttggtagatccacggaattgtattttgcttcttcatcgaagttttctcgaggaacttcgagagatctaagttgttgttctttaaagaggaagtatggagatattgaagaagaagaatcaacctatttaagtaatgtaagagaaattaattagctgcttgtcttagttctttcacatggtagatcattaattgtctttttcttattgcttatgcagaattcagatgatgaatcagatgatgcgaagacacaagttcatgcgagaacaagaaagccggtgactaaaagaaaacgaagcacagaagtccataagttatatgaaagagtgagtttatatgtatgaaaatttcaccttagttagtagaaaaaaaataatgtatgaaaattaatgctaattaaggatttgttaacagaaacgaagagatgaattcaacaagaaaatgcgtgctttgcaggacctactaccaaattgttacaaggtttgagattaacttaaatcacattacattgtttacttagtcttagagagttaattaattttctctttgtggagatttctgaatatctgtaattgttgatgataggatgataaggcttcattgttggatgaggctatcaaatatatgcggacccttcaacttcaagttcaggtattcaaaataatacaccaattcaataaaatttcattgagagataataaaatgattcaggtgttaattatttaaacacagacttgtgtttatatttacatataaatttgttttttaacattaaaatatactttgtaaagtgtttttgttatcaaatattattgcgtttggcttttacctttacgaatgattcttgataaagtcactagaaactagtttcataagagaaaccaaaacaaattataaacgtaattaaacactaatcaataaacaatcaaaagtttattccttatttattttactacaaatttttttacatatatataagattcttaattaacatgctctaataattatttacagatgatgagtatgggaaatggattaataagaccacctacgatgttgccaatgggtcattactctcccatgggtctaggaatgcatatgggtgcagcagcaacaccaacatcaataccgcaattcctgcctatgaatgttcaagcaaccggttttccggggatgaacaatgcaccaccacaaatgctaagctttcttaatcacccaagtggactaattccaaacactcctatcttttctccattggaaaattgctctcagccattcgtggtgccttcgtgtgtttctcagactcaggctacttcttttactcaattcccaaagtctgcgtccgcctcaaacttagaagatgcaatgcaatatagaggaagcaacggttttagttattatcgctcgccaaactaatgatttgtagaaagttgatgttttctccaactaactaactttaagcaaaaaaaaatgatcgtctactctgtgttgttagtctatgggcttttgggccttgattcttggaacgatttgaacttaattccaactattttcaaagtggatgtacaaagtaaaatataacaaatataagttatcatagactctataacaaagttataagtagaggacgtgcaattgcataatgatggatgatgatgagtgttcaattacgataaaccgattttaacgcaaacccaactaagatgaagacaactcatttgacctaaatcgtaatttgaaacgaattttgccatgtttttgggattaaggaacaatctcaatgatgagattgagtaaagtactacaaaacttgggcttgatgggctttttagtggactaatatctactttattctttcttttttcaaacattaaaaaattaattgggctttttcaaacacgaaaacaagggagtgcaatagtgtgatgaagatgagactcacacattgaatttctgatattttagcgtcaggtgcgttgaaaacttgaaatcaatgtgaagattctcttttaaaaatagatgactcttatttcatgagttaacatgatacttaaagaaagtggatagttaagtctaaaccaattcttttagtatagaaataaaatttcaaccacttcctttaaatatgaaaccatgcaaaagtagataacaaacgaaaaagtgtttcattttaagattcgatgtcacgatccatcacattgcaccgttggttgataaatatctctcatctttgtttatttattttcacaatgttgtacttctatttctataacattttcgtttgaattcaaataccaaattaactctccaaacaattagttcatcaagtattttgttcacaatgatatgttaacaacaaatcattgattcattgtccatgccggattattttaaagatacagaaacagtaaacctaagatacaatgaatgctaaaactaaattattctcccaaaaggattacttagctttcatgagtaattttatatttttcttttatccactcattttttatatactttctataattgtcttattacgtaacaaatatgtgctataggcatatttagaatctactctatcatcataccatatataagacacattttactttattaattactttttgtttgttctcaaattgaaaataaacagacgtgtttgtgctaacttcatgtagtgtttagatagtgtttcattcactggccatagacttattttacaaagttatatgtgcatgtcattatatagtgtagaacttaaaacacctaaccaagaacaacaatacacacacacaaacataaggaaaaaaaaacttttccatggggctcgtaattttcttggcactaattgtcttaatccttattattggtctcaggatattcaaagcttttatgattcttgtttggcatccatttgtgttgaccagaagactcaaaaaccaaggaatctcaggcccaaattacagaatcttttacggaaacctcagcgagataaagaagatgaagagagaatctcatctttcgattcttgatcctagctccaatgatattttccctcgtattcttcctcattatcaaaaatggatgtctcaatacggtgtcgttttctccaactctctctttgttcatcttttattttagattttattcgaggataatgcgtaacacacaagttatctatgttatatattattaggagagacttttctttactggaacggaacagagccaaggatatgcatctcagatcctgaacttgcaaaaactatgttgtcgaacaagttaggtttctttgtcaaatcaaaggcaagacctgaggctgttaaacttgtcggctccaaaggacttgtctttatcgaaggtgctgattgggttcgccatagaagaatcttgaaccctgctttctccatcgataggctcaaggtattttaatccttctttcttagcttgacttgagaaattaaacattagagccgaataacttaattttggttgtaaatttctcattttgttgatcagatcatgacgaccgtgatggttgattgtacgctcaagatgttagaggagtggagaaaagagagcactaaggaagaaacagagcacccgaagattaaaaaggaaatgaacgaagagttccaaagactaacagctgatataatagcaacctctgcgtttggaagcagttacgtcgaaggaatcgaagtgtttagatcacaaatggagcttaaaaggtgttatacaacttctctcaaccaagtctctatccctggaactcagtaagttaatcattctcctactttcagttctcaaacaagattcttaggttttgacatatattggtcttgtttcttgtattctaaggtaccttcctacgccttcgaacattcgggtatggaagctggagaggaaaatggataactcaattaagagaattataagttcgagactacagtcaaagtcagattatggagacgatcttctcggaatcttgttgaaagcttacaacactgaagggaaggaacggaagatgagcatcgaagagatcatacatgaatgcaggactttcttcttcggaggtcacgaaactacttcgaatttattggcatggacaacgatgttgctgagcttgcaccaagattggcaggagaaactcagagaagagatattcaaagaatgcggtaaagaaaaaaccccagattcagaaactttctccaaactcaagctggtaatgttcatttttttcaaagggtctcttgtgagacaatgtttcttgcggttgaagaaacctgtttatttcttgcagatgaacatggtgatcatggagtcgcttcgactttacggaccagtgtcagctttggcccgagaagcatcagtaaatataaagttaggtgacctagagattcccaagggcacaaccgtagtcatcccgcttctgaagatgcatagcgacaagaccctttggggatccgacgccgacaaattcaacccaatgcggtttgcaaacggcgtttcccgagccgccaatcacccaaacgctctcctagcattctccgtcggaccaagagcttgcattggccaaaactttgtcatgatcgaagccaagactgtgctcaccatgattcttcaacggtttcggtttattagcctctgtgacgagtataagcacacccctgtggataacgtcactattcagcctcagtacggcttacccgtaatgcttcagcctctggaagactgaagtaaaatgcccaaataaatcggatgtcttaatgaatatacctcacgtgtgtgacaagtctcctccatataggccggcttattgctgatggtgggggcttaacaaatcatccttgttaagttattgggcttttactatctcagtttggaacccttgatgggctaaatagttattaataatttaatatattgtgacattgcatgtataattgaaaagtggaaggaagtgtgtaacggttatgaattcaaaagccaggctaaagcaacttgaaaacatgagtaatcgacaattcagaaattataggaatctcgaacctcctttcgttcagaaaaagacagtccaaaatgttaataagttataacaatataaattgtcctctatgacttcaaaatattttattacagaaatggcaaaatgccaaacgaaaaatctggatcgctgtttacattatttgtggttgccttgtgagacgatcacgtgaactttagcttttacacgattttctacgtgtgtcatatatcccaagaaacaacatctacaacttctgtttctaacttgtaacgtgtaagcaagctacaagaagataaagattacttccataagcaatgacggcatctgttataatcgatgctgttaaaagactgtccccacacctccattagcgataggcgattttagaatccgaagtttcctttattgtccgttacgttgtcttactttctttcccatgtaaaataaattcccattactcctatgttattttgttcggttagaattttattcattatatcttcaaaacagcttgtgcttatatcagaaacagaagtcacgacgaccctcacactacacacgacacataaaattgaaagccccactgcgaatccaccacaaagcaaaaaaaatttgtttgttattcgaatggagctcctgagcacgatcaatctcttagcaatagctctagtgcttcttgtagttccgaagatatatggagcttgtcggatccttgtttggcggccatggatgctatcgagaagattcaagaagcaaggaatctctggtccaaaatacaggatcttgtatgggaacctccgagagattaggaagatgaagaacgaagctaagcttatggttcttgatccaaactccaacgatatcgtccctcgcgtcttacctcatcttcagcaatggaagtctcaatatggtgccgttttagttctccatcttctttgatctttccttttcttaagttttttgtttcactagacaaagatgcctaactaacacgttagcaatggtatttctttaggagagacctttctttactggcaaggaacagatccaaggttgtgcatctcagatcatgagctcgcgaaacagatcttatcgaacaagtttgtttttttttctaaatcaaagacaaaacctgagatccttaaactttctggtaatggacttatcttcgtaaatggtcttgattgggttcgtcacagacgaatcttaaaccctgcattctctatggacaaactcaaggttctttaaaatcattccttcttatatctaattagttgacagtagaagatagcactttgttaacatttcctaaatttcttcagctcatgacccaattgatggtggattgcacttttagaatgttccttgagtggaaaaaacagaggaatggtgtagaaacagagcaatttgtgttgattagcagagagtttaagagattgaccgctgatatcatagcgacggctgcgtttggaagcagttatgcggaaggaattgaagtatttaaatcacaattagagctccaaaagtgttgtgctgctgctcttactgacctctatttccctggaatccagtaagtttcagtataatcactcttttgtttttaaacttcgttcttgttttagtgatttgaaaattggttttatttcttgtatcccaaggtaccttcctacgccttcgaatcttcaaatatggaagcttgatatgaaagtgaatagctcgatcaaaagaatcatagatgcgaggttaacatcggaatccaaagattacggaaacgatcttctgggaatcatgttaacagctgcaagctctaacgagtctgagaaaaagatgagcattgatgagatcatagaagaatgcaagacgttcttcttcgcaggacacgaaactactgcgaatctattgacatggagtacaatgttgcttagcttgcaccaagattggcaagagaaactcagagaagaagttttcaatgaatgcggtaaagacaaaatcccagatgcagagacatgctccaaactaaaactggtaaatgcaaattgcaaaagagttccttgcggctgaagaaaacggttttacttttgacctaactacaattgatcattgcagatgaacacggtgtttatggagtcccttcgtctatacggaccagtgttaaatctgctccgattagcatcagaagatatgaaattaggaaacctagagatccctaaaggcacgactataatcctcccgattgcgaagatgcacagagacaaagccgtttggggaagtgacgccgacaaattcaaccctatgcggtttgcaaacggtctttctcgggccgctaatcatccgaacgctctcctcgcgttttcaatgggaccaagagcttgcattggccaaaactttgcgataatggaagccaagaccgttctcgccatgattcttcaacggttccggctcaatctctccgccgattataaacatgcgccggcggatcacctcactcttcaacctcagtacgatctacctgtgatacttgaacctatcgacggttgaagcaaatgcttctacactactctgtatatgaaccttcatgggctaaagagacttaattaagatattgggatattactatgaatcatttgggctagcccattaacgatggcaactaacggcgtcaattgctaactaacgtaacacgtgttcggatatcaggcgccaaagagtaaagtcaaagcgactggtcaaaagaccctacggtcagattgatcaggaattttggtaacaatgtaccatcagataaatccacatcctactaatgatttattaacaatatcaatgtagtgtaattgtctttcaataagaaagtgaccagtatagtaaagaaaagaaagatcttcgtttacaaggagatgtaaacatcttatttgtccggtccggtgctcattacacgttgattcatgattcgatgaagaaatttcttcaatgaaaatgcacaagagaacagcatataaattagtaatttcgcaagtgaaaacgaaataaaatcaataaaatacggaattgaggatccacgtgataaagtttgaagaggtgtgacggagaaaagtgtaagccacatacgactatccctgcctgcaccactaactctcttaacatttattgtgtaattaattttgagaatgatatatctctgttacttgttcataacaccacatattttatttgatgcaaccttcctaaacaaatatattcacatggttatatatgttaccatttaatcaaattttccaaaccttcgctaaacaaatatattcaaccgttttcatttgtattgtataattgttgattgcaaacataatttctgattagtaaatttgtcttctgtataaaattttggaatgttcagggttaggatctttaggtttttaatgatatcgattatactttttaatttcaaatttcaacatagctttcagagtgtgtatacacacatcttatttatttaagtatgcgtggaaaagctacagttactagcttttttttgtttattattttagtgaaatctcatttcttaattattgattgtagaaaacatcgacaaaaggcataggtgttggtattatcaatttattagttgacgaacgtgttttatgattcctgaattacccccaccaaataaggcatactactaatcttgcctttaataagaaagggcaaattagagaaaaccaaagagatcctcaaaacggtattcgcggttatggaaacaatattttatatagatgcaaatgataatactaataaaatgtaaataaacggtcgattacctaaagctacaattttggattaatgcattaaacacgcgttacaggtgtcgctacttataatgcctgagagtgataggctttgtaaaaaggtctgaatactcagtctctaaattaagaccaaaatcaaaggggtcgacactaatccggtgacgttaaaagaacaaaaagtgtcgaattttccaaatttttttttatagaaaacagtcgataataagatataatcatcaactgtggtggagtttcagctttatatctaagaacataaatttgttaaatttctataatcgactttgtcgtgcgtaatcattacttcattagttcattacccatagattactagtgtttggatttcgaccaagttgtgttttctgagtaaggtgtggaatttttggaattatcaatgaatgaattgttgtatgcagttaactaacaattctttgctagtgatttgtgaaataatctaacgtatttgcaaaatccgaatattcggctttttattatatatataaaatcaactagggagggcaaatacgtaaatcgcgcaaaagacaagactcgtataaataaagatcatctggttaaagccatgagttgactcatttttcactaaaaaaaaactaaacctcttttggcaaaagaaaaactttgaattgtataactcttcactttcttcggtcatatctttaatggggtctgaagagagaatgatgataagttcttcttcagttctagacgaagagtatgaatatacagatgatgggtttcattacgagacaaggcaaaacagtttgtctagattatctatctgcacaaactccttccacgaagacgacgaagatcatccttcagaattgggtaatttcttctctacgttgtcgttagagagcttcaacgacgacgtcggagccgaagctgacgtagaaatctccgatgacggtggcgaatcggattccgacaaagactcttccggattttactctctaccgacgatcacatctcgccggagaagaaaactcacagtttccggcggtttagaaacgagcaaagagagtgagacgaaagtcgatgggagtaagtgtaatatagttagtcaacggagggtattaagggaaaagagtaaaagagggaatcagtacggtcactggtttaacggcgtggagagagacagtgacggcggaggagagttgacggtgttaacgaaggtgaggggagggaagaagaagtcaatgaagatggggtttgaagaagtcaaagcttgtagagatctcggcttcgaactggatgttccgggtcgggtttcagggtcaaaccgtgaaactagtagtggcggcaactctcccattgccaactggcgtatctcaagtcctggtaatttattatctaatctcacatttacttttaattttcttctctaaaaagagaaaatattattaattgtgtgattaatatatgattaggggatgatccgaaagaggttaaggcgagattaaagatgtgggcacaagcagtagctttagcttctgcgtcacgttaagcttcttattattactctgttctgctctgttagggtttgtctttcaaaattttagctttttgttcctcaagtcttttcttgtatcggtaactcgtttaatgggtttgttgtaaatatgaatgaatatatgatcagctacacattacttgtaaataaaccaatcacgtggattgtttttcctacctttttctggtcattacactatttcctaatgattaatattgtgctctctgagtgaaattttttcctttaaacgatcagaatatagattttctgcatacaagggaccctctaaaagctaaaaagctcaagcacccaattctacaaatcacatataaaatcagttactcttttatgaaaagcagagtctgatgctttgtgtattagaatacaatgaatccaaggattaaacaaaacacacgaaaaactaactttatttgagtcaaaatagcacatattatgtaaaagatgaaatgcggtttttcaggaattgttgttactaatggtagtatggtataagaatcaagtaagctgtttgagtttgaagagtatatgtcatttgtcatctcacttgaagatgagattgtgacatgttttgtcacaggggtaaggacagtcaatggctttcactgttgttctgtcaaagtaccaatcaccaacagattcagcaacggtctgcacaaacatcatggagcaagcaaacaaatttttagtagcttgtaacgaaatagaaaccattttacgagctgtgggggataaaagtttaccttgccatgaagagtaggagaatctggtgcataccaagtgtcctgtctttcagattggcagtgagcgaagcatgagtttatgaacacaccgttatgtgtcgatgtcgcgaaagactttacagcatctaccatatgagtcctgaagtctatttttgacataagataagggtaacaaccacatcgatgatatagtatagaaaatgtgggatagtgttaaaaaaataactcaccttggaagaactggatctgagatgaattacaatgcgagtgatcagatttgcatgccttccaagagccgcttaggtcaactgatggtggagctaaactctcttgtacctgttggagatagaagtgaaatcttttacctgatttgagctaaactatctcgttctgttttttgagaatgaaatgttttgatacaagtgaaatagaagcaatgagagtgataagtgatgatgaaaagaagtacctgccaagcgtcatatgctgcattgagaagaaacattggagtcttaatgcctgaaaccaagttctggggaaagaagcactgagggtatgaaacagaacataataaattagtttgaagatgctcgagtcttgtctaatggaaaatttgcctgtgaatatcaacaaagtgagaaatttaccgaagttggatccaaatgctttgtacaagcagtggacagttccttttggaggttctacattttgacacaaaacaataattatttttacaacaagagtaaagattagtagaatgcaagaaattctctgattgtcagattacctgtactgtaacaacaccttggaacattttccggagcgagtggcccccagagacatccactctacattttcaagtaaaaaggctttaagttttgaatttgctatgtgatgcacagttaactaaaagatctcagaggaaggaagatataagttgaagagaattacgcatccataaacattccagcatcacttaagcatttcactgtcgtagtgcccggaaatagttccttgaactgatcgcagtgtaggatggaagctaatcccccagctgaacatccagaaagtagagcctgagatagatcattttacttacattaacaagagcaaaatccagtaacatgatagggctgatggttcaaatgaaaagcaaaacctgttctgctttttgcatgcctttagagagtagttcttccatagctgaatgccagattcgttgtcctctatagtaaagttgtgagctctagttcaaagaaattagaagcaattaaatcccaagttacagagaagtgaaaaacatgaagactgaaaagcacaatctactattggtgactaacctcatcctgactatcgccggtgaaagaggcaccatcgcagtaacgcaatttgactctgttccagttgaagaagtctgcaaacccgtagatagtcaagcgagaatcaatgcaggtaggtaaagattaaccaaatgtgtaagtgcgcagattgtcatgcatagtaccaggattctcattagatttattgctcaatattccagtgaaggccaaaactttctccatatgatttgatgaaccacggcgagtggttttccggaagatacagctcctacgtgtgttgcaccatcctccaccctgcatcacaagtaaaccaattgtaaacaagaacctatatgaatcttacttatatgaaaatatgccaaaagactaaagcttttggataaggtatatacctcgagttggatgagccaccggttagctcctgatccagaaccagggtgtagatgataaccaggtagtgttccatccaggcacactgcattaatgaagtgataatattcaagtaatttcagataaaggactgacctttaaaactcgacaatatcaaatttgagggaaacatattcaaagaaggacatgacaaattcaaattacaacatctccctaatcttttgtgttaatgaatccgacaaaaaacatgaccaggatattcaaattcaagtatcaccaacaacacatctgtggaagcaagcaagcaagcaactagagagagaaagagagtaccaaccagctcctttggaggcagcagcctgaatcaaagtgagaggcaccataagaagctgcgacggagatgtcaccaccaattgactttcgagtaacgagatctcatcgtctgtatctctcacattcccactcccaatcacacctaacacgataaacagccaaagccagaatatcgccgccgcaatacgcaacacactcttcatctccgccggagtcctgaacagagctgaaaatcttgactcgaaaagatcgatttctgtggactctgacaaatcttgtactgttgcatgtgtgtgattgatagcgagagaagtctttatggctttttctggttaaattctttcacgctttcatcattatggtaataaattgatttacgtcacgaaccaaatctttgaataattaattgattttcttgaaattaatatggttctaaaaatacaagatacagtactaattttcttgcaattttaatttatcttatttgagacataattattagaggatttttactgttattaacatgacaaaaagtgtctgtcttttgaatgttcctcctcaattactgccaaaaccaattaattaaatcattaattaaaaagcttaaatagtttatttcatttttgtcggcatcggctctgtttaacagtatcttatgccgcatccgcgcatcacacgtgttagtaatggtctgtaacgaggccttttataatcactgggcctatttaatcatcacaagcccacctcactattagctctttcaaggaccgtatgatccaactgtatgatacaattttggatgaaacattgaaactgattgtgaaaattctgcagacactcttacgcagtcttatattactactaaatgaatctatgatactaagtcatgtaaataaataaaaaccgtaaaacagaacggtgaattttaacgggaagttttcatttttgtggaggtgcctgcccactccaatatacaacttttgttttattctggggttttgaaataaaatatagtataatataaatagttaagttagtggatgaattgatgataatggctttggttttggatctgtggacgcaattactaataaataaaagaatacaacaaaaaacaaacaatgtgaaaccaaaagcataattttctagggcgttgaaagagtttgtcagtagtcagaaactcaaaggcaaaaaaaatgagagagtggatttggtttaagtcaacaaatttgttttgtttggtttaaagcgtgactctctctatgtgctcgtggagttggcctcttttgcatgttaggcatcattacaaatttccttatatatatatatatatatatataaatctcattcgttacatagaaagaatcttacggtattactagacatgaaaaatgttaagtttacctcgtttaataagatagtatatagagcattgagatttaaaataaacctacttggtaaacagaatatgataacattaaaaaagaagactaacatgttaacatactttaacgttcaaactatataatatcattaacactggtcaaatcttccgattatgaggagcaagattcaatgcaaccaaatataaaaaattgaagaccataacaaaaaaaaaacattgataaaatgggtgtgaataaaaaacgggacccgcatagaaaaaattgaaaccatgcaaagggtccatcgatgagaacaataatgacgtgaatcacctgtaattgtatacctccaatcatttgcaaaccccattaatataaattctgaaggtttaaaacattgtggaaattcacttcttcatctcttctttttaatgatcggttatgtatttactctctaagaatgtacgtaaaaaaaaaagtacttttaatgtatcaattcttgtaaaaaatatccaataaatcagatgtaagaggaaaataaaaataaaaactctaaaaagacgatctttcgcttttacatttttcaacgcagtttttagactttttactctgtttttttttttttttttttgattaccctccgaaaccatttgaaaagcccgagacaactcttttcttctctgctcactctcacctatgagcttaaggaaattaaaagaaaaaggtgaaatcatacataattcttgacctgcttaaatcaaaatcaaacctgttgcagcagcttcaagcttcttctttttcccctcttcttcagctctatttggattgtgactctactaattttcgattttgaatcttggtttctccgtaacatatctgaaagaggggtttctgggttttagcttcttttttttcccctgaaaagcttggatctttaacagctggtcgtctctgcatggttcaatctcaatctgggtcttcttcctttttttttttcttttttaaaaaatgggtataattgtttttttttgtttttgtataattagtttttaaaaatgggtactttttgtcagattcccatagaagaaatctaaaggggtgttttttccccttgtttactgtctctattttgcttccgatgtgttcaatacaacactgtcttctctttgccgctcctttagatctgtttccagtttctgcttgatgatccatctccttcttcaacaggtcagatcactgtttctgtttccatttcaagacctcagaatccaaagcttttgtgggcattcagctgatttttaaaaaaatccgaatttgatactatcaggtgcttgtttgcgttttaatgttcagagattgagcttcagatgatgcttggattctgcataacgcgtcgaatctttgtaggctttataagaatttcgcctcttgttaagtgttgtggtgctggaaattgcggaaactctttagaggtttatgatgagattgtgcctccaaggtgtttgtagtattgcctgagtgatgggaaacgggacttcccgtgttgttggttgtttcgtgccgtctaatgacaaaaacggtgttgatttggagtttctggaacctttagatgaaggtttaggccattccttttgctacgttaggccaagcatctttgagtctcctgatattactccgtctaactcggagaggttcaccattgattcaagcactattgattctgagacactcactgggtcttttcgaaacgatatcgttgatgatccttctttcttgaatagacacaacagtaaaggtttggcggaaactacgtttaaggcaatctcaggtgcttcggttagtgccaatgtttccacggctaggactgggaatcaaatggcattgtgttcaagtgacgttttggagcctgctgcttcatttgagagcacttcctcgtttgcttctattcctttgcagccgctccctcgtggtggttcgggacccttaaacggattcatgtccgggcctctagagagaggttttgcatctggtcctttggatagaaacaacggtttcatgtctgggcctattgaaaaaggagtaatgtctggaccccttgatgtatctgatagatctaatttctctgcgcctctttcttttagacgtaaaaagcctcggtttcagcgttttatgaggagtgtgagcggaccaatgaaaagtacattagcaaggacattttctagacgatctggagggttaagttggatgcatcgcttcttcttgcatccagagactagggtttcctgggctgttggaaaggacggtaagctacatggtgaagaccctgaaagttgtctagagagcaaccgtaacttgcaatgggctcatgggaaagctggagaagatagggttcacgttgtgctttcggaggaacaaggatggctctttatcgggatatatgatgggtttagtggaccggatgctccagatttcgtaatgagtcatctttataaagctattgacaaggaattggaaggtcttctttgggattatgaagagccatctgaagataatcaattgcagcctgaccaggaacctcctacagaagagaacatgtgtgatccagaatctatcagtgagcagcattcaaagtcagtagtggcagaaagtgaggaggttatgattgatgatatcagtagccttggaaataccgatactcagattgctgatggtccacctggagactcagctggtcctggcaagaaaagcatgagactttacgagctacttcaattggaacagtgggaaggagaagaaatcgggcttaaacgatatggagggaatgtcgctctaaacaatatgaccaatcaggttgaaaatccatctacttcaggtggaggagctggaaatgatccttgtaccaccgaccgtagtgctcttgatgggattccgaactcgggacaaaggcatgggactaaaaaatcacagataagctctaagataagaagaatgtatcaaaaacagaagtctttgcggaaaaaactgtttccatggagttatgattggcacagggaagaagggatttgcgttgaagagaagatagtggagtcatcgggaccgattaggagacgctggtcagggactgtggaccatgatgctgttctaagagcaatggctagagcactagagagtactgaagaggcgtacatggatatggtagagaagtctcttgacataaacccagagctcgcgctaatgggttcatgtgttcttgtaatgctaatgaaagatcaagatgtttacgtgatgaacgttggggatagtcgggctatcttagcccaagaaaggctccatgatcgtcactctaatcctggttttgggaatgatgagggtatcgggcataagagtaggtctcgagaatcacttgtgcgtattgaactggatagaatatcagaggaatctccaatacacaatcaagcaactccaatcagtgtgtcaaacaaaaacagagatgtgacctcttaccggttaaagatgagagcagttcaactatcaagtgaccatagcacaagtgtggaagaggtatatctctgactaattcatctgaatagtagtgaaagtgcaagactttggctctggtttgccaaaaagcaagtttctttacctgtttcaggaaatttggcggattagatctgaacatccggaagatgaccagtcgatacttaaagatagagtcaaaggccaactaaaagtcactcgagctttcggtgctggatttctcaaaaaggtacaaacaaactttgataaccaaatcacattaagactagttcatcttctaacgattccatgcttgcagccaaatttcaatgaagctttgcttgagatgttccaagtagagtacattggaacagacccgtacatcacatgcgaaccgtgtaccgtccatcacagactgacttcaagcgatcgtttcatggttttatcctcggatggattgtatgaatacttcagcaacgaagaggttgttgctcacgtgacttggttcatcgaaaacgttcctgaaggcgatcctgctcaatacctcattgcagagcttctctctcgtgctgccaccaagaacggtacagttttaacaactaatcaatgattggtttagtacggttaagcagccggttaatgtgaaaataaaaccaacatatttggcaggaatggagtttcatgatctgttggatattcctcaaggagatagaaggaagtaccatgatgatgtctctgtcatggttgtgtcacttgaaggaaggatttggcgctcgtctggacaatattatccagagagaaaacaaaaattcaatagataaattaaccaaacacaaaaaaaaaaaaattaggttttggcttattgttttcaaacaatctttcaatttcccggaagttcaaaaaaagaaggcctaattctgtttttccttcttcccaatccaaaattgatcaaaatagctatttatgaaaatgttagttacaactagaatcagaatcctctgaatgagctagaaggtcttctcacctgaaaaagtcaacgcgtgtgggtcgttttgagccgttaatttacaatttcgtctttattcgattttttattttctgggcggagctaatcaaaatccaattctccggcttcttcttttgcttcttcttcaatggtcacgaatcttctgcgaatgtgtactgaatctctcgtttcagctaaagattcagattcattatgttatctcttcgaaacctcactactagcttcgtcgctcttccatctcgatctaagccgtcgtcgtcgccgtctttgcgtcgtcggttagttcgttgtcgacttacggaggcggcaactttttcacctattgatgtagtttctggagaatcggaaagagcggttggtagcttaactgagcttaaaaacggcggtggctggaaggtggaagatgagcttccctcggcggaagatggaggtgaaggaggagtagaagatgacgattcggaggaggaggaggggatttcgagtattcatgttcctcgtgagaaatacatcaatgtctccaagtctgatctcgttaatggtattgtaacgaagcttctcgattctcaagacggaggagacgctgatatcttcctcctcctttcctcgtaagctaattataaatctcctaaactaacgtgaatttgtttattggagtctctcttgagctgtttttggaactctttaggtgcttagactctatccttcacgcggagcataagaggattttagagcagatgagagccgatttcgtcgctactcagtccctagaggaggtaaagactgggtggtgattcatcgggtgatgaagaaagttcaacttcagatggagaaattgactcagaggaggaacttaagaactctgaacctaggagtgttaatggatacgaaggtttatcattccctttggctgatggtttcgacatttggaactttttaatttcctctggcaaacatgcaaagaaacgttccgctgaaaggtattagaacctatcactgaagtctttcattgatagaagatttgagattggtgttttgaaaatctgaatataacttgacaatactctaatgcagtgtaatggctgcaacccggttccagcgttctttcattcagctcctagacaatgccggttttgaagagctttcagctagggatttggcattgacctcggctcttaacacggattaccttcttactttgcctgtatatgttgattggaagaaggcgtcagagtccaatgctattgttttcaggtaatttttatatcttttgatgcactactaaaatgtgctatctagttctgtacggaaaatctgcttacgaatttcatcttctttacaggcgtggatttgcaactgagaaggagaagggtttgttacttgtggagaagctagactatatccagtctaaagttctacaagtaatcttctctactattgcaaaacccttgagaaaagttggaaaattgataaacaaggtatgatccctatttagtgaggcaaatactatgttatatgaccattgcatacatgcagttaagtgtaataaaggtaacgtacagacaatcaaattctcggataatcaaatctatctcgttcatctgaataacattttttcttcaaatttgataaacaggcgttaagtgaggcttctcaaactcaagaaattcaagatttatcagagggaatgaaagtttggctcaaggacctatccctttttaaggaatcatatcttgaccaaacttctgataatttcttgaaagatggcttccttccagattctgtcctccccatgcagttagcagcacaaagggcggtcagtcgatatgaggggcttctgacacctgttggtcctcgcgcaaagctcttcagaaagttgcttggatggattggtttcatttctcgtgattatgaaacaccatctcagctagctaatgatagtagttcatctgaaccttatttaaggtgcgtggcctttttctcactcatcattgccgttgtgttttggtctctatttgttgaaggtgaagaatctctatgtcaatatcagatatgtttttcatggatttgattgcccgaacgaacctgtatgttccttagtaaaaatctaaaaacaagtctgaaagttcctaaatgtgtttgtagcacttgtttgagcatgtcgttgaactataaaatcaaacacaaaattcattgcattattttttctaaacctgattagagatttgagctaagaagtaaattattcttcactcaggccgattttcttatcaaggatgacactggctgatatatggaaacctgcttcaaagaaagcttgtggaaatgatatctggaaaagaataaaaacttcaatttccattcttttatcaccttcaactctgcaggtattctctttatacgaaaagtaatagcatatgtttcagtctgtagtcaaacttctttatatgcatgaatcataagctatggccgcaggatcacattcattagatgagtctgtttgattttgctctttggtgaataggagcctgcgtttgaagagctaattttgctttacacgaaggatgcgagtgaaaaagatgataagaataaagatgaaacacgatcatcattacaattggagatatttgaaagaattccaattccagatttacctgtcagaatagtacatctacatcatgagtgtctcatgtttcttttctgccagtgagcttttccctgtagttttcaccaccattttttctttcactgttgtatgtaggtaattttccctcacaagaagctttactttcgcatcatagatacagtaagtgtggttgcattacagacacaattttgtttatattatctttgttgacccaattcttggaatcttttgttaggtacgtctggatattgctagtattctgggacttacggcatactttgtaaactacaagtttgagaacatctcatcatccccgtatatctctcatcctcttccttctaagccgcctaatacaaagaattaagattagtcctttgctacacagatcagcattctttcttgacgtgatcgccgtcacagctctggtaatatatgcaacacgagtggttttgggttacaagcagacatgggatagatatcaagtgagttgaaactcataatcatactctctttactataatgggtcttagtgctaaattttgaaaatatcccttgcaattgatctacttcctcagttgctagtaaacaagacactttatgagaaaaccttagccagtggctttggctctgtccatttcctattggatgcctcggagcagcaacaggcaagatctcattcatttctccctttcttatacctttgaaaatatgcatgaacgatttcgtattggaaaatcttttgcttaatggttttttactccaattactccctatctgcagtacaaggaggcaatattgacatatgcaattattctccaagcgggaaaaaatcaggttagacataaccagtcactcttttgtcttaatgccatgcctcatgtcggatagctcaacttcaagctctatcaacgatcaacgatgcttatgaataaactatttgcctgcagaatatgtcttataaaggagttggagatagatgcgagagattcatgtatgacactttcaaaataaaggtctgttttaaactgaactcttatagcaacattactaaaccttgttgctgactcactaaaaactactaacaggttgagatgcgagtagaaaaagctataagcacgttggtgagacttggtctagtaacagagacactggtcgatagcaacaccaagttacaggctgttccttgtcctcaggcttatatatctcttaaagaactatggagcagtctgcttggttgaattcagtccgtggttgaatgtagtaacatttttgctatattgtacaagatcttcaataaaacccgaatagattgtacataaacagaatctgctaacataatgttcttcttttttctgtgattatacagtcaaaaacagagttttatagatttgtctgatgctcacagctcgaggggttgagattttgtaaagacaaatactcctcctcctcctacagaccgtcccaaaagcatgttgttatcgagatacgataggtaatacaatccacctacagatctcctgtattagaggaacatctttagcatccatagtcatatcttaaaacataggttatggaaaataaacaaagatcattgtataccttcctgggctggttgcgtttactggaatctgagctttgaaagtacggataaactgcaaaagctggaaaaccagtaaaaagttattagcatgttcgtcttggtttccatgcattggtactagaaagtgtgttttgtttcacctgtaggcttagaaatgagcgtggaagtattgcaggtgcgataagagcttgaagctgctcattgatgttaatgtttctaacacttatctgcaaggattccatggaactggattcagattgcttctggctaaacaaaatactgaaggcttcgaaaggcagacaattaactgacctcttcaaactgaaggtagatgtttcgactagagaccttatcaaatttcgcggtaacaacaagtgttgcaccttcttgctcctgccaaggattcatttacagtaactgtctggacatatatgaaattgaaagggtggttacaagtagagaagcaaaaacctccaacaagcttggaagactccactgaacaacattccgaatgatcccaccgtcggatctatctctgcactcaaacttctgaaagacctgccctacctgatcaaaatccacacaggattaaaaccgaagcccaaaactaaagtctctctctgctttgttcattatcattagtagtatatacctgaaagaagggaagtcttgaagcagcttcaaacagaacaacaacatcaggtgcagatgtatattgtagcctccatgttccatctaacttcactggatcaatttcttcaccgccattaaacccttccacagtcacctgaaaagtttctaccaaatccagactcattgaagaatataacatcgtcactcaatatcatacatcaacagtatccaatgcaatggctgtaccagagcctcctcaatgatagatcgttgatcagaagtggcagtgagtcctcgttgagtgtcttgaacagctctcagtagatcgtgtttcttgtgttctaagtcaagttcattgtcgacgacgacctgagttatcaccgaaacatactcaaatcatttgtttcagacgagccaaaaacaaaaatgtgcagagaacaaaccctggccgaagtctctccagaagctacagctactcgacacgagaatctctttctatggttggttttaatgtttaagccaaaagggctgattctacagacgcgggacaatgaaatcgcagggcaagagaaagtcgcagacgcaattcgatccattttcgaacctgatggataagcttatacaagataaaaaatttatccccaaagagtaacaatgtctaggagaaaaaaataataataataatttagtcgataccttcaaagctcaaaagctgctcgaggatggtgacaaactgagaactgaggaagatgagacagctttattttctataattactcttcatttttttattttaatacgtggcagtattttgacctgacatcgtgaaccggctcaaaccttaaccgagcctttgagcaatgaaagctgtcaattattccaccagaacatgaatcgaaaatgaccaagtccgatttacccaagtaacaaatgatccatagactaaaccatcaaaatggcactgtacaacaaaaggaaggccacattttgtaaactttaaagcagttttcttctttcttcagttagagccattgattagccattgttgtctggttggtggtgagcatcatgtgcaatctcatcctctccatctccaaaattagcccatggaagtattgactcaatcaacacagctaatggactccgatttgccaaatcacgtggacgtggtggtggtgcttggtgttgacctctcccgccaccttcagccatttgctctcctcccaccattcttggatcagccacaaagttctgcaaattgtctggtgggagagttggcatcgaatcagagaaatcatgggttgataaatgagagtacctgcaatgggttagaaccatacgtgatcagctctagccaaaaaaaaagaaattgacaagtgagtgagagttcaaaacgcttactggttattctcagaagagaaagcttctaatcttacacaaagccagctctcagcttcggttccatcttgttccagagattcaatgactaaatcagcagcgctccgaagcaatttctgtacatctggaagcctccatataagataattcctctcaacatatattttgatgaggtgatctaaagacgggatctttgattcatctgatcggaagtaagaatgcttgagtatctttgtccatgcctgatcttttaaaggtactttttccactagtttgttgagtactgttggatgaagcttcaaagcttgcgtcatgagatccaaagagctttgcttcgaagtatctctgggagtggcttctgaggaagaggtaggctccatcttttcaagataaactcgtgctattgcaagcgaataagagaaattcggaaagagccataatgagttatcatttcggtactcctccgagaattgctccagccacgcatactcctctgctctcaaagcaaagtagtccacacaaaacaaagcgcccacaggattactcgtgtccaaggaaagcaagagtttgcagacctccaacgctgacctatgacagccacgcctgtccatgtttctcatgtgagtgaaaagcgtcttgaagaacagcttgttttcatcgtggttaaactccaaccggcagttaccctggaacggagtgaacataggatgccacgcacgctccaaaccgtacaagcattttccaatggaatctgcagccatatcattctcacctacaaacttaaagtaatccgccatagttatgagcgactcaatatggtaaggattgtgtataaggacacttgctacaccattcaaatcatggatagcttgtgcagcctgaaatgctctctgagcctgctcatatgaggatgaatgggtatatctacacatcaaaagaaaagtatttcatcagatgtacaaatttacaatgtctgtattttctatacacacacccaacgaaaaaacaaaaagctgtaaaaattgttacctgaagtagttgttaccatctttagtctctagaaactccattgagaaagatctatcccatcgagaccaattctcttttggagataccagaaccgtctttgtgatatgatggactccacgccttccccctcgtctagagctactaccaccttgagagccactctcactctcaaatgatcgcatagcctttgaaccatacgttctcctcaactcgttctcaagattcagatacttggaatctatttccaacacaaatcgtgaagaagcctttttggaagaatcagcatttggttttgtctcctgaaccttatcttgcttagagttagcattgagaccaagtgcttccaaagtttcatccaaagtcatttcagctttaggcacattagagccactctctttgttcttcttctttttctttttcttcgacttattctttgacaccggctgcacatgatcagcgacacttgactgatgatccgcatcttcgttcttcttctcagctatagtctcatcatcaatctcctgcaatcaaacccaattgttacagaaacactttgtaatcattactcctacgaccaacaaaatatgaatcagctctagacatcagaataaaaaaccataagaatctgaagatcaaaccattgaaactatctacattcaaacttatcaacacattagctattttagaacacggaggaggataaaattctagatactaaatctaccgaacaatctaatcgtcaaaatctgagagactgacctcaggatcttcatcaccatcgttcaagagatcgaatggattaatcgaagaacgggctcctgattcttcttcgtcctcttcttcttcttcttcgtgatgtttctgaagtttcgaatcttcatgttcctggagaaccttcttcagcaacctcccagacatatcttctcctgcttcgtcttcggaaaatcgaacaaggacgatttcagacggcggagaaaggcggcgacaccgacgactagatgattatctcgtcgatacacgctaatccctcgcttctctcaacctttttaggagaacaaggtatctttccggtttttacttaaccggtacatttaaaccggtagaactgtagattgttattccgggagagagagaaaacaaccgagatgcgggagaaagaacgacggcgttttacaatcccttttttacctcaacgacgtcgttttacttgacacaattggcgcataaatttatattaaagttcgaatttggaccgcatataaagttggttaatttatagaatccaatgctttcggctaagctaataattagagtcaccacgagcacagctaaattgtatctctttagtgatatcttcacttttacttcaaaaagtattgtaataacgaattcactatccccttattattaaaaggggaagtacaaagtaaaattttgtctaatttggcctcaattttgatttcaattttggattttgttatttgctattcaaaatcattaaagataatttggtcttaataatcttctaaactttatatgatctgattgaatctaaaccgttcaataaaattaattcccttcaatctaaaccgttcaacaaaaataagtgaaataattttatttttttatcttcactttaaagacatataattataaataacataattcatatggtctttattttgccaaaaaagtgtataacctgtcaaatagttaaaaaaaacacttataatcataaaaaatattataccaattttgtgaatcttacatttttgtaaatattttactttcactaaaattacatacacatttttaaacacattttaacacatttatcttatcactaaataacaacaaaaaaaaatcccaattattatttaattatgtttgattaaaaaatttatatttataaatttaaaatatcaaatttattcaaatatttagtataaaaaccaaataaaccgattgtccgcggtttaccgcggattaaatcctagttattattattgcgattccctttccccatgctctgaaatttgttaatcatttgtccctatttctgcttaaccacttacatttcataatttttgagtttatattgtttaatgtatatattttacactattactttcattacttaatagtcagaaatctcataccataatcattacgatacaaaatcatagtccaattattttcttcattactgactttttcggctcttttacaaaaagctaatatctttatctacagttgatcatattttaattttcaccaaaagtataattaaacagaagactctaatcatatcagtgatcaaagtgggccaacatgggcccatacacgccacaaagaacccaacccaaaagtccaaagatattctttaagctcagtttataaattgcattctctttctccttcctacaggccaacccaacatcaacgacttattcgagagaaaatgaatcggaatcttagaaacgccattgtcgcatttcttgctccacttccttctatcgtattctacctcacctttctcagtaattactcttcatcttccgattcagagctctcttctattcaatcatggtgtttgaatcatcctcttctattagcaaaccttctcttcttcttaaacgtcaatgtgctcttctgggtcatcggtttactccaatctagccactgggtacgcatccatagtctccaaatctgttacccatttgttaaaattcgcaattttttagtttttgaaaaaattcgttaattttgcagatgatcgatgtgtattggacagtgatacctgtaatgctggttcattacttcgcttcgcatccattgtcacagtacaataagctgagatccatgattgtcataactctgacatggatttggagcattaggttgactcataactacttccggcgggaaaattgggaatggggagctagagaagactggaggttcaacgacttacggaaacagtacgggaaacactggtggtggctctccttcttctctgtctacgtttctcagcaggtacatgaccaccaactgttcgatgaattgcctcaaagagctcgtttttaatctaagcttgcctttatgaggatgatttggagaacaggatagtcttttggttataagggcttgaaccattgttacctttatatatatttgatgcttagcttatatgctttctgtttctcatgttgcttcttttttccaaaatttgctcagatcttcctcattgggatatgtctgcctttatatgtcatccattccattgatgagccactaaacatctgggacttcatttcctcggctatctgtttgaccggaatcgtcatggcgtacttcgcagacacacagcttcacgagtttgtaaccggaaaccaaaagctcaaggagcaaggaaagcccaaaatccccaatctggactcgggtttgtggcgttactcaagacatcctaattacttgggagagcaattgtggtggtggggattggtcatatttgcttggaaccttggtcaagggtggactttgattggtgcattggtcaatactctgtgtctggtctatgtaacgatccttgtcgagcgtcggatggtgaaacaacaatacagagctgaagcttatagagcatatcagaagacaacttcggtgtggattccatggttcaaatctcatgctgctgctactaaagacaagaacacttgaagaagctgtgattagtttgtttcaaactttcaatagggttactagagatccttaattgtgtattattatgagcattgtttgttgtttcttcctctgattttgtttctttggtctgtgtaaattagcattaaaatgggtttttgtctatttgggctcgtccacgtcgtatctaataagtgtttttttaaaatcatagttattttatctagaaattaatatttatgaatttatattgtttcagaaaatcacaaaaatatatatttgtcaagaacaaatcaaaagcatatgccaaaatggttagatactgataaaattgtagaatataccattagaataaaagtttgttgatgctatcataatctttggggaaaaaatctaattaaaattgctataaatacctaataaaatattattctcgttatcatttctcatctccagtttcatagtcactaacctaaaagaattaatggaggaaactcggaggaggtttgtcatatcctctgttctaagtgtttctttgatctacttatgtctttcgacatgtcacgtttccgccttcgacttcggtagaaggcagctccggtttaatactgatggtcggttcaagatactgcaagtgtcagatatgcactacggttttggcaaagagacgcaatgctcagacgtttcacctgcagaatttccttactgctccgatctcaatactacctcctttttacagcgaactatcgcttccgagaagcccgatctcatcgtcttctctggtaccaaattcttcaaataatacaaaattttatacaataattgtgttttgttatctatacaaatattttagttaacttagtgtatgtataaaaaatgtttatgcgtgaaaaaaaaaacctaaaacaccacatacaatattgcaggagacaatgtatatggattgtgcgagacaagtgacgtggcaaaatcgatggacatggcatttgctcctgcgatcgaatcggggattccatgggtggctattttggggaatcacgaccaagaatccgacatgactagagaaacaatgatgaaatacatcatgaaactcccaaactcgttgtctcaagtaaaccctcccgatgcttggctataccaaatcgacggttttggtaattacaatctacaaatcgagggtccttttggctcccctctcttcttcaaatccattctcaatctctatctactagacggtggatcttacacgaagcttgatggttttggttacaaatatgattgggtcaaaacctctcaacagaattggtatgaacacacttctaaatggcttgagatggaacacaagaggtggccatttccacagaatagtacggcaccaggattggtttacctccacattccgatgccggaatttgcattgttcaacaaatcgacggagatgactggagtaagacaagaatctacttgttctccacctatcaactctggtttctttaccaaacttgtcgaaagaggtgaagtcaaaggtgttttcagtggtcacgaccacgtcaacgacttctgtgccgaactccatgggatcaacctttgttacgcaggcggagccgggtaaattgtaccacacgctacttttctcataaaagccttacttgtaacacacgcttcttttaattgttttaggtatcatgggtacggacaggttggttgggcaaggagagtaagagtagttgaggctcagcttgagaagactatgtatggacgttggggagctgttgatacaatcaaaacttggaaacggctcgatgataagaatcattctttgattgatactcaacttctctggaccaagaacacaagtaagtaatatcagatttgaattaacttgaatatttggagtggagctgtgtgttctgatctaaacttttgttttattgcagctcttgagccaaattttgggtttagttgctctactataccacaacactgatcattaagcagagttgttgtacaatgatatgatattttcattttctttatttatgctttactatctattattttgtttagaataagaattaaggaagacaatgtcagcttataattgtctgctttgtttagaataagaaggaagacaatgtcagcttataattgtctgctttgttacgttcgttttatttttctcaatagagtatcattttatctataaacatgagtcaatactcaatgggtacgctttggtaaagttaataatctcgggaaatgtttatagaagagtttataatgtaggattttctgagtgggaaatattggaagactggaatcgcagaggtcaaagtcaaacttgaatgtcactttactttggctcattgaaacgacgagacgtttgaatgtttcaatcaaagactgtaggttgtttttctgtgagtttcaaaaaagtcgccaaaatcccaattcccctctaactagggttttcagttttcacatcatttcaatctaacattttctctagttaagttctacaattctcattgacatcgatctatctcttgagatttgatgttatcttacggttaaaataatccaccacatcagattgaagaaatcgaggaattacggtaaaaacagaaaacaaaaaacaaaaaaggctaaaaattacgaaattggataatgtttatatcctagatttttaagagagtataaaagccaatcttaattcttaagcattaaactgtatcttgcttttgacaaaaaaaaaaaaaaaaatgtatcttgctagactgatctaaaatcttagagagatttcattaattgccatttttatgaatattttcaaaaaatttatgaacacagaatctattcgaatgtactactactaagactatcagattttttttcgtgaaacttaatcacaaatattattcagggtttctgtttaataaggatcgatgaaaactgagcaaaaaacaataaagtgattcttttgtaagagtaatagaagtgcaaatccccatcataaagaaaaaggaagtatctgcaaatctaccaaaaatatagctacttaatcagtgtttattgaaatcacaattgttcatgcaaaaactcaaaacttaaacactatataattgtatatgtgatgcactcgctaaattgcaacttcagtagatgtaactgtaatcttcaatgatttatcttaaagtaacaatatgtaatatcattcaaatatgacttatgataatttgatgctaatgaattacattttgacagaaaagaaaagatgataatggattaatatcacggctttaaacacttatatgcatgttagctatagacgtatatatgcatctttaaatatcaccaaaattcatttgcaaacctttagtgtgagttagctatactctatatgtaaaccctaaatctaaatttgagaataacttatgcgtttataaaattataagaaaaccatgtcataaccatcatatgagtaagaattaaccagatcatataactagatgcatgctagctttatagtacacacatgtgaaaatcaaatcatactagttacttgtatatgatctacatatcatcttcacatatatgttgtaagttgtaacctatatatgtgtgtacagataatatatattttacattaaatgtgtctctgcaatgtatgtgttgtgtaataatacttcagagctcagaccaagagacgcaaagagaaacccaaaacacaaagcataactgaccacaaaataaaaatgttatttaaattttcctaattttatagcctttagcttttgctaatatagggacttattaattaactagtgcatcagaaaatatatgtgacaacagatcatacctttttcaatcgccccaagatgaaaaaaagaagctcttctctttttgctaatatagacatcacaatgatataaagaaaacacgattttataattattgttttgtcactgcccatctcctgcaaactctgcctaactaatatccagcaatagcttcagagaaaaagcagcagcagcagccatatttagtaaccaaacatagaaacccatcaccaaattaattgcagggacaataattaatgatacatatctacatataaatacaaaatgcaacacacatacacatatatatagagacaattcacttttctaagacagcccatcaaactctgaaactttctgaccacagagacatacaagagagacatgggtttacactgatcccaatcctagttcatgtctcttcttataatatctcacttatttgtactcattttttcctactctatacagccttgcaatcttattacttaacctatagatctgttttgccaaatgtaaatataataatttgatccattgatatatataattgagagtaatgaaaaaagacttacaaaggctagaagtactacttcatctatatacacaatcaacattatcaagaacacataaaaagagactatatatccgaaaaccataaaatctctctattgacaatgcatattattagaacatatatcaattatccgataaatttataatgaaatcaatgcattatgttgtcatatatatagaattatatatgtatgttttttttcttaaaataccaactaatttcatcatcatcattattattgatccaaatcaaaagacaatgaagactttcctttcttagtgaagtgatcatcttcactgctgcttccaagtctcagctgaaagaaagaggaagatgaagcaccaccaccgcctccacgtggcaaacttccaccggaagatgatgattcctcctccgtactgttggtcattccgctctcgccgcattccatatcaactccaaaaagcctcagtctcttcccggccgttccaacaagttcctgattagctctcccgtgcatcatcaccggcacagattcaatcaccaacggatcagccaccgcagccgcaggattgttcctctgatccactgacctaacgaagtaaccataaccaaattctctcggaatttgatgataattataaccaccaccactgtgatgatgacgttgctgctgatgattataaagactgtaattggtcgaaggaaagctgtaaaacctagggaacatagctccggcggcgaaatgaggatggtcagggactttaggtcttctcctccaatcaataaacaaacggctatctcttcctgaatctccgacacatctttggaaagagacaatatctccggcgtcaagctttttgtctttaacgaatctgctccaacctttagtcatgacatagctttgactactgttccagtaagagtaacggaacctccaagatttgccagtgagatcttcgaagtttaaaagcaaacctttctcgtttgaagatgaatctaaagggaagaatctctctgcgtgttgctttgggatcacaagtcggtttagttttccgacatcacttggagtcacaactttgtcgaacatgtgctctctgtctgctacttcacgcgctccttcttcttctgctaagggctttgcttcttcttcatcttcatctctcgtgagagataaatctgtcatcatctttagaactctcagatctctttaagggtgtgaccaaaaaataatggaatttgatgaaattcacagtttccctagggaattgagaaagggggtgagatacaagcaaaaccctagaatttggaaggagaggaggagaattggaggaggagattggtgatgtgattgacctaattatacataaatagaaagtgggtttagcctaacttcactgatcatcatctttctctgtctctctatatctatatctcttactgtttcatagctacatagctctctctcttttaaaaaattcagagaaagaaaacaaaaacaaaaagttgtcaagattttttagaagaagaatgagaaaacaagaagagagaaatcagcagagttataatgttgtgatgagaatgaatatgatggagagatatgggcaagagaaccaatttagagggacccatgaataaatctggttcagttcatgtgaccttattgtccttttaccactatcctagtttctcttatttttcttttatttccttacataattataattctttaaatatttccccatattattcatttgccacctaaaatgcttgagatcgaacaaaaataaaaaataatcagatttgtccaacgaatagaaattaaagttagatgattgatggttgggatatgaggagaagagagctgataatgtcgtgggcttagggagaaatcttttgttttttctttgaatttggatcttgaaactttaaataatcaaatgattaataagtacttaatcaacaatctcgtcctaataaatgctaattatcgaaagtaaactttttttatgggtttgctgcagttttggtttcacaaagctttttttcagtcttggtcgttactgttgactttttatattaattcacacatttatacccctgtcctttattgtaattccaatcaccactttctttttgttcacttacaatttttgtgtactcgttgctacgttgcatcatgtctggtataaaagaagatctaaaccttagtttttaaatcaaatgtgtgaatttttaaaatcttatgagtctcccagaatgtgatatcaaacgtattggctaatatttcttgaatattattttagtttaatacaaattattaaaacgtaagctttttatatttattttactttaaatttcattttaggatcacaataaaaccctaacaagtaacaactgagctataacagatatctcgtctggaacgtttttttaaacctaaaattaaaatacgtattaagtgttagttaacaaaaaaaacttaatgtatcaaataatatgaatgattcttcagttgatctagttatcgatggtatttagattaaatataaatcactgcttgataagatattagaagtatttgaatagtcaattttcatctgcggattgagaatatatcattcttttggtaatcacattttcttaatattatgatcagattacctaacaatctccatcttaataatgtttggttggcttgattactttttctttaaatgaactggccaagccaatctagatcttgatagatacataatcactatataagaatatatacatttacaacttctttaactcatatagccaataagaaaactagtcacttaatttggttccgatttttcaagggtaattagccgacacactcgtgcactctcttaatctactcttttctctttgatttattatcttcgccatagtatcctcttaatgcctttttttcttttctttgtaactgtccccaaaacaactaacatttaatttttctgtaaagtttatgaaagcttttgaaatatattaatattaaggcttaaacccaaccaaaaaaaacaggtcactattgtttatccctttatatcctacgtaatcgttcttcagggtgaatcaaatcgaaaaggaaaaagaaactaaaagataaatccgcataatcgtatttgcaataaaagcataattgaattgtcaatacacgaaatgatttttataactaaagatagttggttaatacaaatcatgcttctgtaaacttgcacaattagtatactttgaatttgttttactgcgaagtctattttctaatcatcaatttcacgaaataattactaatcatgtgtaaatacatttgcggatgcgttcaattccatggaattcacaaaatcatgatatactaacttggattgtcacaaaatccatcgatgagggagaaaacttttttgaaaacaataataataatagacatggtcttgttcttggaccggccaaagaatcttagagtttatggctcaagatatataactttctacataaaacaaaaatcgatgcatttgtttgttccagcatgttttttttttttttggacaaaggtttcagcatgtaacgttgttagtatagtaacgttacatatgttgctctaaacatgacacgtaacacttgaaccctgcaaacccttaacaactaataaattgattgttttcagttatcatgtatagtcaatgttaatcttataattgtgtacgtacgtggtcctgaaagagactaagcacccttcatgtccctttatccaatttcggtttaagtctaaatgaatggctggttaatgattaaagcttaactttattaaaatagaattatactagtctgagatgtactagctagtgtggttgtattttcatgttaatcgacgttattaattagtcgattacgtactacttaaactttcttcttcattttaccatcagtcttatcacatcttttcattgacggctgagcttatatatattcagttgggttcagagaactcgattgcaagaaaactagaaacttgggggaaatgataaagcagtaggtaaaggaacattgataaacgtggtccaatatctaatcctcagtacataattggttggacaccaaagcctctaagtcgatacattgttttcttctgtttcatcgttattgattcgaatcttaatcaaaactataggaacgttttgcatcttaataaaaattctaataacctatatcaaatgtatggcttatcttctttactttggttgatttatcttaaaaataaaaacaaaaagggtagcgttcacacgcatcttatagtagtatcacgcccctaattaatatgtgattgaatgaattgaatagtaggctggaaaatatcagcaacataaatatgacggatacattttttttccaaattttgcaaaaatagcgaagcacagcaaaaggcaatacgagtaactctttctttataatctatgaccactattctttttgttctccactctactttgttttttattttcaatatttacatgatcatctctctattactttaatttcttgtagagagagaaagaataacacaataaatatcaagaaattacgaggaaactgtagcgtcgtccttttcaaagctatgccctattagcaaaggggacctctctatttctatacatcttgctcttcaattctatcaaagtgtttcatatttttaaaatttgaattgaactacaaaagatgataattattttcttacttgtcattgtttttaaaattataaaatataacaaaaaaacttattttattttattttaaatgaagaaactagacaaatatctctctaaattaataaaatatattaatttatatagagtttactgtatttttaaagctaaacattgcgttaacattcaaactttttacaaccaaatattcataaaatggtctcgtaatcacaaccgcaacaaatcaacctttctgaggtcttagactctcgatcctgacctgccaattttgtaccctaatctatgtcacactatcgattgaattgacccacagaaataacgatcgaagtagtttgttagtcgttgtttgtgggattaaactatgatttggcaaatccactttatggtagtagtttaatgtaccaaattagcttatgagagtgatggagagttggtgtatatatatagagagatattagcatatgataatgtaagaagaaaagatggggttagcgtaaggaccactttgtaattgtatactgaaaaaaacagacttgcatttatttaaattttgttaatttaaatgcccactcgctgctactttcttttgtactccatctccttaaactctcttacaccactagagtcttcccctcctttcaaatgccaaggccaaactctatacttactctcatggattgtaactgcatctcaatattaaaacaatcatttggaaagtttttttttttaattaaccattaacaaaaaaaacagaactctgtaaatatctatccagtcaatacattttattcgcaagaaagaaaaaagaacactgaggaatataatatatatggtgtaaatagtttgatgaatcgattggggcaagggcagggctggcttttgctcgattcatcgaggtgtgtgtgtgcgggcaagacaagaaaacgtagcctttagaaaattagggtttctttgttttcttttcataaagaaactgtaaaataatataaatagttgtaggttttttttggaccgacgcgatctgcgtagactcactcgtgttaatttagttaaatcgcccattattgaatataagagacatatgataataatacaagatcggtcgccatcgaagaggtagtggtgaagtagaaggcggtccattttttttttttgtttaatttgaaatttataaaaaatgaagaatcggtggtgcgataatggcaacaacatgctccagttgtcaatttgcccccagagtctaggactatcttctctccatctccctctctctctctagccaaccctctcctttatttaaacaacataattggtctttgagcatgcatcttgaaagttcatgtgccaaaaaaaagaagaagaaaagttaatgcaatggtggagaattattgcctttatccaattcttgaaatttagattagaatagccaattgatcatttccatttttcaacagtattattctataagatggatacatactcattggtgtcactctgcatgtattacaactgagagcatacaaaacaaaaacaaattagtgataaacaaataaattgataatggatggagatgaaatataaatgcaaatatataaggtggggtcagttttgtatggaaggatggatacaaaggaatcaaacccctcaggttgtctcaactctgaaggccaaaaacactattgaatttggactttggaggcttttgttttgcaaaatttggattttatatacatttattgaccttataaaattgtaactttatcttatcaaaactttcatattactatattataatgtattaattgactccatgaataataaaaggggctctctgcagtagcagcgaaagtctgcttcccctgcagctcttatatattcacattcattttactgttcacactcttaaatcttcgtaaccatatatacgtacacgtacacatgtcggaccatattcttagataaataaatcgtcatttcgttgattacaattactgtatacagaaatgaattggagtagagtagctgtggtccctaaaaaaggaaaacgaagtgaggcccaaaataaatacacgattatatatagatgatgataaatccaaaagcccattctctgtctaaatatgtgctactctttgtttagtcgctttctcatttggatccacactatctcaatatttgccaactataaatatgatcttatatctctctattcactgtactgtaatctagtgaacataaatctttcgttaggtttctcttttaagaaaaattaaaattgattttagcacgtgtcggttcatatattggtttttgattggttcgtatacacttgttatagtttttattccctaaattctaacgatgttatatgagattagagatggttctaatggaatggcccatcttatttgggcctatagagcttcttaaggccaattagtggaaaaatcaacatcacgtaataatcggagatttaggcaaaactgcgtttgtcattatatcttaccagtttcaaattatacaattgaacaaaattgcatcatcacaaggaaaaaaacaaacagaaaacaaaacaaaacaaaaaactgcaaaaagccaatcatatggttatgaattatgtaaaataatattccatttaaatatatttatatgcggatgctgcgaagagaatcatatgttgttgttgttgttcatctcctcaacgtgtggagaatatactcagcgtatagatccctgtaaattttcacaaacaatgcagattcgttactcaatgttttgttgacaaacaaagtttgcgattttagggtttgttaaatcttacatggagtactgaatagcttcatgtgcactctctgatggcaagaaatcgttgacagccactttcttgttctcgttcttcttatctgaaaccaaacgcgatttataagcttctttagttttggtccttagttatttgatttgacaagagataaggatcttacagtcttcgaagaaacggcggatttcttggagacgatgaggagcgagttgtttgatgtctgtgaaatgtttgtactctggatcatcagcacatacggctatgattttgtcgtctttctctccctgaaacgttcaccggcaaagccatatttagtaccaagatcaaagctcatatgtaaattttggatttcttggattgcaagtttgatgattcttatgcaatatcaatttctagagcttgcacttttagatgatctctaagaaagatctatgcaaacctgatcaatcatgggcattaatccaatggctctagcacggaggaaacatccgggaagcactggttcctacacgaatcagaagctaactcaggttacaacacaatgtggtatttgatgataattttgatggttgtgaaaacacagttacctgcataaggacaaggacatcaagaggatcgttgtcttcacacaatgtccgtgggatgaatccgtaattgtgtggataaacaacggaggagtacaagatccggtcaacctgagatcaaattcaatgtcatccatcagaacagttaaaagaaaagaagatcacaatctttgggaagtcacattaccttgataagaccggtctttttgtcgagttcatatttcactttgcttccctttgtgatctcaaccacctgaccagagaggctctctcgttaacagaccaagagagagagagagattaaagaaggcttacttgggttataagttaagagacaataccacattgaagaccaatggagcttcaggaccaatctcaaggtcgtgccatggatgtgcagctacagatctcctggatagtgttgagagaatcctctcgttcagttttggaaccggacgaggagattgacttgattcctgagtttcttcatatgcttcttcactcatctattgtcacatcaatcgttaaaactaacagatttattgattgtgcagaagaaaacagagcatttggaaagatctaataaaccaagaaacaatcagagattagtattaattacctttggatcttctttcgtttcaaagggacaaaaacaaaatgtaagttctgcaaaaacaaagctatcatatatatataccagacaaaaagagtttaataatagcataacgatttggtcaaaatcgaatttaatgattcgagagatattctttctcagcctttcaatttcttttaaagaaaattcagtatttaaaaatggaagaaaaacaaaacattgtacttgtttatggtgtttcttcttactctttgcctgcacgttgttataatcgtgacttccaatcgcgatcacgatttattttctcagaacacaatctagtaatcaagaaaaggacgtttctttactctcaagcaaagcgtttttaatttacatacattcaaaacaaacaaaaaaaacccttaacttcctctgtttttgttttaggttttagggagatagatagaatcaggagacatagaaatcatctgaagcaaacttgaattc

SEQ ID NO: 387 - DNA, 88068 bp, Arabidopsis thaliana
aagcttatgtcaaaaatatttaattaaaatatatgtaatttatatgttgattgagttatgagtatcaagtaaaaaccctaatccgttattaaaatatcaatgattataacgtatttataaacgaaaaaaaaaagaacatctagaattttcgatatttgatcctcaagttaaacttggaaaaatttggatgtatgaaatattttgtcgtccacttatacaataaagtatgaaacatggatgcatgaaggctagacatccaatgtctaaaaatactatatataatgcttttggtagggtcttttctttatcatgtctcacttctgtttctatccctcattttaaatagccaatataatttcactctttactataaaattattatataaacatcattttgattgaactacctaaaaggaagaaacgtataggaatttttggagcctcaagattgtaataatgtctcatagtttgacttgcaaaagctaaattaaacgcctaaatcattaccattaaataaatgaacttttgtacgcaattgattcagacacaaggaccgaccaattcgaaaacaatgaatggatatgattcatccttatgaaagcttgacaacaaactcggttttggctggttaacctagactcggtttatttaaaccagacaataatttctttcgtcgtcgttttatttgaataggtgcgtcaaaaataaaagctgaaattcttggttgcaaaagcccaacaggcctgtggagatagctttttagattgattaaatgggccgaattgggctgacacatgacgagaatgtggctatagaaattgttagtgagagggtccgggtccaaaaatgttgcagaagtgatatagtatttatttaattaaaaacatattattcgacgtatttttaacgctcactggatttataagtagagattttttgtgtctcacaaaaacaaaaaaatcatcgtgaaacgttcgaaggccattttctttggacgaccatcggcgttaaggagagagcttagatctcgtgccgtcgtgcgacgttgttttccggtacgtttattcctgttgattccttctctgtctctctcgattcactgctacttctgtttggattcctttcgcgcgatctctggatccgtgcgttattcattggctcgtcgttttcagatctgttgcgtttcttctgttttctgttatgagtggatgcgttttcttgtgattcgcttgtttgtaatgctggatctgtatctgcgtcgtgggaattcaaagtgatagtagttgatattttttccagatcaggcatgttctcgtataatcaggtctaatggttgatgattctgcggaattatagatctaagatcttgattgatttagatttgaggatatgaatgagattcgtaggtccacaaaggtcttgttatctctgctgctagatagatgattatccaattgcgtttcgtagttatttttatggattcaaggaattgcgtgtaattgagagttttactctgttttgtgaacaggcttgatcaaaatggggttgtcattcggaaagttgttcagcaggctctttgcgaagaaagagatgcgtattctgatggttggtctcgatgctgctggtaagacgactatcctctacaagctcaaacttggagagatcgtcaccactattccaaccattggtgagttgtaacttcatttcttctcacattgtaattttgtatgatggatgtgatttactgttgaatgttacacttgttttgtatgacaagctgacatttccgttcctctttgttttaagggttcaacgttgagactgttgaatacaagaacatcagcttcaccgtgtgggatgttgggggtcaagacaaggtattgtttcatggttttttataactctgcattctatagtcattgtatgtagtcgatcatccatttatgatgtcatctgttcaaaagggtttgcttattaggttcagtgttggtattatattcttgtacccacactctacaattgataagctaaatcaactcagctggaatttcgaacattctttgatttctcagagagatgttgtattctggctaacaaacctatattacctcttttatcattatggacaatcttatctcatttgagttatgcttgatctcttactaatttagtaacatcgtttttgctcatccagatccgtccattgtggagacattacttccagaacacacagggacttatctttgttgtggacagcaatgatcgtgaccgtgttgttgaagccagggacgagcttcacaggatgctgaatgaggtattttaactcaatacttccctctatactttggtataaataagaaccaatatggttttgagttttgactttgtgatgggtattttggtaggatgaattgagggatgcagttctgcttgtatttgctaacaagcaagatcttcccaacgcgatgaacgctgctgagataactgacaagcttgggcttcattctcttcgtcaacgacactggtaagtgaaaaacacagaaactagctctcttaatccacaatctgaaaaccccttgacgtatgggctcatgttatcattttgtaaacaataggtacattcagagcacatgtgccacctctggagaaggactctatgagggacttgactggctctccaacaacatcgcaagcaaggtatccactagtagctactctctctctctttcagcaaatccaattttggtttataatccgagtctgaaacacatgaatgtatgtttcgcaggcatagatggaatgttagccagattcctcttctgcttgtttggtttacaaatcaaagacagaggtctgtttctctagtactaaaagatttattattatattcttcttcgtcacttatctcaaacgcagatcattttacactttgtacttccccttcaataacttgttacttctctcgtttgcttcctgaatttgagtatatcatttttacatctgcttttcatcaaagcataaagcatctttcgaaacaaaaattgaaccgaatttttctgtaaactgatcaaatgtgtgaagaagacctgttatttggaatatttattttgtcactcaagtttgatattcgaagatagacgctaaaattgaggataacacacattatagacaaaaaagtaaagcaaatcacatgtcaacgtccaaagcattggaaccagagacagtatgtgtggttgtcgacccgacacataatccccaacctcttactgaccggaaagaaaaataactacctgatccaccgacaattttaactcctggcaacattcaagcagcggacggtgcggtcacgtagttgagccggccagcttcagtaagagcggtgatgaacggcttcagattcacgagatcgacctctgtgtccacaacggtaacaggtttcttgtaatccaaggattcgtcgtcgtaaatgtcccaccattttttcactaacatttttatatcttccctctccatgttcgcttctttccctgtgtatctccacggcttcgaaccctgtaaaagagaaacaaataaacaaaaaaactcaggactgactcaattgttttggataaacaaggccgtgaacaaaataactcaccgctgcacagtagtgaaccaccttgacttttccaagctctacattttctgggtgacgccataacatcgcaaggacgagattgtacactaaaggaatcggcttgtagattttcttaaagtacatgttcaaaaaatcctgcgaaattaaaatacacaacttaaaacagatgaaaacagagcataacagaaaaaggccagtctgagttttgattttgccttttacctgttcagcgaaaggagtcggaggagtgattttaagtgttcgtagtagatcctcgtaagtctcgaggttaggctcgtacaagaacattccggcgttgaagtaaagagccggtggctctccaagctccgcttttggccactggactttgtcggggcattgttggcaatatctgatcttgtattgcggcgtgtgactccatgttttctcacagaaacaatccatcaccgcgtacaaatagccatctggtaggtcaaacaagtgatcgatgttttcgtaaacttgaatgtctccatctaaatatatcattttactatactccacaaactgcacaaacacacagaaaaaagacagagcattaaccactttttcaaagggagctagacgacgacgtattgctaaacacaacaaaagaggtgttaaacgatggcgtattaaacgtaccttccagatacggagtttagagtagttgatgacgtaataagccatggcgaactgagtttggttctcgggtgggtaaacgggttcgatttcacggacgatgcatccttgatccacaagtatacgacggtgttcctccgggacgtcgggtaacatcgctactacgagtggataagccgatttgactttccttaaccctttggctaaaccaacgactcctttcacgtaatcaccgtttccagcaagaaacgtcacgtaagctcgatcgctgtcttggactgatggcagtgacggttttgttatcgtcacggtggacatagcatcagcggtttgagtaagccccggagccatgtgattagcacgtgatctgctgtgaggatttagagtttatctagtcgtgtgtttgtgtttgctgatgaggacttacggtagcgggataaacagggttaatataggcgcttggatgggttacgatcgtgaaatctgatacgtacacgtgtaagtaggagaacagacggtggtgattggcgtttggtgaaaccgtgaaagttctggaaagtgggaccgtaccggagaaatttaaaccaaacggttatacggagaaaacgctagaagcagctagctagctacggtgttttgtgggaaatcagaacatgttattccctgctacgaggtgcattgtacacttccctagtcctctttcttgcattttagtttaatacacacctttttttttctaagtcatacttatttttgctaatttattaaagtcatttgctaatgtattttaacaagatactgaaaccatacgggaaagaaacagtgtagataacactgtattgaagaattatcagaaggagtaatctctatctacaaagatctcattttccataaccactaaagagaaacacttttaaaagtcgaaaatttcaattcttgttacttttctaactactgatgaggcactaataattacaacctaattttaaaagattattgaatctaaataaaattgcagtttctgaaaatttaaaaggaagttagataacttcaattccatgcccttcatttccaattaattattgtgatactactttaaaaaaaaaaaaaaaattataaacaggaaaattaaccacgtgaaaaatggagatttctcattgagaacgacagatttgacaacatagacaccgcattagcaatttacctgggtgaagaatcaccgtgagatacacgcgccatctgatttgggcccattaatctcttaatgggccatatgaaccaattccatggtgcgtagtgaacactcgtgggctccatcgaagatccaattcctttctctttccttattggatatacagtcacttcttctcagatgtcggtagaaatgtctcgcgtcacattttccacaagtcctttttaactttcattgattttttaaaaaatttgtccagctaaatctacaaagagctttatttaattacattttttgtagtttcattatctttcacttgatttgggctcgtagctcacaaacattgggcccaataaagcctaagtctctataggtttcatttgtcaccatagtatgaaacttttgtatgaacttttatgtaactatttctacagcactgcttggatcattatgtttttgttattggagtttgcttgactcttagtgtttgcaaacaccgttggatttcaccaaatgccaaaaaggtaacaaaactatttatgattctaacactcaaggcttgagtctcaagccaatgatggcatggtgcaattaatattttattatatgattattcatatgtttttgatactttgtagtttgtagatgccaagaagcagattcaagcatttgctacacagacacttacctctcgcttctcttcaaaccgtataccatactgctgaatcctgatgttgacattgactctaaacgtgttttgtgttgcaaattttgacaaagaaaagagattaataatgagaaagtgggactcttaccatatgtcttcgaatttcctgccaaaagcgtcggttgtgttgagctttgacttttattaccttaatcatcgccggtcatttttgattttggctccttaatattattcatatgtttccattattgtacatgtatataatttactttctagcttattttttcttcacgcagctttgacattgttgcttttcggagatcatatattccgaccaatcaaaatctaccacatagtgtccgagtttaggcaacatgcattacatttacttccagaattaaaatttcattttttttacggtttatggtagacttttactaaagttttcatattgtcaactgtaagacttcttaaaaatccttttatgtttctcttttcttagagcattttctaacttattttacacacatccttctcatggcataaaaataactattttgttttctcaactacttttccagtttacatatttatttcttgcaagataaaatagttgtgtcaaaaatgttaaatacaattaaatgatttgacctttagttagaaacttattattatattctatgcataaatttaaaggctgaaaatgcattcctttcattttttatacaccaaaatgtatacaacgtaagaattggaagttcgaactcaatattggtttatacgtttcaggattctgaattgactgagtcattactttctaaccattaatcaaaacaaaaatattgatgtggagttcttttgagtttgaagtttgattatgtgatgtttctttagagggaatatcaaatatatcagatgctttatcaaagactatttgatacattgaacatcaaccagaaaatggatctccaaattattaaaccatacatttaattttatgtatacttctctataggtgggttgacggaaaaatgatatatagatgctaaaacatggacgtcctatggtctcatcatgcctttcgagttttgtaccacatgctttgttttattaaagtttaaagttcgaactctcttcagaggaatctcctctgcgtcatcatctatacgtcatccttttaacgccatgcacacaactaaatatttatagatactgcttactctcctcgatatattacgagtttgttatctattatcatgcattttacgatcaaagttgtgaataaaaatgaacgtgttaataaaacataaaaataaagagaatctagaaaaaagattcatttgctgaaggcgatgtaaacacgacctcatgacctaaatacggatcggtcaataagggatataaatacaagatgatttaatattcattagccatcttcctttttagagagtcttatctattgccctataatatttgatttaaactgtttactaagattttgcgattgaccttatagagattttttgttggaggctttatgtgttatgtcgcatcaaatcggaattagacataaccagatgacaaaaaagagagcctttgcgtatgaatatgacagaattttgagcgtgtaagttaaaaagacgagattgtgggttctacttttggtagttctgctgattttgatagatcgcaaacgtctttttatgttgatttttcatctttttgttgattatttatctctttctttttgtgctttcctttttaaaactatagatctacttgtccggtgagacgatcgtatatataggatagtacacgttttggcatcaaacttgatttcctattctcgccaagcagttttaatttcttgtcttatcaaacaggctttaagattgttcttgagtaatatgcaatttagcagtagaaaaaaacagtgaaatattccttcaactcataaatcaatataattgacacaaaagaccggtcttatttcatgtcaatagaaaatggtattttctctcgtggtttgttacttttctgttcttataaggctaacctctagtggggatgcaaagttctagatttagacttgttcgttagatgactaggtggttagaatttagattcgcgtcgttgtttactgtgttcgggataatcgtttttagttgggatttgtcttcgcgggttcatctatcctttgctctactctgtttgtggttaaagattctctagtccgcgatcttcgagctcttatttccgcgagttttgctctcctccgactttcatgttgatctcatgagcttatcttcttgattttagtatattttcttgtggtcccatgtatcgggcttttgttttcggggatttctttattttctgccggctatgttgtacgaaaacgcattccaaaactgtatttcacccatgtattatataatgaaaatctttcagttaaaaaaaaaaaaaaaaaaaaaaaaaactagcttatttgggttgtcgtctatatcacatatctaatcgatgtaacaattcactgaatcgggtgttacaaataacatttgttttcttcactaaaagtataagatactggtacaacgcgaaatctaacctatattcgaatcaaatgacacgtcatcacttgggtgtctatttgtccacagttgaaagttataagaagcagacaagtgtctcataaagacatcgagatctgattcggttctcaggtacatacagttaatcgggagtgttgctttcccctagaactatggaggctactatttaagtgtcgttgtgtaacaaaaatcctgtgtttacttgcattacttaaactcctttactttaatagttttatatatgttttcgacctccctttttcgacggagtggatcgctatgacatgtaggcatctgattgtatttgctaatctgtttttgttagtatgttaaatttttaacccaatatatgtttatagtgcttatatattcttactttagttacatatgaatatatgatcattgatgaattaaacaatataatgtaataattaaatttgatttccctgatcgaattataatttatatgttttgtaatacgaatcaattaaaatattttcttgttacacattttgataaaatgtcgtagaacgttacttaaaagtaatgatgcattaacaaaatgtacaacatatattataaaagttatcatcaatattataggcattcgactttcagaatgtgtatcaataatcgaagtagtaatggaacgattattgaaagtatactacggtctctctttacttcatcgtggattctcattaaaaacaaaagtactttctctaccggcaactattgaaagtatattattgtttttaataactttgatagtgtttcttaattattattcccaacgtacgataaaattttgtttgataaaactcacaaaagtttagtatatttctgtaaatatatgcatagaagtcatagtgattgacagaggaaagacgtctctttgactactcttcaatcgaaaacaaaatgtgctaaaatttcaaaagcaaagtccctaaactcgcctaactccatttctcatttgactttgccttaaatgtcaatagtcctatgttatttagctacattcaaaattgggaattaagaattattttagactccatatacttagaaacgaatccgtattggaaactaatttccatttagtaatagtatttaagtattattatgcttaccgagtagcatgtagtagtttcttaatgttagctaatttcaaagcaaacgacgaatattaaatcgtgattgcacacaacaagaagtgattaataaatcattaatttcgcccatagtaatcactaaccagagtaattttgaacaagactaaggatgtacaataacttacgtctgcgatactgtgtggtaataaatatagaaactttatgaaatagaactctcttaccaaagaaagaaaaagcaagagtgcgtgttactatacatctgaacaagtcaaagggtcaaaccttagtattttaaaattacacaaacaattgaccaaatggagagctaattatgtttagcataatttactatatagttgcaaaattccactttagaaacagaataaaaaaataaaaattgaacataacacttatgccgtgttccagtcactcttcaacattctactcattttcaaatatcctttttataaaatactacttttaaaattatttgattcttatgttccttcactatatatatataaatatcgcacattgcttaatcacttcaaatctaatccacaaaaccattcacaccatctcatcttctttctctctatctcttttcctttcctcatttaaagtttctttataagaaatggaagattacgagcgaataaactcaaactctccaacacatgaagaagattctgatgtacggaaaggtccatggaccgaggaagaagatgcaatcctagtcaacttcgtctctatccatggcgatgctcgttggaaccacatcgctcgttcctctggtatcatcaaaacatcaatctctaaatatacatatacacaaaggctttatatatagataaacttatatatattttactcatatatgtgcagggctaaagcgaactggtaagagttgtagattaagatggcttaattacttacgtccagatgttagaagaggcaacatcactctcgaagaacaatttatgatcctcaaactccattctctttggggcaataggtacacactatatatctcaaatgttaatattttgctattctatatgttactagttaagtatgttattaatatatgtcttttttttcaattgaatatataaggtggtcgaagattgcgcaatatctaccgggaagaacagataatgaaataaagaattattggagaactcgagtccaaaagcaagccaaacacctaagatgcgatgttaacagtaatcttttcaaggagactatgagaaatgtttggatgccgagattagtggaacgaatcaacgcccaatcattacccaccacgtgtgaacaagtggagtcaatgatcaccgacccaagtcaaccagttaacgaaccgagtccggtcgagccgggtttcgttcaattcagccagaatcatcatcagcaattcgtaccggctacggaattgtcagcaacgtcttcgaattctccggctgagacgttttcggacgttcgaggtggggtggtgaacgggtcaggttatgatccgtcgggtcaaacgggtttcggagagttcaacgattggggctgtgttggtggggacaacatgtggactgacgaggagagtttttggttcttgcaggaccagttctgccccgatacgacatcgtattcgtataattaaggaaatatacgattactatacgtaacgaggaattcaattgcgtcacgtttggtgtaatattcattcgtgcgtgatgccaattttagatacggccttggtatacgaatcttgacttaattattatcttttcttttcctctcttgttttaatcccctgattaaattaagatttgatcatcagacgaggatatttgtgattcactgatttgtgatattgatatatgtgaattatttgatataacgttttaaaaaccaacaaaaaaaaaaaatcattccaaggaaaagttcttaattttgatactcgaaaagagcgtagactgactcgaatcagttcatattttctttggttcgttttatttacgacaaaattcactaacaaaaattaaaaaacgacaaaacgaaaatatgactaaatttatttttttgacagttaaccactgattattggttcaaattgtcacaacacatgatttatcttgatagaaatttagtagtccagaatgctgcatggttgatcctaagaaaaacaaatcatgcaaggaccaaggacttacattacttaattatacttaaacgctttataaaattcacatcaagtgattcctgacgatgatccagtaaaacccttcatccatatcgttgcttccacacgtagtttcgataataaactcgtgattatcgccaagatgcgatgtatcaaccactgaaattctcttccttgtcacgttttcgtctccgacgatatttctgtaaagtttcgcagcagacgaagaagaatccgatgtctccggctcgtctttaggcgtaagacggcaactcatcagtgctctaaggagcatcactatcgacgccatgtgtctctgacgtcgtaggatgctttagttggctttatctcgtatctaatcactttcaacatttaagacacacacaaaacatatgtatatatattgtgtgcatgcgtttgtgtgtgagcttgtgtcagtgtgtgtaatagtcttaacaaccattgtcgagtgttgaaagttggaacaagacagcacaaggaggaagccatcatgcatcgaggggatatctagttttggtaagttttaatagtgaatatactaaatggcccttgaccgattgccaacatagagtctacatcagtagcgaatcaaaggtattatggtctttactcatggttttgacgtggaagagacaacaaatagaatagttcatcttcagcaagaaacaatgagaggagaagagagaattttgaaaaaggagctttaagaaaaaagtctgatctaatccttttatcggtcaacgattgttggacaaccttctagattcctcttcttttttgggtaacttgagcattttggtcagtgaacctgtaaacaaatatttagtgtttcttttgaaaattatgtttttgtttatataataatccaatagtataagtttctttctagtttctacagcctaaaatttgattaatttataatcaaattaaccacttttaaagttttgatttttttggatggtaacattagaaacgatgacatattaacgaaacttgtagctacacataaactgctgaccgatcccaaaggttgaaagattctttggcgctaaaaaatccccagttcccaaatcggcgtcctcgtttgaaaccctaattcctgaatcgaagcagatcctgatcgaatcgaaggtgttcgaatgatagctacccagtaaattcagaaccctaattaacaatgggcggtacggacgcgaaggacattctcgggttgccgaagactccactgtctttaactcaggagaagaaatctcgaccccagaaagagtcccatagaaaacccgatggcatttctcgcgaggttagctctaacgaatcgaaccaatcctttggaatcgattggatatttttgtagttgaattttcatcgtcgttgatgaatttcaggtttatgcgcttaccgggggcgttgcacctcttatgccttcaattgatttaaagcgccgtcctcctgcagatgagaaggtctgttgctgctgcgggctttaatcatttgttgccactgtctattttcagttttgagataattttaatgttagtagtatgattctacagttagtattatttgctaagaaaaatgtctttagtatctctcaggttgcttggaaatggctttccttcacaaattctgctaggaaagatgatttgcagctttaccattgggtaagttccttatctgtggaacaccattgtagaaacgcttaacatttcattctttctaaatgtgttatgcatttggggttttcttatatcttcacaggttagagtggttaatgatgttccaccaacaggtgactattcctttgccaaatataacaaggtattatatttgccttcatgattgtctattttagtgtcattgagtaacttttgctgtcctctctccgtttctgctttttttctgacttgtttttgttattggcatttgattgtttgtatctttgcgtgaatgcagtcagttgatattttgaaatacacagacgaggagtatgagaatcatttaacggattctgtaagtgtttttctcaaggaggagtttctgtttcattctattatgtatgaagtaaagacatgttctgcatagcttctgttcatgcttgttttggatagtatctactttgttgattgtgctaaaacttgcaggtgtggaccaaggaagagacagatcagttgtttgaattctgtcaaaattttgatctccgctttgttgtaatagctgatcgatttccagtatcacggactgtggaggaattgaaggatcgttactacagtggtatgttggactattatacgttcacttataccttttcctttcatttgttttcatctttgatctctctgtttctatatcatgttgcaccagggttcattaaaaaaatacaaggactgagaattctcttacgtactttcttttgtagtaaaccgggccctgctgcgtgctagagctcagtctccagcagatgttgcaaaccatcctctcatgaaggtcaaattccacttatatctcttcatagcaaactaagaactcttatgttcatttatatgtagtttttgtagcaatctctccttgtcatgttatctggagaaaacatttctctaaatgctttttttccaatgtattggcataaacaggaaccatatgatattacacgcgatagagagcgcaagcgggcattgtccatggtcctatcccagagtagacatcaggagaagaaagatgctgaggttattttctatataattttgaatgtacttgcagccgaagaaatgtgattagttctttgtcttctcttacctatccttctcccacaactgcagatacttgctgaggctaaaagaatcacagagatgcgattggccgcacgtgtaagtgttgtcttaaaatcaatatactcactcgtactaactaaagaacaatggatgaattttgcttaccatgaaatttgcttaccttagacgcatatctgaactttatctttatcatcttgtttctggctgtccagcgtgcagaagaacctgatgtgtctgcgaatgagaacgccggtcttgataaagctgatggggttgttccagggcgtagtgtatctccaacatccaattctcaacttcctgctactgctgtggctccatcaacactaactatggcagattatgcctctacccttgcttctctgcgcatggtgagtgaagtgtctctcccttcttctctttcccttttctacttggttatccagtttatctgattatttctggtgaatctgtcaaattttcagcttcatgtatacttgagaacctatggacttgaacaaatggtccaagctgcaagctctgctgttggtcttcgaacgatcaagcgggttgagcagactctgcaagatctcggggtttgtctttgcttcttgttctgtttaactctttctatttgtctatctcatttgcttatctttccccattgattgatgatgagacttaactaatgttataaaaggcacccgtactgaagctagctttgaatgtgttctatgtaattagttgggattttggttcgggtagaggctagtaggttcttgtcagtttatttgattgtagccactcttaagatttactaaatggattttttgagtatatagagttttctgtttacaggttaatttaaagccaaaggttcctaccaaaactgtatgcgatgagcatcttgagctaagaaaagaaatattaacactactgaatcttcagaagcaggtaaaccatacaatacaagtcttatctcacatagattcacaaatatacagctatttgtttatttaacttgttgccaaaacatggtggggtcgtaacttcagctgcaatataaggaatcagaaggttcatcacatcgtgaagggtcgtatgccgcaatgccagacactccaaaggtgagcaacaaactttgtttattggttctcgctacagtttcatcttcctgttgatctctttaatttctatatatatttgatcaggatcgtgttttcgcaccggacccattcagttttggaggtacattatttccttatcttgttggtttcagcattgtatgcactacttaaccatctctaagttcattttgtgtgtttatttcagctgaaagaccaatcaagaaggaacaaaaacgcaaggtggtgcacatcagagtttgctcttctttatttttcgtaccaattcctccgaaaatcctttgcatctacatgtaaaacttgaatcttaattaaaatatgtttgggaatcctgcagggtcctggaagacaagcagatactccttcaccagctcataagcgtccgagaaagttgaaagcctctgatctctaaaatctctctactcggtgcatactgactcgcaatttcatgtgtatgtatttgcctttttccggtgatttccgcaatgttttcagttcttaaattatttctgatctctaaaatctctctacttgtactcagacaccgcactatcttgtcaagccaattagagaaattgagaaaatgttgcacattatatttatgactagtaagaattattacatctaaagacattttcgaaaatgttaaattacaaatggttgattggtatgataaagaaaagaataaaaattaattagatagaagagagagtaaactatcgaaataagaaacacaatatcaggaggtggaaggcgaggagacacattcataagaatgtagataacagggagcttgaggtgggtagagacagagaagaagacagttgacaacaattgttgagtcttgaaggagtctcgctacatacatgtaaagaaaaacaaggattactactttatttcttcaaacttatagattcttctattgataggcaaaaatcttagcttcaatgtgtttatatgtatgccaaaactccaaccaaagaaagaatgtccatactttttctctcaacttagcaataagtcccattatacagtgggatttaagattactgaaattttcaacacttagaaatcttgagtttttagtatactaccaattagaccaaaaaataactaaatttgttccacatgtgacagaggtatactagttattataatcaatatcattatcaatattaagcacaactacattcgaatgactaacagagattcctacgaaaaaacaataatctgaagcaatagaagtaagagaagcaactatacatttggaatcgaatagccgatatgggaatccgccacagattctggagaagaatttgcagtttgtcggagagagcttttgattgaagaaatcagacaaaagttttggaggagagatctcgaaccggaacaaaaagtttacattagtattgaaattagaactaatttgcggttcggtttacactgggctaaagaggaaaaaaaaaaattcacgcgatggtgattttgaagacaactgcgttgataaaaaaaggcatgatttcaaaaggtgaacccctacagaattgctctcacgctctcaacgcgcactttgtgcgagtagatctgaaatacagccttgtgattggctaaaaaactctaaaaaaatagaaatagtagacatgttgctagcttatgttattatttagcttttctacaaaacgccgtcgttttttatttcgatcgtttcagcttttggcattgatccgaaccaatcggttcaactggctaagtctatccacaggtttgtataaaaaatctcatttggtcatgaaattaagcactaaatttatattaattaatcatttaatgcttatagacaaattctatttcatatttctaacgaatcagacctaattgtacgaaataaattattggttctgaaaatatcaattgggaaattaaaacccggttcaatttgaaaccggaaacaagactagctacgcctggaaactctcacacagagtcacaggagaagctcccgcgtctgcaaggaacggataaagtctctctctttctcactctctctcaatgaagaagaagatgctgacgagtcccagtaacgcacttcacagtagtactccacagttctggccagttcgccggagcagactttgccgttcccggaatttccctcgttttcactccggcgaacgcagcagcggcggaggaggaaaattgtgctcgctctctcttctctccggaagtggcgccagtaaattcagtgtcagagctctagttaggcctgatgataccgatgacgctgactccgtcggcgatgggtctctggcttgttcctaaccacgtatctgtcaaaattccattcggaaatagagaggtaatttcttcataaagctgtacccttttgatttcattggttgtttcatctggtcaaatttgaattcggagatgattggtaggatttgagacctttcgctctatagtagagaagcaaagctcgctgctttagatgtatgtgttgaacttgttttagcttcttcttaagtttttcatctttttctttctttttgtctactgtgtagattttagttgagactggtctcatggggagacaagcaagttctgcagtcacggtgacagatggagaaactgtaagtgtgctgtttcattcaatttccaaaactttcaactttttttcttagttcctcgagtttgtattcttcagtttagcttctgttacatgcttatctcttaatcggctttgtttcattatctaatctgtctacttgtcattgtagattgtcttcacatccgtttgtctagctgatgttccgagtgagccatcagattttcttcccctttatgttcactatcaggagcgattctcagctgtaggtcgaactaggtaagcgtttttcaattttggagtctcttgctgtaagaagaccatgtcattgcctaaatgatgatctaaatggaccttcttgtggtacagtggtggattttttaagcgagaagggagaaccaaagatcacgaggtatgtactaatgctgtttttggtttcgtctatttcgccatccttcttaacatgttgatttttatgcaggttctgatttgtaggttacttttctttgccttcctgcagcctcctacatcaccggacaggaagagctaaaagcatgcttaaatgattggaaatccaatggtttagtggtgtctggtttggttagagatcagagggagaagttgattcaggaagtgtcttccacgttcagtggcaagctcaacattcttgtaagttcccttctcctgcaaaatgcttgttaaaactgactctagttttttctcagcattgtgatcagaatcgtcattgatcttgaaatagtttattgcattagctctgcatccttataagtttattcagagagacgggagtcgccattagctcaaggatcagggaataatatgggtggttctgtgatgaatggtaatactcctccatcactagactgtcttttatctccaaaatccaaatggatcctcttaattaatgatgagtttctacatcatgaaaattgatcatgtcatggtgtttccagctaatgaatctgtttcacctgtaacctcttccccggttataacttcaacaccgttggaacatacagaggctggaactaaaggaaagacggtccccaagaagacacttcagccaatggaaatgaatcaactcgagagaaggtatcactttaacataattgtcattatttttatttaactctgagatggttcttctttgtgtttaacactaatatgcacagatgcgtgagaagcattatagtgaagataacagtcgtaagaggaaaagaggagaactggagcataattcggacctcaacgagactggtatgtcttaactctcattcgaccttctgaaattcatgatcagcttgcaatgttacaaaggctgagttccattatacgagtaataaatattactatactaaagcaatttcattaattatcttgttaatttgtgcatgcgttgatctccagtgctaccctctgattggactcccgatcctgtgaagaattttgctgctgatgatgatgatgaggaaaccaaagcaaaggatgcaacaatggttctgccttttgtgaagaagtcaccggtttggaagatatatgaatcaatggaggtcttcaaaagagtaccacaaagtcctcatttcagcccattgtttgaagcaaaagaagatttccgtgaaggttttgctttgggtatgatggtgactttttctggggtattagaaaaagtagaagatctgaaaaccgacgttcccatacgccaactaaatagccttaaagactcatttaccgagctagagaagcatggattcacggtcacagcgcctttatctcggatcgccaagctgttagctctcaaagatagacaactaaaaatattggaggaactaaaagttttcgacaaagagatgaaagatgaatctagcaaaaagcataaagctgagcaagagtttggtgagatggaacgcaagattcttgaagtgaaaaacaaggttctggagctgcagaagcaagaagcggctctggaaaaacagaaggatgcaacctatgaaaagatatgtaaaatggagtcacgtgcaagagatcttggtgtagagcttgaagatgtggagtgagttggagacaattctgtcagctccctggtaagttaagaaaaaaaacaaaactataatgatctattctgactcaaaagatttatctgagttcgttgttcgttataggttatgatgtttagcttttaatcttgaagccattagcttaacttcattttcctttttgtggatttcaggtgaaaaaacaaaacaaagaaggaacaaaagcgtaaagggtttataggatcaagatcagagtcaaggagagaagctgacgtggcaaagacttgtgagtgattaagtcaaagagagaagctgacgtggcaaagaaaaatgaagactgaataattaattaattaatatcagtgagagcagataaaaacaattaattaagatgggctcgttaatttaggcccaatagatttctttgtaactttcatcgcgccaaaaaaatgaagaattattcattaatataaagtaattaattaaggagtatgatatgacgacttctcagattcctatgtaaagctaatccattttcagaaacagagtttgggtttctctccgctttagggttttctgtggaagaagaaaaaggcgggggttttctctctctttgttctgaggtttttttttttttaatgtaatcagagtaacgacattggtagtatctggggatggaggaaacgattaggaaaggttctgaagtggaagtgtcttctacagaagaaggttttgcagatgcatggttcagaggtatcctccaagaaaatcctaccaaatcaggtcgcaaaaagctccgtgttcgttacttgactctgttaaacgacgacgctttgtctcctcttatcgagaacattgaaccgaggtttattcgaccggttccgccggagaatgaatacaacggtatcgttttggaggaaggaacggtggttgatgctgaccacaaagacggatggtggaccggtgtcattattaagaaattggagaatggcaagttttgggtttattatgattctccacctgacattattgagttcgagagaaaccaattgagacctcatttgcgctggtccggttggaaatggctccgaccagatattcaggtacgaggttgatgtaatccaagttgggttttttttttccttaattttgttgctttgttactaaagattgaaacttttatctgttgcatgttgtgatccattattaaatccgtttttttttcatgcttggagctgtctctgttttgttgcatgctatgttttgattgaaatggttaaaggcttgatctttgactttgattcttagtgtagactttgatgtttctgattgttttccttgaaggaattggataagtccatgtttagctccgggacaatggcggaagtgagtactattgtagataaagctgaagttgcgtggttccctgctatgataattaaagagattgaagtggatggtgagaagaaattcatcgtgaaggactgtaataaacacttgagctttagtggtgatgaggcgagaaccaacagtaccattgattcgtcccgtgttagacccacaccgcctccttttccagttgaaaagtacgaattgatggatcgtgtggaggtgtttcgtggttcggtatggcgtcaaggtttggtaagaggagttctcgatcacaactgttacatggtttgtttagtggttacaaaggaggaaccagtggttaaacactcagatcttaggccttgtaaagtgtgggaagatggggtttggcaggacggaccaaaggtatcatattcaataatttcaatcaattttctttcggtttttgatttgttggtatgatgaattgaagctgttgtgtgttttgtccttttttcagcaaacccctgtgatagaaactccttccaacgtcatgaaaacgaagccaatgcgctcttgttctggtgctaagtcaatgactcctaaaaggaccacaaaacatgccagaagatcactgaatcttgagaaaagtgcagagacactcacaaaagctgaaagtagagctgtgagttaggcattcactaatttcgtttgcttttctcatgtctttgaattaacaaattttgtttcctgcaaataggccactggagaattgagaagtaagagggctaatgatgttattaatgataatactcctctggtcataaccccacaagtgaaaccaataggtaattgtgatcttgttcagctctttgagtttagtttctgcatcatgaaactgatctttaaagtcaatgttttcagcctctgttgaacctgtaaccccttcccgagtcagaactgcaacaccgttgaaacaaacaaaggctgatactcaaggaaagtcttcccccaagaagacacttgagccaatgagagatgaaaatggcttagaaaattcaactcgacagaaggtaaagttagttcttcgtttgaaaatctctctttcactagatggtggtgttcatgattggtatttatcaaaatgatgctttattatctgtatataggtacttgaggagaagaatagcgaaaagaagggtaggaaaagaaaaagacaagaagaacacaactcagaccttaaggagactggtatgtcttagccagcatctatctagactgatatctttgtttggtacccaaattttaatcatataattggttataatttgtagatgagagttgcaatggtcaaatggccgagatcaatgatacaagcagtatctgcaacgatgttgatgatcagcctctcgctgcttggataaatttgcctactggttcgaaatcttttcagtatacttaagctaagatttatctctttgaaacatttcagatagtatatgctagacaattttttttttttttttttttttatcgtgttgatctatccagagacatccattgatcatagcccgattgtggtgaataatgctgctattgccaccgatgttgaggaaagacaagcaaatgatacactaatgattttaccttttgcaaagaagtcaccgttttggaagatgtatgagacacaggaggtatgcaaaatagcaccacagagtccacatttcagcccgctgttcgaggctaaagaagaactccgcgaatggacagccgttggtatgatggtgagtttctatggtttattagaggaagtaaaaaacctgcaactcgatgtttccccaagcactctaggtagcctcagttgttcttttgccgagctagagaagcacggttttgacgttgcagcccctcagtcacgaatcaacaaaatgctgtctctccaagatgagcgagcaaagaaagcagaggaaagaaaaggtcttgagaagaagattgaagcaggagagatagaagggcacacgtatgaagaagaaatggctgagttagaactcaaaattctggagctgaagagacaacaagtggttgcgaaagagatgaaggaagctacagacaaagtgacaagtggaatgaaatcatatgcagaaatgattaatcaagagatagaagatttgaggcttgagtttcagtcaactgcttctgctccatggtaataaaagtaagaagacaaaactatgaataacctctctaagctctagattctggtaaatgaaaacttagatgtaagtaaaaaagactcatctaagatctaatccccttttgcttattgttgatgatgatgttaagtttaactaatcttttgtagaccttatttatgatgagaagaatctgtctaatattttgtgacttccttctaaagtattgaagacacgtcaagatcggtccaaactcaatttagtaatttacgcacagtacaatcatcacatgtagttgaaaactaagctaaagaattgctattaaactaaagaaattattaaaattgtacaccttgattcgaagatgaatagattgatggagttttgtgatagcagataaggacaaaaagcctaaagactcggaatgctttagaaggttcgctcctagctggctattttattttagtttttttttgtaaagaaaattttcccacttctctcttattggttacttactgcatgacgagttaaattgtccttgaaagttaaaaatatttatctccataatatctttttttttataaagagataatatcttatgttaatacagattttttgtaatttttctcaaatatatatattgcaaattgtacaagagatacaatttgttgaaactagttattgtttcaaccctacaactgtttaagtctgtgacacatattaatgcaaacggtctcgttgtccatcagtcccatgcattacattttttttttcttttttcaaatattctgcgtaatttaatttcaacattgtataatcgacccttgtatgtccgtattgaaggttggaaaaatttaatgatacattgtacgttttctaggttttgttctaaatgctcataaacctacttggatttggaaataaatgagagcttacatatatagaacaatactctatttccacaaaaattatttgctactcatatacaaatgtaggtttagaaaaaatccactttagcaaaaagagatgggaaattaatgaaaattcacttgactttctttgttttgtgagcaattttcgatttcaaagtaatggtcggacttagactttttcctgttcttttttgctgacttaataataagctgaaacttaacagttagaagttggaacaagatataaataaaaaagctaagttgtcaaacataaagttgaaaatgatttggtgatgtcaattaaataaaaagttgaaaactaatcatttgtatttgaccggcggttacttggaataagactaagaattattgtactttctatttaatgggtttgctaagttttttatcagatcattttaagcaaaatatcgataacttttcgaagagattagttgaaaatactaagcattatatatatttaaatatgatggatcagtatatatagttttgaaaatcacactgcaggatccgttggaattggtggctgagaacttttatgatcttcttaaaattttaatccgtaaataaattatacgagttggattggttcgcgtcttctaatgcgtattgacatctataataaaagctatcagaaaagttgctgatctttttctgtatcttattaaatatgtagacccgagcagagaaatgtggatcaattaataaatatcatgtacggatgaacaagagagaagaaaaaagtataataatactatagagcgaaaagtattgcatgatggagaaactctcaacaatttcaaacatgaacgacttcttacaaaacaatgtatctttagttgtcacaatctttgaaattctacaaatagagaagacggaaaaagatgaaaatgaaattagtgtttttctttggcaaggtccttggatctcttaaaagtgattagatcaacggtaatgttttagatatcctacatgtgcattgattcgataaaagcatttaaatagtgaatattacaaacaaaaatagatacttacatcatgaaatagaaacaaaatcaaactgggttgctacttaccagtaatcacgtgacggtaactggctaactgcaatagtatatccaaaacaactttaagaaatggatacgaaatgttttagttttgggaaaatgtcaaataaagatttcgtcacaaatccatcaatccagtatagaacacttttatcaaaatgattttgcaaattgattcttagagtacgatacaagttgcaaactggaaaaataattttgcagttgcaacaaataataataaatgattgtgcaaattgattctcaaattaagtaggaaacaagttgtagtagatatagactgtttttacatgatgttaattccaaaaggattcattgccatacaaatggttttctcatagaggacgtaatatcaattaatggaaaatagtagttgaagatttatagaagaaaaaaaaaactttccgcaaacaacactatatatatatatattggatcaaaaataaaaagagttaaatgaaagaaatacacagacctggcctgtatcaaccaactcatatattattatataaaccaacatccatttctcagctcctcatcaaattatcttctttctctttctctctgatcatttccaaattatttctaagctaagaaaatctttaaaaataacaaagcttctaaaataataatccgacctaccggattcaaaccattgatctgaagatcatctataaaccagtccttgatctataaactaaaataaggtcggttgcttaatctttgttacccttttatttttgtggttataattatattatcttcattttgtttccttttatgattaatcgatcatatcaggatagatatttcgttaagtttatagtttaaatccagaattttatgtttagaaaagagaatgggaagagttgaagtgtttaacgtctatgaatattcctcacgtcaagaaaaaagaaaaaaaactatgaatggtcctctctcgatgtccttacattggttagagagcgttgcaactacaatacatacatcactttcatcatatttattgtctttttcagaggttttcatatttcgactgaattcttcaatttgcaatattatgaataatagagaagatgatgaaaaaaggataaagagagtgaagccagggttatgcatgctctcacgtttagggcgtgactctaaactagcgatttagtttacggtattattaaaaataatattagtcacataatatttgtaattttagtcgaaattaatgacagaaaaatactagacgctaggatttgtacttccttgaatccttggaaaatatacgtatgtaattaatattattcattatcaaaccacaaatacggaaaccaagtttgtgtcaaatccaaatggagtagtttggtatcttaggttgttgtttatcataaatgagaaactttggggttgcactcgatcggtatggttaggtggaccggactggtgacaattaatgccattgatctataactgttagattataatctaaaggttccattgcagaacaattcatcaaactttaatatctatgtatttatgtatgttcccaactcacagaatttcacggaattgcaaaactatgataaattctgctaccttaatgaatacactatgaacttgactaaaaaaacaagaataaagtatgataaattccctcattttatatttctcttatctatttcacatttttgcttgaaaatttgtaccattaatctctctattcggcagtgttaaattttattatttaactccgtcggttggattcattttaaatttctcttcagggaagaaaaaaacaagagagagaaatagagaatgaagtcttttgcggctaaggtagaagagggagttaaaggaatagacggaaagccgtcggtaggtccggtgtaccggaatcttctgtcggaaaaaggttttcctccgattgattctgagatcaccactgcttgggacattttcaggtatatctctaagactctaaatatatttataaatagttttcttgttagatgttgaatatataaaaagaaaaaaaaacaaattatagttagacatatatcaccttttgtgtataattattgcaattaataaacactcttttggggttttatttttagtaaatcagtggagaaattccctgacaataatatgcttggatggcgtcgaattgttgatgagaaggtgagtttcttgaatttttcttattgttacttaacaaaaagaagagaaaatatttatgggttaatacgtatatttgtacggatcggtttaggttggaccatatatgtggaaaacgtacaaggaagtatacgaagaagttttgcagattggctctgcactacgagccgccggagctgaacctgtaaatatttctttgtaccttctttcaagattaacttgtgtttttgaagatttgttattcacatcgtaataaaatgttatatgtaggggagtcgagtggggatctacggtgttaattgtcctcagtggatcatagcaatggaggtccatctcattattttcttaatgaaatacttttctgattgatatttcccaaatttcttaattatgtttaacaatatattgatgtgaacatatttaggcttgtgcagctcacactctaatctgtgtacctctatatgatacattgggtaagtcttttttttttcctttcgccatatacattttcttgactcaaactcaagaacgcgactcaaaattgtgtgtatatgatgttctttaggttcaggagcagtcgattacattgtagagcatgcggaaatcgactttgtgtttgtccaagacaccaaaattaaaggagttaagatcttttaaatttatttcactaattaattgttatcattaaactaattaaaacatttttcaaaagtattcatcaagtgaataataaactttttgttttcttttgttcatgctattgaaatttagcttcttgagccagattgcaaatgtgctaaacggctaaaagctatagtttccttcactaacgtgagcgacgagcttagccacaaggcttcagaaattggagtcaaaacatactcctggatcgattttctccatatggttcgtctcactttttatttactaaattgtagtaatccttgagttttttttttctttttttttttttcctataatgtatccttgagttttataatttatttttatattcggaccattctctgaggtatataaaatgacaggcaacccaacttgacggcattaggtactagagtgtatgtgagaattaaatgaattaggtgcacacacaaagcgacgttgatattaccataaatatctttttgttgactatttgatcgttgaccagggacgtgagaaaccggaagacacgaacccgcctaaggcgtttaacatatgcaccataatgtacaccagcggcacaagcggtgatcctaaaggtgtggttttgactcaccaagcggtcgcgacttttgttgttgggatggatctctatatggaccagtttgaagataaggtaacccataattacttcaaaggaacagtagacactttttaaccaaaattcaaataaattctgagacatagaaaaatttagatattttgacatttataatgataactactaataaaatcgtagagaacaaatattatctgattactattgattaatcctctgtttacttatgactaatcctctgttttctttgggcggattagatgacacatgatgatgtgtatctctccttcttgcccttggctcatattcttgaccgtatgaacgaggaatacttctttcgcaaaggcgcttccgtcggctattaccatggagtatgttaatctctcttcttcttttttttgatggagtatggataaagaatctaagagaattgatgtattgatttatgtagaatttgaacgtgttacgtgacgatattcaagaactgaaaccgacttatctagctggagtaccaagagtgtttgagagaatccatgaggggattcaaaaggctcttcaagaacttaacccaagaaggagattcatcttcaatgctctctacaaacagtaagtaacttttcatcgtttttgctctgttttcttctaacttttctgttttctaatagcttaaccttgcaaaacaaaatgatgatgtagcaagcttgcgtggttgaatcgtgggtactctcatagtaaagcttcacccatggctgatttcattgctttcagaaaggttaatagcagttgatataatggttttttctttgtatttttggtgcttttgtttaggtttatggtcatcacataaacctgacttttagaggttttgtttttctgttaaagattagagacaaattgggaggtcgcatccggttgctagtatctggaggagcacctttgagccctgagattgaagagtttttgagagttacttgttgttgctttgtcgttcaaggctacggtataatactttacatctcctctacattctagggtttcttctccctgtttcgtatttgccaaggaaagtttgctttgattgtttggactaggtctaacggagacacttggaggaacggctttgggtttcccggacgagatgtgtatgctagggacagtcggtattccagcggtttacaacgagatacggcttgaagaggtgtctgaaatgggctatgacccgctcggagaaaatccggcaggagagatctgtataagaggacaatgtatgttttcagggtattacaagaaccctgaactcactgaagaagtcatgaaagatggatggttccacacaggagatataggtgagattcttccaaacggagtactcaagatcatcgatcgtaaaaagaatctgatcaaactttctcaaggagaatatgttgctctcgagcatttggaaaacatcttcgggcaaaactctgttgtccaagatgtaagcttttcaactatcaatcatgatttcctgccaagcaagcaaacaatcctttttagggtttctccttaattatcatttagttgttgtctgactatccttaatgcttgtttttcagatatgggtttatggagacagcttcaaatctatgcttgtcgcggtggttgttcccaacccagaaaccgtcaacaggtgggctaaagatctcggttttactaaaccattcgaagaactctgttctttcccggaactaaaagaacacatcatttcagaactgaagtccacggcagaaaagaacaaggtttgtttgactttgtctgaatcaaaattcttcaattttattctaaaataaatactaaaagaaatattcatggatgtgagaaatatagctaagaaagtttgagtacatcaaagcggtgacagtggagacaaaacctttcgacgtagagagagacttagtgactgcgacgctcaagaatcggaggaacaatcttctcaaatattatcaggtttaattttatagattagtgtttttattatttcctttatagatagtaaatgttgaatttagatatttgcagccattctatccgctaacgttccattatacaggtgcaaatcgacgaaatgtaccgcaaattggcctcaaagaaaatctgaaagtgttgcgatgatgtgtgtgctgttattgatagttatatatgtacgttatatgtatcaataattcatagatatgagctttatgctttatgtaatattttatttttatgttgtatgacatcataattatggaatttttttttgttgatttttgctttggtaatgtaactctctatttgtatccataatctaccaaaatccacgtaactaccactacgatttaacttactatccaataacccgttctatgaatttgattcatataaagtctagaaaaaaactcaaaagtgatattaaattatgttgagaaaaatatgaaaatacattttggttttcattgttgatttgtttattgttgacttttcttttcttttttcttaaattctcattcaaaccctaggttaagctagaaactacatcagagtgatgactaaaacaacataatgctcaagaggaaattaagtcaattaatgccatttctgtaatgaaattataatataacgtaatttatgtataacgaatttaaagtacggaatacgtaaccggggagctgtcactgatcacctaatgaaacttcaacatatcttcatttcaacgattttgtttaataatctaaatatacgattacgtattttcactatttcggaaatatgcaatatatatgttcaatcatccttcaaaggaaaacataagagagaaagagaaaatgaagtgtttttgtcgtctgcaggtccggtgtaccggaatcttttgtcggagaaaggttttcctcctcgagattctgatatcatcactacttgggacattttcaggtatatattgttaataatcaggtttaattttcttatatgatatctctttgattgttaattaatatcttttgggttttgttagtaaatctgtggaaaaatttcctgataacaagatgcttggatggcgtcaaattgtggatgagaaggtgaatttcttgaatgcttcatactaaaaatagagagaacattctggtcaaaataaatttgtatacataacttcgtttccaacaatatgcattctatcaaattggtgacaacaacaacaactttaatacaaatctatatgatgtatgttctggttactgattaaaactctctgtacatattgttttatttctatatttgtatggatcggtttaggttggaccgtatatgtggaaaacgtacaaggaagtatacgaagaagttctcttgatcggctcagcgctacgagctggagagtgattcgtatgcgtttagtatattaggttacctcaagactttgtgacagattgtatgaaggattctctgtgataccaaatgggaaactggttatggcctttggcctggtgaacttaattacttagttggttattaggaaaatctgagattgtgtgttttcaagctcatattgaagtttgaatttgctttgactactagtgttagcattcagatggttgagaaaattactgcagatctgttttttttgggaaccttttttgtttgataaaatacaaatgcaagtctgtttaccacagaattcacgaggtagcatgatgaattctattcttattgatgatctggcactaatgagggcagaggaaggagtgaactttgtaggacaaagacctctttcaggtgaaagcatatgatgtgtaatccttgatgatatttctctagtggtaacaaagttaaagtttgtatcagttgagacaagaaaaagatcatcattcactcattataaaacttgatggcgatatgcttgtttatatttctatttccggaaatttgaactagttctatgataggtgcataaaaatcaacaatttaatttaaattaatttgatggttaccaaactgcaatgggtcaattaaaaactgactatatttgaaggggaaaagcaattcatgttgatggcctgatgggtgggtgggtttgggatggctgcagaaaaggaggattattcatgtatggtggatctctttaggaagggctggtcaattagtgttatttagttgaggagattgatcacgaggaccagagcgaagagcaagacgctatcagctggactgaagctcatacttgagattatcagaaacattgttatatagagttgccaaacagaggttttaaaagaacacactttgagtaatgcaagattctttcattgaacataaacaaagcaaagtatccatcataatttaagacgagggtaaatcatagtggtcttgtgactaagacattcttctctgagtgatttgatcctctagtcgaagcaaagagagtgattttcttcacttccggttcttgctctcgttcttttcccgctctctcttcttgtaaagcttctcgagggctcgttttgcttcacagttggggaagttggaaagatcatagtaatgctgagcaacatcgactaacctatatacaagcaaagatattcggtttttaatccatcggatgttgataaacaagagataacaggaaccagagatggaaactaaccattcaccgcggatatctgtaacagtgcgtatgaaattccgagtagtcaagacatattcattgtaaatcacccactctggtttgtgatccaggcaattagatggatgcaagtgaaccacctgccaccagaatttacaggcaacccgtcagatgtaagctataaggatctctttataatcgggaaatcaaaatctgtaacagaatgcaaaaaacaagacatacttggttatctttgacggtcaagtaatggccagtgcgttctaggtgagccacctgcataaaataaccagcaagcatggcctttcttatgttgacatagtagtcgcggctgttgaaatccgtgctgcacatcttcagattaaacctcgacattatccgcactagctgctgtctgacattgtctgcagatttcattgctctgttgttgacaaagttctcgaaacaccagtttgggtcttcatctatgagaatttcaagtgagcagggttggtgaggtaaattcatttgtcttaagcagctataagagaaaagttgcagatagagaaaaaataactcactgttttgcttgtaggcgtggtacacgtttagcaacgtcaggtgatctccatcaatgtgtccaaacctagctttagcttcatctgctgctttttgagcctctctaggccggacaaagcaattcggtactagagaaagaattgtttttataacagaatatgcccatggaagaggtcagcagatgcatagaggcgagagacgataccatttgcttgtgagaatactgagaaactgcaactagatgcatcaggttttacttagaactccccaaccatggacatggagaccccaaactagtgactagtgagctgcttatgacaacctaactctaagattaaaattgaatggcaaacacagacactagtgaattttaagaagacacatgggatgcagtagatgttcatgtgtatgacatacttatagatgcgttcacatacacacagacttatttccgtaaattcaagtgaagtgaaacatagtacgctcaagtaaaccgacatctataatgaactttggagaagacaaaccatacttacgagtagaagatgtacctgataacattgcagaaaccgagagaatctcattggaacagttgaattcaggactgactatgagcatctttgacatttgtggatccaagggaaattcactcattatttcacccgtctttgtcaagttaccttcatcatcaagtgctcccaaataattcagaacctctaatgcccgcatcagtgtctcaggagcaggaggatccatgaaatcaaagtgcaccaagtcatcaatgccaagttttttcaatgtcaggactgtatttgcaaggtttgatctcaatatctcaggatatgtctgtggctgcaggtcattgttgaaactcttctctgtgtagagcctaaaacattttccagggcgagttctaccagcacgacctgatctctggtgagcacttgcctttgatattggggacaccaacaatgactcaactcgaatccgtgggttgtagactttctgcttagcaaaaccagggtcaataacataaacaatcccatcaatggttagagaggtttcagcaatgttggttgagacaacaatctttcgtccagcaggaccaccttctgttaacggcactggagcagggtcgaaaatcttctgctgcatcgcaggtggaagagtagaatacaaaggcacaactttgacaggacccacttgatctccaagattgctgacctctttattgattttacggcaagcatcttctatttcctcctctccagttaagaaaacaagaatatctccaggtggctcgcacatgtgtatctgaacaacagtccttatagcagcctcgagataatccctctcaggttcctgtgtatagaagatctcaacaggatgaagcctaccagggactttcataagaggagcaccgctaaaatattcctgaaacttttcagcttctaaagttgcactcatgacaactagcttaagatcaggcctattcctcaagacctctttgagaagaccaaagagcacatccgtggctagagtcctttcatgagcttcatcgagaataataactttgtatctctctaaaagcggatccgccattgcctctctcaaaagcataccatcagtcaaatacctgtaataacaggagagaaaggttatgatcagaacagaaacgttataaagctgagaagccaaagaaagaagaacaaaaacactcacttaagcatagtacgagagctagtacaatcctcaaaacgaatactgtaaccaacttcttcaccaatggagacatccatttcatcagcaacacgacgagacacagacattgcagcaactctacgaggctgggtacatccaaccaaccatttccttcccttatcggagttgtcagccaccacagcatctaatacaaactgtggaatctgtagaatacaatgaaatgttatgttggatcacactaaacactaattccaaaatcgaaattgaaagcttgagctacctgtgtagttttaccactaccagtttcaccgacgagtatgagagtttgattagagttcaaagtattgagaaagtcatctttctggagccaaacgggaagatctctcctcttctccagaatctcgaaatacctctgagaataagcctttccgttccatttgttgatcagattgcttccaccaccagccgccgccgcaagtccgagaccattggatttggtgttcttcgacgaaagagaaggatcttccataacatcgaacaaactaaccttccgttttctctctgtacccattacgaacgaacaaaacgagagacagatagattttaggctcaacgataagcagcggcgcgaggacttttcaggttaaccccttttgtctcttttgatatttgttttaggcaccaaggcccgttaagttcccttgtgggccgacctatgtatgtaaagcccatgtttctctgaatatatttttctgactctctcattctttttttgtttgttaaaaagtaaaaacactagcattttgattattgatcacaaagaacctctccagcctcctcttactttgacaaggatggatatggtacaatagaaagagaaaaaaacacttacaccacttaaacaaaatacaacaaaaaaaaaaaagtggactgacgcaaatagaattaagggtatccttaagcattgcatttgcaatacgaagtgcatagaaagcatttgagactgcgaatttgatcgtcacttaattcgaaatttactaccccaaggttgagtttgacatcagggtttgaataccttcattgacttcttcttctttagtagctattgtcgttttgattcaaaactgctaaggtaaaataagtatttcttcaatgatattgttacggcttgagagtcttttggatctaacaaatgtatattgaaagtggaataaacttggagacatgatgagcaaaattgttagttgttttctttgatacaatgggtctcttaagtttgtcttttagtcatttacttttaagccatcgagagttttggtacgtttgctttcggttgcattcgtggctttgtttgggacaatgattatgtaccttcttcggttagggattatcactcaccgtaaaggtcaatacaaacatactaaagccaatggcgttgctatgcactcactagacaaaaagacaaaaaagtgatattacctcataagattgtttttccttccttgttctgttatgtagaacattttctcacacacacatggctacaaaagtaacaaaaagaaaaaggaaacaaaaaaagtttatttgcatggtaacttgtttctctactttattctcacaaggccacaagtctatgccctttggggatgacacaaagctatgattggtatttgctctgtttcacaaccattttaaccaaaccctttttaaaagaagactaaaattagtgaagagagtgacaaatttttctcctttgttttgaatttttttttttaaataattgaaaatagctaacaacaataacacagtgcatacgtctttattcttcaccgcagtgtaatcatgaaacagcaacaagaacaaaaggggtaaataaagttttaaaaataaataagagaaatcatgaagggtcgatagaaacatagagaagagtaggtagaagtagttgggtttatgcttccagtttcgcattaatttcctctttagttatctcgcttaattaatcttgttgattactatgaaactagttaatttttccagattccaagacatatatcgaagcgaaacaaacaaaaaacaattaactgactgtgtatttgactagagagagattgattaacctgaaaccctagaaggctactatattagaatcatagatcaaataagttttcaattaaaaaaaaaaacacgaactacaaagcctagctttgacatagtgttcatgcaaagcccataacaaattttaaaagacgaccattgttgtaaatcgcctacgatcagtaatttacaaaacgacaaattattattatgcgattaagaagtttttgccaatcctaatatttacaaaatcatgtttactagtccacatattttttttaagaatctggtgcatttttgtgttataaattataagttcacacatttataatataagttcacagtaaataaaaattacatttatagtgattcaatggtgaaaatcacaagtactttctcggcttggtacaatcatcattaccttacgatttcagaaccataagaaaacatcttcttcatcagaacaaaagatccgtttcttttagacaattatacaaaaaaaaactagattaaaactataagactatatatatactactactcttccttcaacatatgagacggaacaacatcttgcagaagtccattatctttaaccaaaactcgactcttcttcacacgattatcatcaccatactcattagcgtggctattaaggtactcgttgactcctccaaaacaagacatgagttcttgttgctgctgttggtgatggtattggacaagctgttggaactgaggagagattaacgtggagccatcaataggaaacccaaagcaaccattaccgagactcgaagcagctcctgacgatccgaagaaacctccagtggaaataggacgagacgtgagtggactaatgtgagtgtgttgaccttcgtaggttgtaaccacagtgcttggatctctgaatgatctctccactctcttcttcacgttacatgaagccgttgtgcaacggtagtaactcctgcaaacgaaacaccatttacacaaaatcaactttggttcacaattaagtctttctttggacactgtaaacagtagtaaatttaattagtaaacactaacacccaaacattaagaaacaatgggacagtgctagatccaacaaattaacatagtgcatgtacccaagagcaaatcaaaaaagaagaaacaaaacaacaaggaaaaagatttgatttttcttcttgttgttgtaaaactatggtcaaaggatatggatatatttgctgatacctgggaaaaggactgtttttgacagctttttgaccatattttcgccagcgataaccatcttcgagatgatcaacttcactctttgtcatgaatgcgactcttgcctctctctgtctcttctgattattcttctttgctttcaacctgttcattaaaaatgctttctttaggatacttctttttttttttgtctctgagactttttatcgaacagcttctggactcaacaaaaaaaaaagtgagaaattttaagaactcactgtttcttagtatgactcttctcttgttgatcttcacctccttcttcttcattgtcttctgttttcggtttctcttcatttagagcctcgcttgaagcagacgaaatcgatgacgagttaggagtcgccggtgggtttatcaacaaatgatccgaacacaaagactccacctttgacgtcactaattgctctgacggtggagcttgaatgatacttgaagacagcttcgccgatggttgcgtttgcgtttgcggttgagacgtttggagaaggaaggaatgaggagaaacagtagcaaagtcttgatgctgctgagaacttaataactccatgaaccctaaagaatgcctctccgccgccgctaaatctccgaaatcccaaacgctttgtgacgacgggtagtaaaaactcgtctttgagaaatctgtaaactccattgttgttcttcttcttctctcgctgagctttaccggaaacaatctatcaaatggctttaaaaacagagaaatcgcatcaaaacagagatcgaacacaaagcaaatgtcaaaatcaaaaatacaaaaagatcaatccttgtaaagaaagagtttttagggttcaaagaggagagatagagagagaagaaagatgaaatgtatggcgtaagagaggaaagagataataatgactcaaggatttgatatttgtcaccgcactgtgttaaatggtggtccttgatttttttttattgaccggcaatagcaggttaaatatacagtacggatggttacagacttccagtaaccggttatatcacacgaaggttttttcaaaatactgtagtcattggtcaacgcgtaagtcagagaagacagtgaacgctttcatacgtccggtttttgactggtttagttaaaccggtttttagagctagtgtgaaagaagaacgaaaataaatagttgttggctcaaataaagaaattaaaatacaataaaaaggctcttggtgttggttcgtgtgcatgggaatcctctttttagtttttattaatgtgaacacaaaaatttgttcatctttaaacaaaaaaagagacttgtccttattgtttcctaaattgtttcaatatatagactcaagccatgagtcatgtgtgggcggtgagaccgttgtccgtgaatcgtgatcaagaatcatttttatgtcgaaatttcgtagtattaatgtttcgttgttattagacaaaataatcagtagtaaatttgtaaagcgaaaagaaaaatgtgatcgacactacttttgatcaggaaagaagcacgtatgaatctaaaatcttcgacgtttttatgaaaataaataatttaaagtggtggagaattaacatatattagtatcatatttatatcgaaaaggccgaatttaatggaccgtgttcacatcttctttttgtcttttggaatgttattatgcgaagaaaaatatctgataaaaagcctgcaccgcaggtctaatattcttcttcttctttctgttggtgcttgtgaacgaagtaatactttagtttttaataattaagcgaaaggaaaatttgtccaaagaacgcagaaaacttgtaaaactctggttacaaagctatgacatatacatgtgtgttgattgtgtatatttttgtattgaaatacgtggaaacatatagcaaggttatgataatatttagttcagtttggggccacgaacatgtatacgttgcaggttgcatatcacaaactgtctactgttaaattttattcaatcaaacaaatcggtttctcacatacttactactaggtaatacacaatattctttctactttcctaattacgttaagattagtgttttttatacattcgtagcaccaattattgatgtaggcggatatactatataatttgataaataagattatagtactactccatatgtttaaaggttagtggacccaaagaaaatcggaatagatcaaagtgaagggcccggattagtataactcctgcatgcctcatggatcttttttataaacagcggtgatcccgatgactaaagaagaaaagctaaaggttaaacaaagtcaagatttgaatttctctttttgttctttttttaccgattttcctatatataatttgctttatcctttttgaatttgtttacctcggctttgcgaaaactaaatttgtttttgattttgcgaaacaaaaaataaggaaagaagaagcatgcacgtgtggtgtacaagagtgagtggtgacccactctcgtataatttgcttgcaaacttagctctccttttgcatgcttccatgattttgtttcccccctttttttagtaacctattttaatttaattttcttcgaccgtatttcataataatgtttcaagtttacagatattactagttactacgacctgactattataggatcagtcctagtcaaaacatttttggttgtttttttcgcctagtttatttcttaattttgaaattggataataaagaaaagcgtctcaatcaaaggtcggccaaaagacgcgcggctcggtgttggcgttggtttgcggacgggcatcaatggtggcgtatgtttctctctacggacgtctttgtgcaaatatattctacacgtgtcctctttttgtcggcttatgggtcccattaactaaactgtccacgtggcactatctcaaattcaatggcccacgcttcatccttcgttactccctccttcccttgctgccgttagatcgcgcgagcaagaaagaagcaagtacattaaaaaaaataattaataattaataattttctgtataccaccaatatattaactaaattgtcccaattcatcaaacaaacttcactatttttctaaagatggatgaaaattaatcagaggtcttttgagatttgatggttcagttcagtcgtgaaattacattacttaaagaaaactagattcaaaacaaaataaataggtgttagaaaaggtagattcgtatcaccgaacgatacagaaaaaaaaaatattattccaccaaaaaaaaagaaaaaaatatattaaatttttgactaccctagggttgcttcttggatacgtctaggatctcaatagcatagtggattttttttttaaaggagaaacaaaattattttattttttaaaaaagcgagaaatcaggataatcaatggttagaataataataatttcactccggtcacgagtcacagggttccgagtcaccagtcttccactatatcacgtaatcccgcgacggtactcaaaacatttcagtattttagagtattgggatatacaataacatatcatatacagtaagtcaaatcttcgaattttgaattataaaagcccatcaaccaacactttttatatgaaaaaaacaatagaacaaatagagacgatgtataatactctagtcatacctaagtcttactcatattcatagaacatcagaatgtattagactaagtgactatagatatatagtttgaattgcatgtggattcgtttaattggttgagttaggtgattaatttggaccatttaaaaagatagagagtgttccctaacaagagaaaaccttctagaggagttgacaaggcatgaatcaagggataatattcacgttgcttctttcttggatacttatgtctcgtgattaattcacaagtagcaatcaattccctaattaaatgcctttttgttattttaattggaaaaaaaatcactcaaacgccactcgtatcgcatgtgttgacccacttaagatttctttcgcaattctaaaatgttgtgtggaagagttaaaaacaaaatcgttaaataataaccgttgcgttggtatttgcacatgggtaagtcaaagtaaacgcattttgggatcttattttatttattaatcgccgcatcaaacataataccgattaatataaatccctccgatggtagctagtcattaacttatagtcattaatatcatttactaatatctctacatataaatttttgtcttctacatatcggacaacgatccagtttagtttgatattttttcttatatgtaaaaaggttcaacgaatttgaaatgtgtggtagcacttatcctcctcctaaatcgattcctacctctctaatacggttaaaaaaaaaaaaaagacaatagctaaccgaaattttggatcatattgtacatagaagtgaaacgaagtcgcaaggcaaatattaatagatattttcggatttaaatgtcggtataatcaaaatttataggaattacatacgaaagtaatgaaggatcaccgaaaacattttctaaaataaaataaccgcaatgtaaaccatgagttagtgtacagataacatgttatagctaaactatatgataaaaaaaactatatgcttaattttattaagcaagtaaacaaaatatcacataattatgttttggaagaatcggaaaccatatatgtttgagtaatcaaatgagcccgtttataagcccatttaaagactttacttgccatctctacacggtgttaaagaataaatgtgtagtgccatgttaatattgttgaaccccaaatcaacgtcgagataataaaatgtcggaccatttcatcacaaccaattcgtgtcatctcaaataaattaaagggctaaatgatacgtggccatcaaacatttgtatctgttatctatcattatcacagagcgacactgtagtccaacagcaggatttaaaagcacatagtgacataacacagttttaccaattactttgaaagaattacaatgaaaagtaaattacatcgttataatacgtactatgaagctagtagtcttctcgataaattttctgcatatccactattgatgcctagaactattcgaaaataatcggtatattcttttttttggtcatcgcaatttttaatttatttgtaacaccctaaatggagagcgtagtaacaacacgtcaacaacaaataatatggaaaacacgaatgaaaaaacaaaatatagctaactcactgtgttaaatagtttaaggattaattttgatatttcaagactaaaattcaagttctttcactgtaatttccaaatcatagtttgcaattatgaactttcaaatgaatagaaatattgaaactttcacaagttcgaaggtgagcctgaacttcgaatttggatgcttccactatatggactaaaaattcggtatttgaattcgtggcccacgcactttcacagcccaacgttaaacattctttttcaacagtgttttgtccctttattggtaaaaaatacctgttacctccctacatttgtattttctccaaccgactgaacttaattttattgatatcatgtttacaacatagttcctttacaacctttttaagaaatgaccctttgttctttgctaatgtagcacacaaaaactattcccatggaacaattatcatgttttttttgccgaaccaacagtcatctgttatttagataagcatataatacatatatatttttgatatttaattttctgcatagtctacagcagcaagataaaccaaattccttttctatataagcaacacaagacaatcacacgagataataaaaaataaacacgaacaaataaaaactaaaaagaacgtaaaatccaacaagatatacaaaaaatatatgaaggcttttaaacacagttagtttcggtcaaaacctgaaccattgtctgcataactttcactttcatttccaaagccaagatataatctgccgtttgtctaaagagtccatctaaaccttctgatgttttggtgttgggaacaagctcttttagcgtcttcactcgtctgtgtattgcgcgacaaggtcttctagaagcttctacactcttccttggtcggatcatgatcttcttcacaagtgcccttcgagccctttgtcttctcatcaaaacccaaattgattcctttctttgtccttctaatgttacacccatattattattgtaaatgaaagaatgttgtgtagacaagtgataacgtttgcttacaagattagatgcaaatatatatgagagtatgagacgcccttagtttatatagacatacatagaggtcagtgacctttatatatagcttaaaatggagattacagcttctgagaaggttctccttttatctctcaaaagaattggatgagaatttgacaagtgtccacaagggtgttttaaatgttgtttttgatggataattagggtttagcttaaatcagaggacatgtcatcaaaatacaactcgatgcacatgcactcacatgattatcatcactacccaactctcttacatgcttaataacaccaactttcttcccattcacatcaccttaaacaccctgtcttattcctcctttgttgcgctttatccattttttcattttattttattttactttcgcagccaatttgttctgagattaacaaagtcgggcggattgaagcaaaccaaaaaaaaaaagtcaggcattaacgaagaatataattatctttatgccattatctttctagattaattcttaatctaatttataagcatgcaatcagtgtattaagacgctagcgattgaaatagacagatatataggttgataagatgaaaaagaaaatattcatattatgccgcgcgcgttagcaaaagtcaaaacaactatcgaaaaattatcttattttatatttctcccaaaattttggtctgattcgtaaactaatttagaaacatacaatatattagtgtttgagtttcgctacaatgtatatagtttgaattgatcaccactgtcgacggagatgatagataaaatatgactatttggttgtcataatgcttttgcttttatcaagtcgttatatatctcattatttccagctgatataacccggcgcaactaattaagaaatatgaataacctaatgatataacaaaagcatttctaggtgttttatttttttggacaaagtagataacgatgttggataatgggataaggtcttaatataaaaagacacaagaacatgcagtgatcttctgtgttcctttgaatttatggactttcgtatttaggatttttattttagtgagtggatttgattgaagcaccttaaaagattatgttctttctcgtcatgtgtttatttttaagaaaagaaaaagaaaagcagattcgtggagcgatgttgatcaaacatcctcggagactatagattcaatgtatatctcccatcgccgtcaacacgaaacattgtacttacaaattctcttagacatatatgtacgtctctgataattgagatatataaattgatcattaaatgagaattagcttaacattcgcatatgattgatcagtgtatgtctatattttataggtttcaaggtaacgtgaaaagtacctaactaattaaggtaggtttatacatataataagtagccataatggagtgtttagtggtcgaaattgatcgcttgttagcagcacgttgtatgtatattagcttaacgtgcatgcacatgttcttatatcctccctattcgtctaggccacccaacacatctatatcccaattcacaattttttatatatattttttattaccagaaaattattaatgtttcggaaattatgatcgagtaattatcttatgtataatttttacgaaatttcctttgttaatatcataatagttgttttaaccagaaaatggtatatatatcagaaagaagtaaaacaataagaagaccatatcagcagaatctattatatgttgaatgttctgtcttccaataaatgatacaaaaataaatcttaaactaggatttaatccgtggtacaccacgggacaaatattttttatatatatatatataataatatgaattttacggttttagtttagtattaaagttatataattttatattaatattgtaactaaaaaaattggtgatgataaaataataaaataaatatttaacatgtgttatatcaatccaaacccgtcctgctattcatatcaatctaaatccgtcccgctatattttttgtctcatgattttttaattttttataagtttaaatattagttgttgaattagttatgattgtgattttataccgaaaaagttatggacttttaatttcatggaatattcaaaccaagataaggaatgtttttaggtgcacatataattgggtttgctcattttacgggattgtaaatgtattttggtttgtttcacaatgtttgttttaattgattgccgatatttaatagaaataatttaaatagttcaaattttggttgttttaagatttagtgaatattgtaggtgagataaggagaagataatttatcgtgttttgcgtgacatatgggattaccatatatttcgaatatttttggtttgttacacaattaattgccttaaaaaaatacaaactattaattaaaaaaaattaaataattaaaatccagtgacaaccattgtaaataaatcccaactccatgatttatttcacaaaatggatgcaaaaatgtatatatagatttagaaataaaaaaatggatcaaataaaaaactcaaaattttatgataaaaaaaactaaaagatcaaccaatattaagaaaatatatttagtaataatactatactataatatatagctatgatagtttagtttaattaacggcactgtattttaactattattgatttggcccataattaaaatacttattgggctagaggcaggaattacagttggggctaagcccattaatactagtgggtttaatttggccctttaacttaaatactgtgatccataaactgatatatggttaaactgtacgacgatacagatgatttaggtctctcttcttcttcttctttttcttcttgagcgccggcgaaaaaagtctctgtgagaaaaagatacgacgattgtcattagaagagtcgtattacatgttttgtgcttgaatctaattcaacaggctttatgtaagagattctttaacaattcctataatctttgttgttggattagattcacgcacaaactcgtaatctgtcttttcgatttttaccagatctgtcttcgatttcgaatcgatctcttttgattttggtgattttaagatttagatgttgctttaatttgggaatcgtaaacaagatctacatgtctacttttggaatcattcccttgcgttgatgatttctatcgttttctatttccaaatttggtattacctatgtttggtatgaatctcgattcgagagcccgacaaaaagttatcactctgtttatttatgcatattaaagttttcaagcactcatttcctaattgtcttgcttaattatgctttcttaagactttcaaagactttacttgagttactggatttgattgatgcaaacgacttgtccttaatccatttatgtctgtgtattaatgtctggaatcatatgacagttgttgttattgctttagcattttcttacgatccactggtaaagagaatctctttctcatagtcctgttctacgttctttgttggtttgtttgtccgagaaagcagatcaaaatcttttgtaaaaatattgtgaccaaattaaacttaaacatctttaagtcactctgattgtggggtgtgtctactattaacatttactaggtcaagatatttacttgtataattcaaagattttatatctgatttcaattaattttcttataacaaataccaaggaactcttacttattcagccaggtggtttgggaatactcaatggtagatcagaattttttcatgtctttatggatttactacactacatgaacaataatgttactagcgagaaacgtaagtttttcttgtaacaaaagtataaccaaatatatgaacaagtaaatagttcgttaataatagcattaataaacataaattcatattttagtgtggcacaatctgtagttaattaagagtcttaaaattaccctgccaataaaacggtcaaattacaatagaataaagtggtaattaagaaaaacaaagtacgtagcatcgaatcttcctctctctggctaaactaattcaaagtttcaactagagaggaattaatacgtacaaagtaatgtattaatttggttttaaaaaaataagagtgctgtgtagctttaaaagattttaaagccaaaactaataggtgactttaaaaaaaaataaaaaacaaagagtaaaaaaaaaaagagtgctgtgaaagctttaaaagattttaaaggcaaaaaaatcttgattggcaaaaaaaaactttgaagacttttaaaatctttctaaagtcttaaatgcttctgtcaatcacccccgaaatcgttaaaatatatgttatttagtttaggaaggtagaatatcagaccaaatatattttgtttggtatttttttatagtcaaataaaaaaactccaaatgtttaaacttatttttgttaaaaaattacatttaaattatatatatggaaatatttaatgtgaaatatttaaatatttataagatgatatcataccacatatgtacatatggatcagtgaatgcaaggtaaacacgctcgctctgtgaacagtttaatatataaacacctaattacatttacttagatgtgaattataaaaaatcaattctatacgatgaagagggtagcatcttacaattacaaaattgtgtgtatggtcgtaatgacgttgtttgtgtacggatattcagccgcagccgaacaaatagcttacaccataactgttgatcttaacggtggcggaaattttacgaccgtccaaagtgcaatcgattcaatctctcctcccaaccataattggattcgtgtcttcacacaaaatggaatttaccggtactagctactacgatatgatcttttgtaacatatatatatttcatgtatatattacttcacttgtcacttttgaaatttcgagtaacatacagtataacgaaaagttttatttaaatatgtaaatgatcattaatgaaaatgtagggagaaagtaacgataccaaaagaaaaaggattcatatatttgcaaggtaaaggaattgaacaaacggtaattgagtacgatgatcatcaagccaccgatatcagcgcaacgttcactgcttttgctgatgatatcgtcatctccggtataactttcaaggtatatatatatatctatttgtatgaagatatgtgtcttgattttcaaagaaaaagtaaataactaaaagatttgagtaatgagtcttaattaataaatttacatcacttggaatggagagtagaacacgtacaatattgtgccaaataacaaacgggagattgtaccggcggtggcggcgaggatgcttggagatagatatgtggtgaccgattctagtttcgtcggacttcaagatactttatttgacggaaaaggcagacattattacaagcgatgtataatttctggcgggatcgatttcatatttggttatggtcaatcactattcaaggtatatatgttacgaaatttatgttaattttctatcacaagaattgaccattatataatattttatgtgtcatattgatcaaaggaatgtacattgaatatgacgctggggatatatgcaccggataacccgtatggaacgataactgcgcatcaaaggccgtcaccgtcagatgagggaggatttgtgttcagtgactgtaccgttacgggagtcgggaaaacgttgttgggacgagcatggggatcaaacgcacgtgtcatcttcgaccgttcacgattatccgacgtcgttcttcctattggttgggatgcttggcgtgcaaaaggcaacgagtatgcgtgatcgatcatttacgtactgcattaattatactttgaactaaacaagttctgtttaaaccttgtcgtgtggtgatgtaggagagacttaacgtttgtggaggctggttgcaccggagctggagcggacacgtcacagagagtgccgtggcttaagaagctgagtctaagtgaagttgatggattcgccagcgtttccttcattgaccaagatggttggatctctaggttccccattgagggtgggccttaacaattctatttgacaaagtttgatattgggctagaagccccattaagtaaaccttttattatattggagaagtaagaaaacccattaagtagacctctttattacattgggctataaggcccattaatctcattagtttgagcaaatactgtaaatataggccccttttgttcttctcaaagtacaccataagtaaaaaaaaaaaaaacatgcgtatatgaatcgaaaaaccttaattttctgatttacaaaaattccgaccaaatctctgtttccctctctttatctcctttgttgcgtactgattctctaagccgtgacggtgtgccagtgtctgtccttgtcttattatcactgccgcagttcctattcgtgcccgccaactgttcgtcaaattgcctgaaccaattcttccgacaatcctaaaagtttggattttggtgattctaaaaactagggttttattcaaattactcaagaatggctactactgcgaatggaaactctaagaaaagagatggtggtctatcgtcgcttgcccctcgcaaaatcaacgtgcagaaattctcagaggctcgagcaccagagctcgaatctcttcactccattgtgtctgagcgtttgaacaaggactttcgatcaaagaggaataagaggagaaggaccaattcttacaataatcaacctgcgaagaagcgtaatataaagaggcaaaaatcacagtcattgattggtcaagtatcaggaggagaccatgaagtaaagatcactagacgagttaagagaagaatggaacttaaagggaaccctgaaactgggttttgtacttctggtgatggaactaagaggctgagaacacatgtttggcacgctaaacgattcactatgactaagctttggggttttcaccttcctcttggtttacacggaaggtaaatttcaaatttgcagtgtttttgattctgataggttacaaaaaagttaagagtcttttgaaatcttaaggttgtttttgtcatggttctagaggaaggggatctagggatgtcttgaagcagtctcggcaaggtgttcttgttcatgatgcaagctatcacattgctgtgcaattggagggtccagaggcaggcattcacacttattcttgatatccttctataagtttttttcaacttggttgtgtgttcatattttcttcatgtcttttggctttgaatttctcagggctcactcttatcgatattaaatatgctactagagccttctccgtcatctcattcgaaggaagttttcgactctattctcactggcggtagttatgaaaacgccatggtatagtgaatttatgaattcatttaataggaatcaagacgataactttagaatgatgtaaccgcaagttgtttgttttcttcagctttatcatgtcgaaccaccagtttctcaggcgattgctcctgttacttatatgtggagaccttctaagataccaaagagaagaaatgaggagaaagggggtgacggcataggaactgatctcccagtctcagataaagatcatgaagactttcgtaaactttgggtgtggatccatgcttcttccttcagtgaaggatatgctattcttaaagtagcttgtcagaaacaggtagctatttgttgtcttttgaggttatttttgtgacgtttgttgttagctatatgctttacatattcttgtggagataatgacacctcaagttccttcattcagatgaatgagacaggtgtctcagttgattgcttttcactcgagggtcagcttgcaaaacttgagatttttggttcaaaagcatctcatcttctccagaagaccttacatcctgctacaaggtgagccatctgagtaaatatagaatgattttcaagaacgcaaatgaacaaaggaaaatttatctcaggttttttttttttttttggtctttgcagtacctctgagaatccctctattctaagaaagtgttcaatggaaaaagctgaggttaaaaacgttgctgatctttacacagaagagaacgtatcatctggcgctattttagcacagtttgtcatagatccgcggttgatcctgactagcccacatgatgataggacagtgtcagttgaaacgatcaaaactgagcctactgagtccgttgaaacaacaaccaacactgaggctgaaacttttcctgaagttttcaactgcttgtgggatgcaaatagtgagctgacccctcccgaagaagagaacatgttgtgttgggaaaagcatcaaagtcgtatggattctctttgcctcgatgacccagctgctgaggttccaaaggtatctagtaggccaaggagttcaaggtcctgtcctttactgcttcttaaacataaaaaacttgggaatgcgcctactgggtaatatgtactttgattgaatcgttctgtgacgttctttagattaatgatccaaaagtaatcattgttattttctttcagatggtctcttattcttccccttagttggatcaaagtcttctggaatgccttcgtctcaaaaggagctcatgcaataggtcagagggagaaacgctgggtttcatgtgatgtatattttcgctctcctaaactttattctctgaatgttaagattctcttgctatgtaaacttgttaaatcttatatttgaaaactgtctgaaacttgtcattttctttatttgcaggatggtttaccctttttcccatcagattttcccgactgtaaagcgtattcatcttttacactgagcgaggctgcagacttggaagaaaaggcacaacgtcgccctccagccataagacctttcagaattcccattccacctccatggaatagtatccatgtcacccgttctattggagagggttccaatcaaaagttttcaagcaatgggaggagtgttgtggaaatttccagttatggtggtaatctgtttgatggtatcgtggcaagaacatcagattcgctaactacttttctccaaacattcacaagtgacaacatgcttttatttcctcacaacacttcaaaaccaagcacagaccttatgatgacgcttcaagaagatgataaaaaagtaagagctcagatccatcagagtagtaacaaactgtgcctcgtcagagttcttctacatgctttcaaggaaggttctttcgaagaaggcgcggttgtatgtgcaccaactcttgcagacatatcattgctaaaatccaggtaacatctccaagaatccatgttcaacaaattgtgatccattggaactatttcattttggtatcacattcttatacattatgttttacagctgcagtgaaggagaagatgggcgtgtcacaatcccacaatcttctgtaagttcttactttcaagaacaaccttgtggaacctgggaactaaatgttcctgaagacactcttacagagcaatctcatagatggccaatcgggtttgtaacaacaggatttgtacgtgggaggtaaaaactaaaaaaaaccactaaatattgagtacaggtcgccagaggctgatttggtttctgagctcttaaacctgtctttattgtgtgtagtaaaaagccggcggccgaagctttctgtgatgcggtgttgttagggagactaagagatgagcaatggagagacaaagatgtaagacggaggaagaagcagatttatgttttagttagaaacctaagatcttctgcttttagactcgcacttgctacgattgtcttggagcaacaagactattgtgatgtccactgcttttaaaatgcattttttaaaattcaaattgttttttttttgtatcaattatttatctattttacttcatacaataaaaaatatagaaagtttagtgggaatttggaaaatttatcaccaacttatctgttttttttttttgggacaaaaaagtcaatgcttatggaatgtaaaaaaaaaaaaagtgctaaaaaattaattatattgtgtttagaaaagactagagaatgaaagatgagaatgattttgttatggtatcgaagtagaagaagaagaagagagaatgcatgagaatgaattatgatttctcagaagtcagaatgagtgatatgttggagattcaagtttttatttataagcattagggtttcttcaaagaaaaggaaactaagcgttgaagaaaaaaggaaacaatcgggggtggacaaaaaataaagaaaatctgacaacgttcgagagatctggaccgtttattttcatcacgtagcaactgtgagatatcggacggtgataaactaatctaaacggtaagtttgttagattatgtgggaccgggacgatctatcttattatacacctctctgttacaaacgaaagaagagatgaagatgatggttctgaatctgaaccaaactgtttctaaatggagatgatgatgttaaaatggaacaagcagagcagaagtgattgatgatctaacagacattgacatcaggctaccaatgcctagtctttctgtgggagatagaagcggcctggttatgagaatgctggagccaatcgattgctttggttaggaccagagcaatcatgtcattcctcctctatcttgattctgaccactacataatctacaactccatggctctgaggtttgaaccaaatgatcgttatgcaaaccacaacactttcttctttgatgcatgttagtatgaactagtctgtaagtcttgtctctgcagggaagagccactatattggtgggaaggaagctatatatagggtgtatttggcggtaatgtctcctgttgcagagcccacccttgtttagagccattatattggtgggaaggaagctacttttctttgaacaaatctccaaaaatttcagacaaagataaagccggaaacaagaaagttgttgcagataaaatctaacaaaagaaagaaagaacaatatagaaacgtaactcttcttctccttgtaatttgctcacaacaaaacctcttcttcttcacagccacttaaagtggctttccacttgtcttgatatcatttctgattgctccttgaatcatcttaacgatcaaattctgaaaggactttcacttgtttaccaaattcgaacaagactataaatcaaactgtctctctttcttacctgataagggggatgagttaccgcaacttgcagaatcctacaagccagtagaaaaatgaaactgattcttgctacaatgaaccaaacatacattggtattacaatcattttctaatacaagaaactttaattggtaaaataattaaaatcgccaatatctgagaacggtgtcgtttaaatagttaaccgaaccacatcgaagtttataaatccggtacgggaaacgcctaggactataactctttctctccctctaccggcgccggagaaattcccgatcaacacaatctcgagacaactgagacgagttcaaattatcgactcaaataggattctagatggagagacgcgccccaaacgcattccctggtgctccaccaccagttccctactatcataacaactacaacaaccctcctcatcatcagattcatccgccgccgccgccgcaccaccatatcgctgccgttggattccacaaatacccccaaaacgacaacagggatcagcgtttcaatcaaccgcattactccggccaacagcagaacatgatcgttgatcagagtaataacgctcctccgccgtttccgccgagtccttgcggtggcagcagcttaaggaagagacggtctcaatcagctacaggttatctccaattttgaatttttctgctacgtatccacaaaaggtgtagactttgtctttaactccctttggtactttcgtttgtatacatgaagataatgctgatggtagtattgccaagttatatgttgcgcccatctcaaagacagctactgaatatgatgtgagtttcttggttcagtctttatggtttttatgacatgtttccttgatgagtttctgtgtgacttgtgacaatctgtgttatacatcagatccgtcaggtctttgaaaaatatggtaatgtcactgagatcattctacccaaagataagatgaccggtgaaagggcaggtgattttctcttgatattcttgcttctggggtttagcagtttgcttataacatattaatgtatctttgcagcttactgttttattaagtacaaaaaggtagaagagggtaatgcggctattgcagctttaactgaacagtttacctttcctggggtgggttcttaacttccacaatgtttttgtttaaatatttcctctctgatattggattcttttataaagtttatttcgttatgttcaggaaatgcttccagtcaaggtccgatttgctgaagctgaacgagaacggattggtaagtgtaggtgtctatacttatagagacagaaatttagatagaacctaaaactctgaagataacatggtagtgtaataggggaacctttgaaacagaattgtgtcttaccttagttagtatttgatttaaatgccttgaactgtttctccttctcccccttttctaagcgcataagaccaagtttctcatttgtgtattctcttttcatctggactttaggttttgccccagtgcaacttcctgataaccctaaactatatgttagatgcctcaacaaacaaactacaaaaatggaagtcaatgaggtattggcatgactccttttcggctttaactttcagttattctgaatttttttgtcactgccaattgacagaacagtgtgcagattgtcttttacctccatttatagttaaatttcttactttattgtgaataaattctcaaagtgtgctcttctcaggtcttctctaggtacggaatcattgaagatatttatatggcacttgacgacatgaagatttgtcgtggtatgtccgttgcccctgcatattgtggtgtttgactctgaatcatacttgtttcagatatcctagttagtttctcctctagtagattacggatacttcatattgcttagtaacttaatgtaaaacttccatatagacctaacaaaagaatgcctcaacatagtaaactgttatgacagccttacattgcctaaaagtgatatttttgatagcatgaaacctgattagagctgcttatatctaaattctttgctctctgcagggtatgcatttgttcagttttcttgtaaagagatggcactagcggcaatcaaagctttaaatggactctttaccatacgggtagttgagatagttttttgttgtatcccaatggctcaatgtatctttggcgtccactattccatgacttactgtatttctgtcttccttacagggttctgatcagcctctgattgttagatttgctgatcctaaaaaaccccgtctaggggaacaaaggttttacagttttctattcctttatttgtttgaggatttgccgaattttcttttctattcaactcaattctcttagttcttacactttaataatcttaccccatcacttatatctggatggttttgtgtctttaggtctacctttaacactccacctgcaatgcaacacttcgacccaaattggcattcacaaccatatccccagtgggaaaacaaggaacctgcaccccctagagtcgttcagcatcatgatttctcttcacagccaaatcacttcccgcaccaaaatactcaagcagtatccgaggttcataaaccactgcatcaagatattccacctgctaattttgagaagcatcagaaatctgagactgccagcgtggaggtactccttttgtaggatctgctaatggtagatggatcttgaactacgaactaagagtttatttagacggtttaggtctcacaaatcttgtatatacatgtgcttgatcttatatctgtagactagaagtgatggtcagaagatttctagtcattcaaatgcattccatgaagatcaaaatacagtgagctcagagtgtgactggagtgaacacacttgtcccaatgggaataaatattacttccattgcatcacttgcgaaagcacggtaaaagtttccctctttcaatgtgtactcctctgaagcaatatctacttttactgaatttatggatgaacacacagtgggagaaaccggacgaatactccatgtatgaaagatggttgaaagagcaaacaaggctacaggatgaaaaaattaaatctcccccgttaaacaatgagagccaagaagcaatcgaaaacagcgagcaagttgagtctgatgtattacaacagaatggtgaactccaacaaccatccttatccacagcggttagagaaaatttcaataatgacacacttggagttccatttttgtagatagtctcttacaagaagagtaaattccaaacttttctgtgatgtgtgtttcaggatcaggagaacaatgtagtagtatatccagtaacaacactagctgttgaaacaacatgttcataaaaggtttcttcaggtaatgaagtgttgattctgtttattagaattcagtgattcagcagatgctaatttggtttctgagctcttaaaaattgtcttaatctgcagtaaaaaaatctactgaggaagctttgtgtgatgagcaatggagagatgaaagctgtaaaacggagaaagaagcagattttacgttttggttagaaacttttagaattggaaaggaaaaaataatcgaaaaattattttgataaacggtaaataaacctattttcacctgatccaaaccaaacacttcacggtatcaaaattaatctctactataatcccatttcaaattcaattttgttatttacataaatccaaaattttcgggaaaattaatttccatcaataatgtttagtgaaaagtaattactgaaaattatactccatttaaaaaaaaaaactcgagtgcctctctgtgagtgagagagttacatcgtcagtcatcttcttccatttaaagacgaaatagattcgcagaacaaagaaatcaaatcactcacttgcaaggaagaagaagaagaagaccaaagaggttagtctttgcttgattttagtttccagaattcgattttgagtctttgtgcttgaacaactctggattgatctatgttgtgtttttcttttcgaatctcgtcaaatcttactttgttcgtcccatgtctagatcagtgaaagatatatctctcgatctcgaattccatatagatttgatattctgcagaagctaaatgcttttgttttgccgaatctgatgcttttgtgtttgattcgtaattgattttgattggtcttcttaactgttcattgtcttcagagtaagtaatggcgaagatcaaacctcaagcattgttgcagcaaagcaagaagaagaaaggaccgtctcggataagcataaccaacatcgtcatttacactttggctgtgcttttgcttgtctttgttctcttctctgcttacagacgttggactcacaggttcctcactttctctttatcaaattgtgattttttcttttatcccaatgtttagcatctgttagttttttggttgtgaatatttcttcagatctgagatcccaacgcacaatggtagatcagttcttgaggtaatgcctctctatgcgccttattactgctttagcttctcagctttggtttgatgggaatatatatgattgtcctgtgtaggatgcagccttccctggaatgaagaatgttgatcttccgcggtttgctgtgagttttaatctcacatatgtttttttttcagtttggtgttttcttttctttgtttcctagactttagctttctctcttgatcgctagaccttagatacgggcaaaggttcagtgaccattgaactcttcaaggatactgctcccaatgtggttgaccagttcatgaaattctggtaagcaaatctttttctggtccacaacatgtttgcctttttttacttaattcttgcctaaactctgtcttgtgcagtcaagatgggtatttcaaaggtttcttattcagtcgagttgtaaagcattttgtgattcaagccggtgactctgcggagttcgatgctgtcaaagattgggcactcgacagaaagaacattgataccaggttggtacacacatgaattgataggaaggaaatgtgtaaaaaagaagctcggattaagctgattatggaaactctttctgtatctgtcttgatcagtttgaaacatgaagaattcatggtgggaactcctaaagctaaaaacgagcaaggaggattcgagttcttcattgtgtctgctcagatcaaagatctgaacgagaaattgactgtctttggtcgagtttctaaaggacaagacgttgttcaggagatcgaagaggttgagacagatgatcagtatcaaccaaagtcgccaatagagatcatgtccgtcactttgcttcaagacatgtaaaagcttttttacttcttgtctctctctcttgtatgaaactcaagtgatttttcttgtgaatttgaaaccctttttatcatctattttccatatcatgtctcatacgaagaattagatcctaacaagaaatggaaaatttatatattcaaaggctgaaacgggaaaggataaaacaaattatacaacattcattacattgttgtgcaaaacacttccactatcatcatgcaaaacgtggctcactcaattatcccaaccagatcttctcttcctctctctaggccgattctcagaactgcaacagtaagagaaacaggtcaatactgttactatatatgttacaacttaaacaaaatagtgaagctaaaaggaatcaaacctctgtgagtgattctggctggagttgtgtgatgaggcgttttgagtaggtgctactgggggagcttgactctgagttctacccatgtctccaccaatagtaccacctgagacaaagcccattagggatggtctcttgtttggataagcttggttttgtggatttgatggcgttgcagcgacaaaactattcttgaattgggccattactccagttctcactgaattgattgccccacttctacttggtgcagctttagaagaaggtgtcctactagattccgagctaaatccaataccaagaccaaaatcaactccacgtactcctttgtttccaccacctcctcctcggcctttcttacctccttttctcccgtcacgcttggacttgaatcgtccatcctattgatttacaaaggtaaaatttgaggagttagtagaatgaacaatctggaagatacaagaaagaaggagttgtaattaccttcatggcaagatctgtgagttctggaggcacattttgaccagcagcaaccagactgtttaccaattcaccagcaaatctagcctctctctgcgtaacaagtgtgtaggcaaccccatctctgtcaccggcacggcctgttctaccaatacgatgtacatgcatgtccatatcttttgcgatgtcatagttaaccactgtcttaagcgatttgatgtcaagacctcgggcagcaacatcagtggcaatcagcacatggtgaactccagatttgaacttctgcagagtttccattcgtgatgcttggtctttatcaccgtgaagagcagcaactttgaaggaatttagagtaagttgagcttcaatctcatcaacagtggcctttttagatgcaaacactaatacgtcaccctcatcaatcattccagggagcttttcaagtagccagggaagtttttcagcatcagaaggtatgacattgacaacctgcgtaatatcttcattggccatccccacttcaccaactgtgactctaataggatctgaaaggatttccctagctaacttttcaactttccaaggcatagtggctgaaaatagtaaagtctggcgatcaggacgaatctggccaacaatagaccttacttgtggctcaaagccaaggtcaaacatccgatctgcctcatcaagaaccaaataactggctctcatcattgtcaaagccttcatcttcagcatgtctatcaaccttccaggagtagcaacaactatttcgcatcctgccttgagttccttaaactgttcatgtttagacattccaccatacacagcagagactcgtaagccatatgctttcgaaaatttcttggcttccaagaagatttgatgagccaattctctggttggagcacatatgacaccaattggaccttcatctctctgaagttcaggctgatccataatatgaacaatcattggaagaacaaacgctgcagtcttacctgaaccagttttggctatgccaataacatctcgaccagacaacacaataggtaaagcctgacattggattgctgtaggtttttcataagcttgctttttgatagcactcataatctgtgaggaaaatccacaatcctcaaaggtcttaactggcctatgaacatcaaaacccgagacccgaatccctaatctctgacggtaatccgtggtttcttgctcagtcattcctggattaagaaatttaaacactttagatgcaacacctaacaactatatattaaagcaagttaatttaacgaatagagaaacttgcctgatattgattctagctcctcgtaaaagtccttattaataggttcataatcgatggagctatgatccagagctgtaataggctcaatcttccttttatccacaacaatcggattatcatcggaatcataatctagcatccctgcatcgaccgccttagctgcagcatacacctcctcgtcggagttataaccggcgttaagtgcatcggcggctagtgtcaggcccaaatccttcttggccttgaggtaactctcaacaggatcgtcatcgtcgtccttgtacctctctagtttctcctttggcttaggaggtggagcagatttcatctcctggtgaattccctccataaaagcatctaatggatcgatctcatcaacctcgccaccgctagccgcagcagaaccgccttcctcaatatcttcctcagcttcttcgttttccatgtaatcaatgttatcaagatcggcatcttcggagttgtctccgccgcgagacgagggagggacgtagagacgttgcggtgcttgagatcgctcgaaactgtagctagtttgccgattaatgccgaatccttccattccgaatttgcgattagacattcttcacttcgaatttcgcttctcagctagagcttttagcaaagagcttaactgttgccaattacgacgaaatttagggcttcgtgttttttcccggtggtatgtaaaatcggagaggaaggaaacaatctcaagtaaaattattttcccggttcaccgacttgtcatcgtctatacatttgggcctctagtgggcctttgtttagcattttttttttttttttctaagggtcaatttttgtaaaaccacccaattagtggattagtgttttttctttgtaacatttatggattataacatgtaataattagatcagataagataatttttatgcattattaatggttttactagtaagaataattatagggtttaattttgggttttgagcaaaaatgagcgcacctttttaaaacctctcatgtaatttagcttttccaaaattttgacacatttaaaaccagtcaatatatatagttaataattgtgttgtgtaccttttaaattcttaatcatcaccagttaattaaaaaaacttttgttaagaaaatggagccatacaaagcaattatcctcatcggagttactgtttgttgttatacattctccggcgtatccaacgtccacgccaccggccgttcagtagaagagacatcccaagtccctgcttcctcacctgacccttcgctcatcgaaccacccgtatcatcaatctcggtcgtcccagcctccgcaccatcccccacctctgaagacattaacaccggatctaatttagctcccacggcggcagtctccgcacccggaccatcccaagaagacatagacatcaacttcgactctgtcacaaacatagctgatctagctcctaaatttgaacatataaacaaattcgatttctcgtcaatgaaaatcgacacgacggcgaaagatctctgcaaaaacacagactacaacaacgaatgcatcgccgcgattctcccggatctacagaaacaagcagaaggagaaggaggagacggaggaattgctcctaaggatgtgatgcgaatggaagctgaatctctgttaaaaaaagcgaacgcgactttggattacgcgaaacgtgtggtggaagataggaaaacgccgatgccggtgaaagaggcgatgagtgtttgcgtcgagaattacgattcgttgatctcaggtcttgaagatgcgaagatggccatggaggagggagattacgggagattggattcggtattgagtgcagccatctccgatgtgtcgacttgttctgataatttcgtggatattcctgatgttgattcgccgacggcgtctcttgatgatcttatgaagaagctttgtagcaacgttttggccatgtctcaaaaggtccagaaccgttagatccacttatcatatgaacttttcaaaaaaatgtttcgaagtttgaaatttatattatgttatgtatatatacatccatttttttatcaacttatatacatcagtccttttgccactttagctaaagttagccaattaagcggtaagaaatcactgataaattcttaacatgaattagataccaaattttaactaatttgttggattaatcataagctttcacataataaacatcatttgaaagatttaaatacagttgattttgggaaaaatgtcacaaaaatcttcaacttattgaaaacgttgatttaaatcttcgatgaaacaaaataaatatgaaacttatatcgattttccaaataaatactaaactttcgttgattatctaaataaatactataacctcgcaatattaggcatatagttaagtgggataacatatcctattattaaaaagattaattttttgttaatatatttgttaattaaaaatgacaacgttcactataacaataaaacaccgtcgttttgtcataacggctcaattaaattcatttataatattaataaaaatagtaagttcaattaatttttctttgattttgttatgcatcttcttaataacatcagaactaatcagaacatcggcgtcacgtgagaagaaaaaccacacgtgtctttttgtgacatgacagaaaggggcatgggctaacatacactgatgtgcatcttcttaacatgcgctgcatcggcatgtctaaacaaaaccaacgcagcagaagaaaaaaaaagaaacaaacgagagagatagatgagagtagagaagagggattagcaaaaaccgataaaaaaggaaagcgagtttatgctctgagtcggctcaccgattctagctgtcgaagaagagcgataaaaaagggttctttgagcttcttttttttttggtatatttttttttgtgtgtgggttgttggtgtcgaaatagcaaaaaatggtgaaggaggagataataagtctctcacctctttactacttgtcttcttacgctttcttcttcttaattctttttattcccaattcttcccctaaccctaattcttccttgcttcaattctccctttttcccaacgattcttcttatcatcatcgtcgtcgtcgtcttctcgattctctcaattcgtctttgctgagcaatcaaggtattcttcgtggcttctctcttgacttggttttggttatgtcctgttgatgatcgtattgtttaaagtttgtatttttctgtgttggtttaatcttcgattcgatcgttttagtgttggtttcaattcgtatagagttgtggatccgctatctctaggaaagtttagtgcttgtttgtatgttcaattgattgatctgagattctgatgatgcactcgttggatttcaaattgacaatctctgtttgcttaattggtgtaatgattctacatgttttgtttctcagtattggagattggggagttctcagttcatcagttaagtaatctgttaagagcgaagagcgtttctatgcctatatatgctctacaatggaagataatggtgtagcttattgtgatggtatgacgaatactgtcaggaagaaacgtagcctcacttgtcgtcgtcctcgccctgagggatccagtgttttaacatcttcagatcgtttcagcaagatctcgagtgatgatatacctgcttttgatactaaccctagaaggaaagagtttagtcttagccattgtatatcgagggctgaatctatagcagaatctgaaagaggaaacaatgattttaggcggagagagattatcaatagaaataagcgttcgactgaaggtgttcttgcacctgccagctcgaaataccctagccgggaagttgaaggtaacggcatgatcaatggaaagggaactgattcgggtgaattagagggagaaacaaagagaatgaagcttaagattggtggtgtgagccggctagttcatgctaatggttcatctagaaagtcttcaaaaccagtgactgatactattcgctccaaccatgatttacaggtgaattgtcttaatgtggatatattgacaatgcttaagttgttgaattgtatcgcatccgataagatttatagtactttgtatcatcctattgcattgagtatctttttcggtaaatgctacgctcttttcgggccttacggcccataatctccccgcggttggagaccagagttaggtataattagtctatgatccaaggcttgggctcaaattagtaaatgtttactgtttatggacaggaatctgaaaatgttttcttatgcatttcgcgttggtgctccagtggagaggatttaatcgtgtcttaatttctgtgatgaagagctttcttgacagtttagattctgtcaactttgatatcttcttacattaaattttatttaattgcaggaaagttcagaagattgtaattcccctctagataagaaggctgatcttgaaggagttacttgggatgctgagatagacggatctatgacagggaggagaaaacaagaggaaccatctggcttggttcgcaagagcaaacgagccccaaagaaacgagttttcgatagcgatgacgacagcgatgatgagatccggtatttggaaaagttgaaatataagagagtctctgtgtgtaatgaggatactgagtctggaaggaagcagttgacgccatctgggattacaaatggagaaaattccggcaagaagaaagctgtgtccgaacaggcgtccgaagacatggattgtgcggaggaaattgaaacggcgtctgatgaaaaagagattggtaatgataataagagggaatcaaccatgactagtcgtcagcgagcccttgcttctggcagatccagcgcgattgatttttcagatggattacctcctacatctagaagtaagattttaatcctttgctactgccacataaatctttagcaattaggggtcataatgtattgtggtaacttgtgttgacaaatagggaaaaaggagactctttcagaaatggagcagcaattgaagaaggcagaagctgctcaaaggcgaaaagttcagattgagaaagctgcaagggagtctgaggttggtgtgtttttctttttctttctccattgtgctatacgcattaacaaattggctgatcacgagaggatgatcttggttttgttttcaaaggaaggggccattaaaaaaattctaggtcaagattcgagcaggaagaagcgtggagacaaaataaaaaaacgacttgatgatttggctcaggtattgggatttaagcacacgataaaccacctattgctaatgtattctttcttagtcaaaatgagatgctgataaaaagtgacatgcgtttgcaggagaaggctgcacaagaggagagagcctcaacgtgctgcatcagaacaataatgggtcctaatggaaccactgtttcatttcccattgacaaagtgcctagcctgttcgatcccaaaccatcagggtatgctatactcttttccttctctctcaatctctgtttgtggaatcagaccaattcataattcaatgtcccttaatctcgtagctgattgggtctggttaatgtgaacaatccttaatcctacacttgctatgttattgagccagtataaatagtagagaatgcttcaactgttttggatgtggtaaaatttaaggaatgctctaggattcagtttctacccattattcttttggtctgttggtggtgttctacattcaaaaagtctaaaggaattttacgatttgaaatcttatgataacaatgtcaagtactatctttatctgcagttatcctcctccgcgggaaaattgtgtgggtccatcgtgcaccaatccttacaagtatcgtgactcgaagactaaagttcctctatgcagtctcaaatgctacaaagcggttcaggggcaacagattgcacctccttaagagatattgatatgatttttttgatggaaatgagaagaagaacttagcttccttacctgattttattgatggtacagaactacagaaaacaattgtttagtactttgcttttagacttgtctgatcattttgactagatattgtttttctccccttttcctttgtgacgagatcgtggccgtccattggctttttcaccaaaccatcacatcatagccgttcttatatacaaatcttcaacggctatctctcctagatttaaataataaaagggatacatttgttttctaagacatgatacgaaatgctctattattggaagcaagcaagtgcatcatcatggattaccaccagtacgtcgtcgtttctgagctgtgtgtttgcgtctctccacttatgatttcttaacattatcgttccttctccataattgtttttgcagttgacaatttgtattagggacaaatgaaacttaaattacttggaaagaataaaggcaatgatttctcatcactcttctatctgttttaataatcaagtaaccttgttatgcgtgtgttgtttaatactataatttcctctaacaaaatgtatttaattctgtttacatgaatgattctttttcatcaaacctaacttgaaactatagacatggcacccactccttcatctttccttcaaacataaaccttcattttctcttataataaaacatataaataactttcttttatgtttcttaacttcacaacaattcctccaccttagattaagatgagtttcgccggcggaaagtggcggaaagaggcggagcagctggtggttaagcctttccggctggtgacaacaactctcctcagccttctccttcctctctctttcctcctccttagtcgtctctcttcagcttctttcctcttctccttaaccaaatctcagccgcaaacagagtcatcattcttcgtcttctctctgtttcttcgcgcgaatccggcgatcgtatacgctgtcgtttcgtcaataagcgtttacactctagttcttggcttaaccacaaagatcacagctacagatccaaagcattcgattgccttttatccacatgtcagcatcgcgtggcttacactcttccttgttcaaatctccgtcggtataggcctcgaaacaacgatctccaacggtttaatcatcggaagcgaacgcaatttcttgagcaggcttgtgtttttctttggtcttcatgaggtgatgcttctgtggtatcgagtgatcgtgagaccggtggtggataacacgttgttaggaggagaagacggtcaacgaagagaagagacggtggtggagagggtggctttggccgttagctgtgggaccttgtggtggtggaagcttcgagatgaagtagaggctttggttggtgtggcagaggctaaaagagcattgttgttgttattaccaattgatggtaatgtcaacgttagttttgatgtgggaacagttgattttgtgaattggtggctatattatatggttgtgacgattggtatggttaggatcattaaagggtctttgtggtttgggatgattttgcttttcgaacaaggtagtagaagaagaaatccacgtggaattcctactgcttcttctactcttcattttgatgatcaaggtgacaataaagtgtaagtaacagaacagttgtcaaattcaaattatttgaaagttttatgcaaaattttgtatcaaacgtatagtctatgcgttaaaagatctctagcaaaattgacgattccaatttatatacaaattcataatttattttagtctatgacaaatttggttgaagttcttacaccaaaacgaagttcaaattccaaggctttaaaaatcgttgtatgtcataataaatgaaaaatcagactatttgtaattagaatgatgttcagatcttataatgaatgattatctaatagattaaaagagatttgacaaagacaagctctacatcagatttgagtagaatcataaagaatgtattactaccagaacttaaaaagagattactactactacaaataaagagtctaaaacacagcttccacaagtatgtgtctcttcttagacccaaacccaacaatgtgattaagataaactcttccttctttaacagtagccgacgagactaaccgatgaaccataccgctgctgaaccaacccgtcacagaagccgtccgccacccgtctgaactctctaccagtttcgaagacgggctacctgaaaacactcacaaatagtctacagtcattggtagaactttaaaaatcaaaactgtactaaagaataactaccattacctgcaacaacaatcttggttggagacaagaactcaagcccatcaccaaacctcaaagacccaccagaaacgtcaataacagtgactttactactaacatccccattggttacatcgattttgtataagaaaccggagaaagtgtggatgacgataaggaacccctccgggtgataaacaatgccgttaagagagacaaagttattataccaaccaggtgtagtgaagagagggcttctaatggtgtacactagctttccattgacatcaacaacccatattttacctccttttgcatcagatacataagcatttccttgtgtatcaacagctacatcgtctgcgtatgttatctctttacctacattgcttaaatcatttgtttgcttaaccaacaaatgattagagagacataagcagagaaactacagagagcttactatggctgctaagcactgtgaggaagagacgacgccacgtggacaaatcataggccactaaagcactataacgatttccaagcaaatcgccgacagcgaggaggagacggtttcggtggcggtcgatgacaaatccgttggaagagttaccggcgaggtcaacgtctttgaccaaagtgacttccttaagaacgtcgtcggaatctttagtaggaacaagctcgccgataccgccgccgccgtccatgtaggaaacgaggaatctccgaccaacgtcgtcccatttggcgcactcgcggaggaagccggagctgtggtaagagatgacgtgcgtggaaggaacagctttctctgaagagataatataagctattggaacggcggagagaatgaagaagaagagagcgacggagtatttgccggagcagcaggacggcgacattttgaaaaagacagttatagagagtaataaattgggtgcgaggaagaccaccttaagaaagtgtggaatagatacagagagagtttggttggtgagcgaacatttggaaaatatggggcccacttacttagatgcacatacaaccttgcactagttttggcggcccgttgaatgtatcattgggcccagaatctgtgtccagaattcaatacgaatagttacattttgtatttttgattactgttgtttcatgtttgtacctttttaccaatttaatgccctatactatttccgttgaagctttaaattcacaagttggttatatattaggtgagctgaaaatatcatttgggccatttacttcatacagttgagaaaatattcaatttgacacgtttttttttaatatagttgtatcgtgttttcttatttattagaattaatttctgtcaatataataatttgtggttttgctttctttgggtcgcatcaaatgttaggtgttttgaaattttgatgatattattatttttagacaaaattgactggagttgaacagtaatgggccggtctcagatgttagcccaataggttgacagagaaaatgtatgatccatgagagtgactaaattaaattgattaatctcttgcgcacacctgaatcctcgtcttcattcgttccggtcgtcgtctacacctccacactccgacttggtaaatccccagactcatctctctctctccttttcttttgatttctagatttgctagtttgtttcgattgttcttctagatagaaattaacgagtgatttttgatttaaccgattcgcatcaatgccccttcttcttattgcgtcgatctcatggatcgggatccatcgttcctctatctgatttctcttgtgggaaagaatttcaagctttatggttttgtagtaatgaacgtttatcattttcgttcgagggaagatttttaaactttcgttatgcggattctggatattaggctgttttttttttttttttttaatcgattgaaggatgtcaatttatagattgggctgtagattgctagtttatgtcattgatattgaattgtaagtttttcgatcttccagtcatacaaatcactaattgcctcaagataggaaaatccattggcagtatatagatggagttcatatcttaagcacaggtttatatggtcattacatttctagcttttgtttgttaggactgattcatgttgggtttttggggttattctttataacgggtcatgcttgtatatatgtagtatcaatacatttctgatttgtggttatgcttgatgcaaaaaagatccaatctttcgagttggtagtgagttacatttgttacttttggtaggttgagaagaagaaagaagagatggcaggacacaaggttgcacatgcgacattgaaagggcctagcgttgtcaaggagttatttatcggtttggcactcggtttagctgctggtggtctttggaagatgcaccattggaacgaacagaggaaaaccagaactttctatgacttgcttgagagaggtgagatcagtgttgtagctgctgaagagtaattaagccgctcaataactggttcctgaagattgtttgatttccatttctgtcttttttttcttttttttgttgggttcttaagaaataaacaaatctgagaatgggatttgtaacaaattcagatgtgatgttcattcagacataatctcttttgttttgtttcgagaaattacaaaaggtgaatatttatgaaacttattgatcgaagttttgcacttgaaagagtgtttccagcatttcaagtaattcaaaaactttttttcatattattatgaatcaatgttttgtatgaaaaataagtttgtgttgcatctgcctttttttgtgctctctgtttctgcaagtgcactcgcatgctgcatgtggctagtgaaccacttttgggaactctgaaaaaagtataatcaaatgtgagaattcttgtggttttgttttctgtttgggaatggtggtgagagagtttaccagagaagtgatctcctgagcttggagtgaacttcatgctcaccaaactccggattaccaccacctgtgcctgtggatactttgtctgcagaatctgacccttctttggactggtcgggacttgtatctgcatctgatgtgtttggaacacagtatttttgaagccaacggtcagtttcccagagaacgtgcataatgctttcccgtgctgagtacccgtggctctcgtgaggaagaacaacaagacggcaaagagcgccgtggccttttagtgcattgaagaatcggtctgactgttatacaaagtaagtgaaatgaatacagttagagagaaccaatccagtgataacttggtgtgaaccaatcctttcaagtgatatcaatgaagtaacctgcattgttagagttcctgggttattgtcttcttcaccatgaataagtaagattggcttcttgattttattagcagacatgaatgggctcatctctacatagacgttagtggcttcccacagagttcggtcctcgttctgaaaatttacaggcatagttaaagaataaccaaaaaagcgaagtaaattaactatcaaaatgcagagaatgagaggagaaagacaattggtcttggcacctggaaaccaaagggcgtgagtgttctgttgtaagccccagatctggcaatcccgcaggcgaaaagatgaggagcatgagcaagaagatttgcagtcataaaagctccataggagtgtcccccaactgcaattttgcttcgatcagccaccttgaaaaaagaacaaacaatagtaagtttcaaaactgttgggtttcatacaataccgaggtgatggatttaggataaagcaatgcttactccacgcctgacgacttcctctacagcagcttcggcacttgccaccagttgctctacatacctgattttttttttcagttgttcacattagaatctgtcaagctcaagcacatctcagatctgaaacttacatggtttgatgtcacaagttcccacttaattagtttgcttatgcttataggaaggaaatctttaaccaagacgatatcactggtttctatgttctagcaacaagctttacgaaagtaaatatcactttacctatcattagcctcttcatcaccttcaccaattataggtatagtaggtccagataatatagcaaacctgcacagtgcagacaaatccagatggtataagctaacactcgatcaacaagctcagtgatatagaccccggcacactgaaacagcaaaaaacagtatcaatgctaaaccttctagcaagccaaagaagggcagaagttgatccaatgcctgcaaattcatttggcgagccacggacttgaccagcagcatctttactcttgaattcaccaggataagaccaaaacagacaaggaagaggaccgtcttttgatggatcatagcctggtggtaggtatagtgttgcagtaagttgaaccccgtctttccgttgatacctgatcatctctttctgtaacgaagccaattgcggatacggatgaggaaagtttgtaatctgttgcactttcctatcaggccaaagttggagagaatattgggtgttttctgttttagactcctttgatgtcagaattttcagctcctccatttttaaatccccttctttttggtcagacatcaaggcaacaactgtctcgaaatacttttccttgtcgctctcccagattcgttctttgttgcctgtatttctagataaattttgtacagaacattcagtttgttatcgcttaatggcaataaaaacaaaaagagaagcaaaagaaagagaaatcattgtcaggttgggcttacatgtcaaacaagtcaaggaagggcacattcccttgtggtgtagccccacttccgttcagtaatacataagtgccttcatcattttccttctttatctttgctattacatacgttccagcatcggtccttctcagcatggttgagccagggtctgagtacacatcttccgatgatctatcaaacaagatgcgtggactgacatcgttagatccaggagagataacccacgtccttgttcgtcgtgttttataccatgattcataaaccagagctaatgtatcatcacaccaagaaatccctctgcagaattgaaatcggatcaatgttaggacatagaaggctttgatgaagttagtcagtttgttgataagatggcataagtaatctacaatatctgctgtgtttttagttgttacccataacgaagatcgagcttgtgtaacacttctggttcttctcctgccaatggttcagcagactgcatataaactatatcacgcggtgaaacttccattttggcatcacctccatcttgtgtttctgccctacatatctcagaagagttgtaaattaattacttccaaatcccattttggcacgtgtactacatgtgattcactttgaatctcaaatatataccagtagagggttgaaggcttgtctgctcgccagtttattgaacgcattcctttccgcacactattggaggcaatggggatatcttcagccaagggcaagtcacatagctgtcttacaaatctaccatcagttgtccagacttccaccttctttggaaatctaccacaaggtacaatgaaggaatatggcctgtgaagtgatgacaccaacaagtacttatggtctgtcgaagggtctaacgatgtatacactgcaggaacccctacttccttcacagtaccatccaaagaagccaatactagttgtgatgaagcgtagtagtcaaataaatcagcatcatactcatccttaagcaaatcttggaatgttctaacttggacaacagtcttcgtctcgtttgacagagttttgggaccagatggcaccaaaggtttctttggtggttctccacgagatgaagggattgtgctcaccaacaaagtggaattatcaatccaaacaaaactctcaaaaatcgcattcagaaaaatatcttgcgagttaaacaatggtctagctactccagtctcaacatcagctacccataccactggcttactactatttccgttctcatcgacccggatgctgaaagccagatgcttaccgtcattggaccatgtaacaaagttaatcttaccaccatctggaatgccagtgatctccttctcaggactcaatgtaccatcaggcaataactgatggattcctaaaccagtatagaatgacattctgcttctggtattgcagtatccatcaattcgaacaccagcaagcttctcctctggtctagctaaatctgcgagcggaggcaatgctctccgcttgagaaacaatatcttatccctatgtggtgaaaatgataaagccgggactggtggagcatctacaatatctctgatctcaggtggaggcagacgatatccagtgcctatagccaattctacatagttcaacacacaaacaaacaatcaaaaacgatttctcagatttcaattccagtgacaagtaactctatacacaaaaatattcaaatccaagttaccatcatcttcagttgcagtagcagaggctgatagggagccattagaggttccaccaccgtcttcagcacctccagaacaggcagatgcgagagaacgaagcctagaagcagaacgtgaagccatgacagtggtcaacgggttttcggagaatcggcgaactcttacgcaacgtcgtgtactcagagtcgagaatccggaaagcttgggaagtagaaggagagaagaagccggtgacggagacggcggagataaatggcagagaggtgaaagagagaaacgatgacaagctttatgaaagcgcatcatctttttttaatacttgacttttttaacctttttaaagtgctctgaatgattctctctttttctattcgacggttcactaatcaaaacgacgactgtatctgtatgtatttttaaccaggaaaacaaaaaatatcaggaaaaatatcggtagtggtcactgcttatgtgggccttatctatggcccaactagcgcttatttcctggaatatggcccattataagtcagtcgtcctccccctttttctcaacaaaatgaaatactcaaaaatatagtaattattaatttattatgctacttttcatgagaagtttatgtctatgaaaattacagaagagaaaatgataacaaatttttattatttcagtcaaaaattaaaaaaaaagcttctataattttcaagaaaaaatgttcaacggctgataaaataaatattccggggaaaaacttatgtttctcaaattggtagaatactactttttgtgaaaaaatctaagtacacgtggcaaaatatgcttggttcttagaagataagaggattgtgttcacagagtttaataacgtgaacgagtatattttatcttcttcatctcttcacatcaaaaaacttttctcctccatcaaaatcctccgacgatgacaaccatagctgcagctggcctcaacgtcgcgactccacgagtggtcgttcgacctgtggctcgtgtattaggtccggtccggttgaattacccgtggaaattcggttcgatgaagcggatggttgtggttaaggctacatcggaaggagagatatcggagaaggtggagaagagtatacaagaagctaaggagacatgcgctgatgatccggtgagcggggagtgtgtagcggcttgggacgaggtggaggagctgagtgcggcggcgagtcatgctagggacaagaagaaagctggtggctccgatcctttggaagagtattgcaatgataatcctgagactgatgagtgtcgtacttatgataattaaaaaatatgtttttgatgttcgaattatgaaactttaggtatggatcaatgtttgttcttcttgtcccttgttgttatgtttgtgtttttggtttggttgatgattgtaatgtgataaatgaatatgaatagtacaatacacaacatatgtttcataatgtgtttggttcgattacatttgcagtttcgtgaaattgataataaaaaactcaattaagtttagatgaggctgagatgatcttaggtcactcgcatacgttccttattatttttttgtggatgtggagatgtatgtgtcaaaacgacgttgagccgagagaaagatgaattgatcgagagtttcttagacggttttaaaattgctgccttgctggtatgggaattaatctttggtttcaacaagatgggtaacaacaaacaagcccatgtaattatgttgatgcagtgtaatgggctttatcaagcatgggccgatgtacaaatttgacatatagaatagaaccagtttgtggccagcctcaaggtgatgagaaacagtaaatatattaaggaataagtgaactaaataatttgacaaaaaaaaaaacacctgaaatgtatacaattttattgtttgataacaaaatttgtgaagttaagtgaatgaattcaaaatcgtttatcttctagcattaaattgattaatctaaagtaaatgatacgagtgtgcttgtttgatgctcttctgtgttattttgcaaatttgaattcgttcacttatatatatttttggcggttcagaaaagtagattttaacaagaaaaatgcatcggcacggtatcaccagttaaaatctgaaggtaaaaaggttatatatgaatttgtaagaaaacaacaaaaattaagccgatctatttgtcggcccagccgctaaagagtcaattatacccctataattctcacgcggtttaagaaaatgcaacaacaagtaaggggtgtatctgtcttctcacacataagatttttttttttgcttattaaaactcttacgtattgttgtttcctattctcaaatttgtattttccagattttccagaaaaatctcacagcggtaagaaaaaaagaaaaagaagagtcagtggtcttgttgtttcgttcttccttgttcgctcgacctggccgatgtctaaccaggaccaggagacgcgcacacaattcgcagaatgtaacgttgttgctactcttcttctctcgtttctgtgacctaagaaccattcgaattcgctgctccgtctctctggtttcgtccttgaaaaatcgtctactcgagattcctttctctagccacccatctcaactgctgagtagcaagctgtatttttgttgacctaactaaaccctagcttcttcgaggttttctcttgattcccttgtcttttctagctcccgaatttgccagttttacttgattttcatttttcatgtgtgatgtgtgtttttctatgtaattggatcttagggttttttgatttgggaataactctttgaaatcgcatttaagattgtgtctcaatgcttttttacgatccaattccttgagatgttttgtagatttctttcagtcgcttaattaggggaatgattggatgatccttcctgtgtagtaggaagaacagataaagttacatcagattccaatttttaaaagagaaccctagtttactattaagtatgtggacgattctatttcatatgaaaggtcttggtgttatatatgtcatctgtgtatatttatctaaaactgagtcagtatagtgcatgctttaattgatgagactgtctttcactttggcagtggcatttttttgacgagtgcttctcttccttatcatggactggatacacaaatctactccttttatggaaccttcgaatttggcaaaactggttcaaggaaatgttcctcttcagccacatgacagccattcttcgctaactgatctagatatggaccttagagaagtctatttcctgattttacattttctttctattggcccctgcgaacgaacctttggccacttgagagacgaaattttggaaaaagggcttttaccccgtagatatcattcctggtggtcaagaagtggcatttatagcgggcgtgctgatgatgatggcatctccctccccttgagttatgataatttgatagagaggtactgtttctttttttttttcctactccactcttccattgttgagttactatggaagccttgccatagcttattgaaatgtgctgttacttgtctctcaacatgtgtcttgttatgtcattactttatgtgagtgttcccacctccgtaattgtgcccaagttttttttcttttcataagttctgtcatcatgtttcgtttacttacaggtatcctcatatcgaaaaggatcacttggtgaagcttctcaaacaactaattttaaacccgtctttcccttcacacatgagagttgaaggaaatgctcctaatgctgctgatgttccaacactattgggatctggcaccttttcacttgtggatcgtagtaattcttattcatctactttgtcgtacctgaatttcaaaagcttttccatgaattgatgtttggcaatcaggatatgttttttctttaacttttgcatgcaattcatctgatttaatttcgaccgcacgttgtttctagaatggatcgctcagcaacatgttcctttggatctgggacttgaaaaaatcccatatatgcatagaacctgatagtggctctaaggctttgcattttagaaatttgtttttctggctttggcaatctttacttggtatcatgacttgtattgggaattctggtgaagtagctcatataggagaagttaagtccaggggtgctttaacttggatagtctccctaacctctccaattcttaccctaggtctttgattaagtagattcttaatcgttaattttgttctttttctgtgaaggtaacaatatagagtctcagaaagctaggcatgttgcgtcatacttacgctggccgcatatgcatgccgatcaagtgcgtggcctaagtctcagagaaattggaggaggtttcaggaaacaccaccgtgctccgtccattctttcagcatgtcatgctattgcaaaaccatcaacaatggttcaaaagatgcaaaatataaagaagctcagaggacatcgtaatgctgtctactgcggtatgatcttcataatacatcctttgtcttgaatctctggtttgtgggaactctatactttgttttgttacatgtgcaaccttgatattataccagtctgtttacatcttctgactaggggatctggaagttgtaatgtagtatgtccatcataggagcaccgtttattgtcatagaatgttttttgtgggtagaaaagtaacagtatggctatttatacttatgttgcacagctatatttgatcgttctggaagatatgttatcactggctccgatgaccggcttgtcaaaatttggtcaatggaaactgcgctttgcttggctagctgccgtgggcatgaagtgagctattgctttccatatttgtaagccataggttctcgactattctattaaaattagtctcgcctatgcatgtttcctgtagggtgacattacagacttggccgttagttcaaacaatgctttggttgcttcagcttcaaacgattttgtgattcgagtggtaagagtacaattctagtctttaatgtcttacttgtttttatttatttgtcagttagatagtattgattcttattacagtggcggttgcctgatggaatgccaatttctgtattgcggggacacactggagctgttaccgcaattgcattcagtcccagacaggcgtctgtttaccaacttttatcgtgagttctgttcaatatgtatctattttaactagtttgtttcgctctattcaagacccctggatctttagtttggatgtttcatactgcgtctggattggtaatcagttatttgtggtttttcgtaatctatgtaggtcatcagatgatggaacctgtcgtatctgggatgctaggtattctcagtggctcccacgaatctatgttccaagtccttcagatgctaacactggtaaaaagtggtacatcatcatattttgttcaatgttaagatatatttggttataggctcattggaagtttctctcttaggcgaaagcacttttacatcttccaacacaggatccacgagcaatgcatctcagagtcatcaaatattatgttgtgcatacaatgctaatggaaccattttcgtcacgggtagctctgacagcaatgcaagggtctgtgttaaactttcaactttagttatcctccttagtaatgcagaaactgtgggatatgtggtttttgtttacttttagtcttgattgtcagtatttccataatcttgcaggtttggagtgcctcaaaacctaacttggatgatgctgaacagccgactcatgagctggatgttctacggggccatgagaatgatgtcaactatgtgcaatttaggtattttccagcgaacgtggtgcctctcttagattgtgcattttgttggttgacatgaatagatatctaaaagggtatattctattttgttttagtggttgtgctgtggctccaaaatcttcaacagctgatgctctgaaggaagatagctacccaaagtttaagaattcctggtttgtttcacgttttaagtgttggacttatcgtcattcctctatctttcatctattgttagttaagaattaatacttttgactactaggttttgtcatgacaatatagtaacctgctctcgcgatggtagtgcaattatatggactccaagatcacgtaaattccatgtaagttctgtcaatcaatcactgaatgcaatgtgcaagttaatgacagcaaatttccgattctatcatcacttcccgagttccctcagcttcctcgatgttatatttccaggggaaatctggacgctggatgaaaggatatcatctgaaggttccacctcctccacttcctccacaacctcctcgaggaggcccacgtcaaaggtttcttccaacaccacggggtgttaatatgattatatggagcttggataatcgttttgtacttgccgctatcatgggtaaataattaatcttagaagaaatcttatgatgcataaattatcattttgatgaatatctctcagtctcactgtgttccaaccgtggatagtaaaatacacaacagttaaaaagcagtgtttttgggccacctgttggtattacatgaacgtactactatcttctgtttctctttaaccgtcagtgtatattcagattgcaggatttgtgtttggaatgctgctgatggtagcttagtgcattgtttaactggtcacagtgaatcggtaacaatcctctacatttctactccatcatttagtaggcccttttttttttttttgaatgttgtgtgcttcatagttcattgtatgttgcatctagctttaagttttgttgttcatccccgacttgcttttgggagatactaatattgatattaaaatttcacgaatcttctctttgtagtcttatgtcttggatgtccatcctttcaatcctcggattgctatgagcgctggctatgatgggaaaacaatcatctgggatgtgagtttacttttttggataggaatagtccttaatcttatcaatagcgatacttaccttcttagatttttttttctagatatgggagggtataccaatcaaagtgtacgaaatcgggagatttaagttggttgatggaaagttttcacagtaagtacccaatgaaatgtccacgacaagatcttctatattttttttgtgtgtttgcaaatgactccagttaaacatgcaattgactattgagtctgaaactagaagaaacagtcatgttaagcatatccaattgggtgtacaatattcatatttctttcagtaaagacatctgcttctgaagcatttatttagtcacatgaaagtcttggaatcaattttttaagatactatttccctggcactgtgtagagatgggacatctattgtgctttcagatgatgttggccagatatattttctaaacacaggacaaggagagtctcaaaagaatgcaaaatacgaccaggtatggtagattttacatctcagatgcatgatcattttctagtatatggctgaagtctctattactttctgaccctttgtcttgctttgtattgattagttcttccttggtgattatcgtcctcttattcgagataccaatggacatgttcttgatcaggtttgtttcaaatacttgtttcttctgttttctttctaatttctgctgcgttcttgttaatagacctcaccgaactgtgcatactttttatatccttgcacctgcggtatttttgaataataagctt

SEQ ID NO: 388 - DNA, 98937 bp, Arabidopsis thaliana
aagcttgaagaacatgagcccccatctatacttaagctgtcattgagacaacaagttctccatatttgctgcacggaatccagagccattaatgacgcaaatggtaataatattataattgtgtagagaatgtttaacttcttttataatagaagatgtcaaacttgggttacctgtgaaatagtaaggacagtcgggtttgctaggtcttctgctactgcataagtacctatcacatgagttcctgtttggtgcgaagatccttagatgaagctaaatgcttatggtgggagtattctttcattattcttaaaaattgggtgcatatatgctttagaaatacaatagatcgaatctataagatagtgtccaaaatgttattgtgtctatctaatcagactccgtcagttgaactgagtgttattatattctataacttagcattgctggcaaaagctatggatccaccagacccagatgtcgttgacgatgcattaaggatgctgttaagcatacaagcattgcggaaatcgcctaggggacgttacgagcccacattttatggacggttgcttgctagcttcccattgtcctttgatgcatctattctggtcgtcaagtttggtgaaatgggaatgctaagacaagggattctattaggtgtcctgatggataccctaccacttcctatccatcatccttttggagatgattcactggtatgtcctattggtgaattaatctacagttctacacgtctttttgatcatgatgttaatcatctacttcacctttgtcttcttttacagtttctagagtatgttgaccactattttggtggcagcaagaccatttctggtgggcggagggagatggtactcatggcaaacttttgtgcttttcagttttggcaacgtgtctttaaggtaataatatagtttcgccatattcccacgaaataccagcttctcttctcgaagatcttaccgatgtttctctccttgaaggataagcatcgtcttgaaaacttgaaacaactcctgtcaaaagagaaagacaaagatctcaagttgatgtttcctgagattgagaaagagtggtgtgatttccacaatattgcccagtcctcgttctatcatgtgtctgagctgtgtaagttcattgcttcctcgactctttttatatagcctttccattttaacgcgctaatagcctctctttccttttttttctctactttcttctgcctttaattggaatttttcgtctggtttacagatgaagatacacttagctcatttcatcgttttagacctcaattcatcagttcctctgattctcaaccaacctattacaatccatatgaatttgatcatacatgctatattgagtgccaaccctctgaagataaatatctacactctgaggacgtagataacaatcaaccacctcctgaagtaagaaaatgtgtatcagtgccgtttgttcctcctaacgcattccaagcaaatgctattgcagaaaacatggccagtattatcaaagaggtattcattttccgaccttgtttcgtgtatttagtaattgcgtttacaggcttatcaatcttctcattgtaccaagtttttcaataataagagtgtggtggatgctagagctgaaaacaatgtttcttccttacagcgtattgatctattactgtttcgatttgccatagataagaactcaatgcacaccatctgaatctgataatggccatggagcactcgaacctgaggattacgttgagtatggagaggccccagtctgtgtatattttcttaatggatattgtaaccgtggtggccagtgcacgttcactcatactcttcagtcaacaagaccagcctgcaaatttttcgcatcatcgcaggtgcattacgttaccatcctagttgggtcatcttcagagtctatgctaataagtcgtctttgcagggatgtcgaaatggagaatcgtgtttgttttcccacgccatgcgacgacggacaacatcataccttccacctccccaatgccttccagaagaagatggctcttccacatcgccccttctggatttgtttcctacttcttctgagggatgtatccttgtgttcgatgactctgacatgcatttcacctcaagtatagccaaccgttatccgtcctggagaatactctcaacatcatcgtcttcagagacgcttttctgtgattcatcacttgcagacacaagaatcttctggggtctcaatcatccctaccagacaatcatctcaaaagcaggaagggagaacccaatcccgtggaacgaagtgaaatgcgtgctgtggttccttaacccagacagctatgctgatactcctgagaagcagaaaactattctgcagaatttcttcgagcacatggcaatcagattactcggcgataagctttacaaaatccgagtagttctcacaatgaacaacgtcagattctcactcttacaggtaaaaaaaaaagtcttgctgtatcagcaccttcattgttttgtccactccattcatttatttgtgtatgtgttttttttttgtcaaggttgagaagctagccagagaaagcttcttcttccttggagagtctttcccacacgattcagaaagctttggtgcattccaagacacattaacaatccagaagcctatgctagtctccagaccaatctcctatgtctttaatctccatccgccttctgacatccagtttggtaactacacctctcttcttcgcaaatctcttcacaacaaatgatctcttggtgagaaagaaaagacaaaaaaaaactcttaccttttgatacttttgtcgtctctgttcctaagtcatcatatgttttgtgtttcatggcgatcaagtgaatggccataaccatgtaattcatgtgacgatctcttacttttctatctgatgctatctttaattattcgaaccagactcataactaaccctgacgatattataccagaagtgacgccacgtaaaaaaatgtggttaggtcgtgaatttgggttaacatcactggcctcactcaatttcaatgcgaaaacacatcctaataaatgtgaatcaaccggtttggataacgatatggtaaccggtccttttttttggtattgagtgaattgattcggaccccctaggtatctctatagctattattgtaaaatgaaatccacgttcagatatgtttccaaaaaattctaaaatttccctcttgcttaaagaaaaacaataatcaaattcataacattaaatgattagagaggatcaaaaattaagcttgaagaattaccaactccaagtgactttttgatactcttttaactttcattattgcttctcacctttctcttgcttcctctgcaaccctcccttgattagcaccttttctttactgttttttattggcaatcccatgattttacgtattctaaaaatgttaatgattttttgtgaccagacaaaaccaataatgaatgcaatttttaagaaatgaacacatatatatctagttttcgctggtagtggtagttttacttgaaatagtaaaagaaagaaaaacagaattcaaaacaacaccataaagctagatccaaaaataatgcttaaaccgtttgtaatgatgactacaatacctacaaaatcaaatgaacctcccaaataccctcataaacttcaattacacgtccctaattaaaaaggttaaaacttaatcccataggctccttcttggtcttgtgtatataatatagtctctctcgatctccatttgaaatatcgtcccaatttcttaaaaagtttggattcctccaataaagaacatgacttcgtcttcttcttctcctatcacgtttactcttcttctgcttctctctcttcttgtggcactaaacccaaatccgtcgttagcctccaccggtagcaacatcaacacaaacgacatcgtgacgcagtacagcacatacgttagaaacgcgtgcaacgtaacgcgatacaaccgcctctgcgtccgaacgctatggccgtttgcaatcgtcgctcgaaacaacaccagcaagtgggctcgagctagcgtcgcggttaccataaccgacaccaaacgggtgctgaggctcttgctcaaaacgcagcgttcagcagttggcgaaagcgagcgaatcgcgttgtcggattgccgagagctcttcgtggactctctcgacaacctatacaagtcgctcgccgttctgcggacactgaacgcggatgagttccagcggcagataagcgatctcgccacgtggctaagcgcagcactcacggatgatgacacgtgtctagatggatttgaagagacgtcgagtagaacacggacggtcaggatggtccggaggaaggccaccaagtgtatgcgactatgcagcaatgctctggctctcctcaagaagcttgcttttgatggcttgtaatctacgctatgatatttatttattacccatacaatcatgaatcatacatacattagaagaagaaaaaaactttattttactttcgaactattattgtaacactaattataaataatatgattgttgattgttgtcctggttattcttaactcacacaaattatcatgaatttatcattttcgtacttattacaaaatcagttggcctcggtttattatctattatatcttgcaaatatctcattttttcgtaacgttacaatgtttttggatcaatcgtatcgtgattgccatggaaccattttgtcattccgtaagtttggtgacaaaacattataaaagttgtttccaactacatttcagaaacattcatttaatggtacgttatttatttccacaagtatattcattacatgtggtttttttcactttattaaaatattggagaattgtaattgacaaaatttattgtggaataaaacaaaatattctacatatcaatttattgaggcgaataaacaaaaggggagcgagatggtcattggtcactatattagctaaagcccaaatttgaatctaacggggattggtagatgtttcagagatgggcctacatttagcccaaaatgcggattcagatttttccccgtgactactccaaaaggcccacaaacaaaggtttcttttgtttttgtttttgtttcacaaaaacgttacaacagcaatatcaattgttttgagtcatgtaattaaaccgtgagatagtttttttttttttttttgggtaaaaaccgtgagatagttctgaaaatactgctgtttaagttataatgctcggcaatgatttgctgcagacttgcagtagatgtacgtgagtcgtgacaaattactactcctactatttgttgttgatatttttaatagtagacgtattctgcacatacactattatatatgttcatctacttactctatactaaacaaataaaaaaaaaaaaaaaaaaaaagtgacgctgctggctcgaaaatggggagaatgaaagagtgcagaaaacgtgggaaataatagagatacacgtggcaatatatgaatcagtgtcgcttcacgaccaagtcccttctccgacgtgcgagcctcctcctcctcctcctcctcctctatcgttttcatcttcgtcattttttttttcaattttcattctaatttgggtttagtaaattaagttgtgttcacataatgtcaagcacacaacattaattactaattttacgaactaaatgtagttgattctaaataactttaacttttaactgagtttcacgtatcaatgaaatcagaatcaaatttgtattaatcgattttatattatgttggttatatttctttatatgcagaaaatttatcaaaataatgacaaggctcgaccaaaaaaattaaaaattaaaaatattgacaaggcattctcatgcatgtatgtgtatcgttgaattgtcaatattccgccaaccttggttaattttaaatatgatgtatatatattatagaaattaaatatataaaatttgtgcgtctctttgtccattatcgacaccaaatcaatctcttattgtttcttcctcttttctcttagcaaacttatattcgtttttgtttatgtatgttaggaagttaacgtcaaagtaaacctagataaatgttattaccacggtcacccatacaatataatctgacccataaaaaaagttatcatcgaaactcaaaacatgtttgtacctaaataataatatgccaaaatttgtgtcaaaaaacgttgttatgtcacgttttcttctcaacaaaaaagtgaaaacgttatgaatgcatgtgagtttataaatctgtcaataaacgtttcgtacgagaaaaatatatttcctaacgataaatgtatacataaatgatcatatatatatgttaggtatcactagtgggaaaaataattaaacagaagaaaataaacgagcgttgaaatcactcaaagttgccatcaaattggctttgcgtgacaaattaggcgcttattgactttcttaaggtacattactctactttgttaactctatgatacattttcgtcgtttttttatatatcgatcgagtatgaagttttctctaaataattccttacttacatagtcatattacatatactttatatgttgtcagcactttccaattcaaaaattcatttccccataatgacaatgaatacaaaagttataatttatacaaaatataaaaatgcaaagaaaatgtcagtagttgccaaataaaacatcaaagttatttaataagtcataaatagattgattcacaacaagtaataaatacaaaactgaaaataaatttatttctttataaaactagtcatttaattttgtaaagacaacattttataaaagagaaaattgtaattggtcaacaaatgaacgaagatagtaatcaatgtccgtccggttttgaagaatcgtttacttttcaaatctgaaaaacgcctaaaagagagagagaaacaaagtaaatataggggcatcatcgtaataaaagaagaagaacgaggctaaaacagtaacgcaccttcgtctacttaaatacaagcgaaaacccaaatcggttttcactccccgtcctacaggtcgactcagtctccggctagttcgactcggtaaaatcacgattactttctccttccatttatcacgatcgtggatccagaaactctgaaagatggcgtctgagctgacaaaccggcgacacgagatagagcaaccagaagcggaatcttattatccaaagccgataaagccatggttcgtagcgattcgtccgatccgttacatgctcagagaacagagactcgtcttcgtcctcgtcggcattgccatcgccacattaggattcacaatcttctccaaatcatccaaccaccaaccaattccttacgacgtggatccgctttccggatacggaatgcgatcggagtcatcgtatctgccagcgacgattcataagaagccaagcatcgagtacatgagccggatcggatcggcaggcggcaaaatccctctaggcttgaaacggaaagtgctaagggttgttgtgacaggtggagcagggttcgtcgggtcacacctggtggaccggttgatggctcgaggagacaacgtgatcgtggtcgacaatttcttcacgggaaggaaagagaacgtgatgcaccatttcaataaccctaatttcgagatgatccgtcacgatgtagtggagccgatccttctagaggttgatcagatctaccatttggcatgccctgcttctcctgttcactacaaattcaatcccgtcaagactatcatatcctttttcttttccttctataggaatttcagtttatcatcatcaatgttgttatatgtagtatggatcttgcttgctcttgtccttaactctgtgtgtgtggatacaagacgaatgtggtgggaacattgaacatgttgggactagcgaagagagtgggagcaagattcttgctgacgagtacgagtgaggtctatggagatcctcttcaacatcctcaggttgagacttactggggcaacgttaatcccatcggtactaccccttcatctccctctctgtttcttcttcttcttcctcattttgaaacaacaattaagcgcacgttagcagaagaaacacagcacgttagcagaagaaacacagagagagagagttcttttttaagatctggtcaaagttccttccatttgaagcgtagattgtgggtcctttaatcgtacggctctcagacgtgtgtctctttcatagacgcacccgcaggagatatttttatcctccttatttgacgcttttaccccccttcccacattttaatcaaattttcttctttctgaaataatagattgagcaatttgtgtttggtggaatattgaaagagtagtgatatggcaaattggaacaggtgttcggagttgttacgacgaaggcaaacgtacggctgagactttgaccatggactatcacagaggcgctaatgttgaggtctgttttctttttcattatatttcgctgctagaaaatgcagatgcagattttgactgatttattattcctcaacaggttaggattgctaggatattcaacacttatggcccaaggatgtgtatcgatgacggtcgtgtggttagcaacttcgttgcccaggtgcggaggactttgtgttagattaagtggcttaataaatgatcaacggaattataccttttattaagtaatgatgattgttgtgcaggcattaagaaaagagcctttgactgtttatggtgatggtaagcagactaggagtttccagtttgtctctgatctggtaatccccttttactttttcctccttaagttttcaaattcatgattagataaaaacaaggaaaagttcaattcatggtgtagtagccctacttcttcaaattttgccatgaccacatctttttcaattgttactttcatggggtatacttcagacttgacatggtaaaaacagaaaacagtctatcttgatactattcaaagttatagttgatctcactaggatacaataagtggctgagaatctatatttgaggttcggatagttagtctaatcacttgtatttacgatctctctatgatttgattttgtgaacgggattcactaaccttgatgccatagtaaaatggattagctctgtaaagtgtgacataaactttggggatggatggatatcaatcaatgttatggtaccaacaacggatctttattataccatgtccttgttttgttgagctgaaaaatcatgcttcattttgtctctacgtatccttacatggttatttattattgtgtactggtaaacttgagtgcaaaatataatgtgataggtggaaggtctgatgaggttgatggagggagaacatgtcggtccatttaaccttggtaaccccggtgaattcaccatgctcgagctcgctaaggtacatttttctcttgttgttacatataatctgatcactcaaaatctttgtatctgacccaaacgagtggatggtgggtgagcaggtggttcaagagacaattgacccgaacgcaaagatagagttcagaccaaacacagaggacgacccacacaagaggaaaccagacatcacaaaggccaaagagcttcttggttgggaaccaaaggtggctctacgccaaggactcccacttatggtcaaagatttccgtcaacgtgtctttggcgaccaaaagcaggattcttccaccacttcatcatcaacagagtaactgtcgctggagattctcgtttctcttcgttttcatttttaattttgatatttctattcctgtcaatgtagtgatattgaaacctcaccgattttaaagttttattttttttaatgcaatcaccgtagttttgagcttggacatgcgagctgaacaaacaacaaacaaggaacatgtctttaaaagatctttaaaagatcttgtcaattcggacataaacgaaaatgagacgaataactttaaaagatgctactacctacaagaatttatcagttttagcacaacaaacaaggaacatgtctctaagtctctcttcctctcattttggattcctgaggacgataatgaccgagtctccacgtagaaacatcttgcttatgaaccgatctctgttcaccggaagtgctttcttcttgcctttcccagttttcggaacctaaaccaaaccaacgccatctcaggcaccacaagttttatatgtagacaaaactgatttcaggataatgaatattggctacctcagtccacatctctctgacattttcaagaaccatgttgcagtgtctgtcaaacgccctcactcgcccaagaagtttcctgttgttccggcaattgattaaaacctgaacataaaaaagttgaccttgttaataacctttccattttaaccactcttcgttatacatttcaatatttcattgtctaacacctagcccatgaaggtcaaaaacatctatccatttaatcagttttcatatacaacatcattatctaacatcagaagctcaatacatctcctagagatctctatacctgagtgttattcttgacgctcatcataagaacagagagtggcccggtgttgaattcctcttcctcagtcttgccctgctaaggacagtatcaagcatgatgaattagaaacaacatttaaggagagaacacatccttaagagtatcatacaagcaggaaactaatggagtttataacagcaacaatcaaatgacattacaacaaagggcagaagtgatgaaaacatccaattctctactgcccattcaacgcagaacggaacaaaaattcagtgaaaatctttagtggcacagtcctactcaagtactagagacagctaagattgatgaaactggaaacagtagatgaattatggcaaacagcgaatcgagaaaagcagtagcgagagaaattagaaggaagcttacattggtatcctcttccattggcttgctgcgagaaaaaatatagaaaatcaagagaaacaccacagtgttagacaagtctcaaattgagcaccacaaaatgcagaagaaacttagaaccatcgagagatatacctcatgttgacttatcgcgagcttcttctccacaaagaatcaccgaacctatcaaagtaaaggaatacgaaagagactcaggaaagcagaattacagattttcgcacaaggaaagatcgaagaagttagggttttaccttacctgataaatctcgctttcgttttccgcagatctctctctcagaggaagaagaagaacgacgactcgatactcgaaagtacttggcggaccggcgctacaacatagttaagttaggcctttcaaattttgggccttgtcaatttatatgggctttaatgttttttttggggggctttaacgttttccaaacgaatataaatattttaggtagccataacttataaattctttgggccatacattttcaaatttcaaaccatgagaccaccaatctttaataattcacacaaaatcataactctctttttcataaattgttttttgtttgccttgataaaattttattacacagtggatcgtggaaccaaacggccacggttcaaaccacaaaggagattgaagaagggacgtttaggcctcctatgaccgttactaacgccgttaacagtagttaccctctggacgctcgtagtgttaccaactcgtataggagtgacagtgagagaggcagggtcagcggttcgaaggtcaagccaattgatgatgtcagcaaaaacaaggtccacgttacagtcaggctcacctgacgtcagagcgtgccacatccctggatacaacttgagcgtcttgtcccttgtgctagctttctcgtacagagctttgcttacctctggatccgtcactgtatctgcttctccgtgtaatacaaagaatggcattgttatctgcaatatcatgttgtcttggtcagaaataatgtcataacacgggatcaagaacaatcaataagagacatgaacctcgtggagagtgtcttctaggttcatgcttgtcctaagcatctcaagtgcggttttgagcctaggcttgtcttgatatatcagcttgttgttccttacctgcatttacacacaccaaattatttacatataaccaatttcgatggtgatcagagggttggtatacactatacagacctcttctcgcttgacgaggtccttgaaagcagcgtcaatcacgtcttttgttggaactattttccatttaggtatgatttcttcgactctagttaacagattaatcactatagggtgtggcttcaccttctcagatatctgcatatttaaacataacaatatactttgcatttcaatattattatcacctacgactctgcaatctaaaattatagttgcaggttttttaccttacacattggagcaactagaatggcgccgttccaaaacaaaggatcttttttgtgaagcaataaagtgactgcgcctcccatggattctccatacaagaatctgcctttgtccatgtactcctcttgcgctggtgtcacataaaattaaccggattaacttaaggggttgagaaaatctcttcttactgataaacggagaagaagagagagaggaatgttattgttatatatgtcaaatgaaataccacaaatagatgtgtagtagtcatagcaatcattcacaacattcgcaaacttcttgatgtagcaacgagatcccatggaccttccatgaccttcatagtccataccaaaaaccgcgtatccagctgaagccagcctgattccgcattctaaaatcaaaacatgtatcagtttgtttagtttcaaacatgtatcaacttccgaataaattttctcaaccaccaagctagccatagaaagaaaggtaatttaatttgcaagggatcaaatacaacactctaaacgaggaaagaccaaaaaaatgaaataaattaaatttagtctgagggtcgttctccaaccaaaaccaaccacataaagtaagacttgttgacctaccggtcctaacaccctccatgacttgctttctagaggcatttaaggagtattactacacacataaatgttctaaggtccacagtgaatttaagatccatgatctgctactatcactacacaaatcctaactagtataatgcatcaaatctaaaatataaaagttaaaaaaaatgataagcagtgaaagaaatgacttttttctcagtatcatgcgtaatctgattcagagaactgatagaagcaacacaaaaaaaaaacttgctaattaaatctaaaatcccaccgccaaatcaaggcaagagaaacaaaaaatccatatttttggagatttgttagatctaatgcattactattgtgcatgtgaatcataaattggaaggaagaagaataatgaaaaacctttcatggagtcgctacactccattccataacctgcacaaaatcaccaccaacttgttcagttttattatgtgtaatgaagaaagcggcttttagaaataataaggaaataactgcaaccatggcagaggaaaaccagagctttgggagaagacgaagaagatgggatccatctacatgcgaacaactctacacctcttgaatttctcacgtattcctgtcaccaattcatacacatatttgtttattcaaagatctaatcaatcatctcaacacctcttgacatcttcactctcctgttaaactattactactacatctaaaatctctaagcagagagagggagagagagagagaacctcgtggtattggaattccgacgacttcatgaccggagctagatcttgagagagagacactgaaggtgacgaaggggttttgaggacggtctcaccaatttatagaaacaagagtgtcactgttctttttttcaattcacttttttccaaattatggaaagctcagaaaatgttttcggaattttatttatttgacgtcacactgggcgcgtgtgaattagtagagagacccatccattggtcagacatatcgacaaaagaggtatgtaacctaaacctactctcctcattaagtcaataaaacacattaatactaaatacatataatcctcaaaagtcaacataacaaatccataaggaatgagaaaacaactctaccccaagagaaaaaaaaagtacgaatgaaagaagaagatcatttcacgtacgtatgatcccaacgtttggtaataccgcttctaaacgcgcattgcaaaacgctaaccctctcttggatgattgtttcctttacaccctctatcactttctcttcttcatccattatcgattccaagtcgtctagaaacttcaacttgctctgcagtttcttcagctgagtacaacaaagagaagcaaaacatgtccggttcaagacacaaacacagtggaacagacacaaatgttttaatgttgttacaagttacaaccaacctgttgttctattactgtcgcagctaactgttccatttctctttcttcttgatcagccagtattttcgcttgtgcagccgcagctcctagagctgttgccacagacgctcttatccttaacgctacaggtagaccctgaggcccgtctgcaaatatataacgattccaaatcttaagccttgagctttcattataaacctaggaatgcagattgaatcacaacacaatttacctttctcttcttgctgttcctccatatctgtatctttctctccattggctctgtgagcaaagttttgtatcttgagattagtgtaggacatgagaagccaaaccacaagcaaattgagggcttagagaatcgaacctatcaactgtgaaattgctgtagtcatcagtgtcaaaaatctcttttggacatgaggcttcatcacaaagagctgcaagtgcagcttttgcagcagcagttgcgacagatggaccaactttacttgccatggcagcgacctgttgtgcaatatgtaaacatgttatctcttgaacattcttttccagtggagttaaaaagggcattctttgcgacggttaaaggtcagagaagaacccgaatgttacactcatatggaaaataatgaacacaaggcatatagtttaaccaaacattcacctgtttcataagtgaactatcaccctctgatatcagtgcaacacgtttcctttttgctggaggctcatcttcattcacgcgatcttctttttcttcccttgtctctgtttcctcatgttcctgcccatcagtttgcacctgttccgtgttttcatcctcggtgaggatagagggattgagtcttccagaagcagaacccatcagaaactctccaaacgggagctcaatgagtttagaaatgcaatctagtctactcttggtagaaacactttgtgaaatgagttcccaatcatctccatgtttcagcacagattctagcaagaggaggatctcttcctctgtccacacagctgcagctgaattcccaatcaacttaaaatcatctgcagtgttgttctccccatagtttccattcttgaaacacttttcgcatatgttgactataccctgccaacatcatatgtcaaaaaaaaaagaagcataaacaaaacagactagagagtatgaaatatgctaatcgaaaaaaagcaaaaaaaaactaccttgttatgttgatagaaaggagaatcgcaacgttctccacaatgcgcacaaaccaatacatgatccggcttcttcaaatcactgaaaacatctgaataagaggtaagcggtggtactttgatgccagtctcaactctttcctcaacaaggggcggtgcggttataggcctaagagaattaggggttgcagtaactcgaattccagcaggagtcccttgttctattttagcattatccacggacaatagatggtcatttttcttcagggaagagctaaaattgatcaatccccatttttcgaggaagagaaaaactttctggagcaaattgacatcgccaacaagaaacttgcggacactggtgaaggtgagtctccgacaagtgtcctctctaaacttattgataatgaaatctcggtactccttgtaaactttgggggttctagtgattgagctctcagtgaagaactccgcaaactcgcgtctttcaatttcgtgtatatcatcccataagaaccaaccttgtaaagaacaagacaaatccccaaatcaattgcaaagaaaacaaaccatagaaagcagaaacctaagagacggaaacagttgagcgagtaaaaagagtagaagaagaaaccctagagatctaaaagcatggcgagggtaagagaagacatactggattgagcaggaatggtgtagagctcgatctctgcgcttggatcagtggcttccatgcccgttaccgattccctccaatatcaaaaacctctgatgaatctattgccaatcgccaaatccaaaccacacggagaataattagttaagggtcaaaagcgaaaacttgcccgaagctgggtcaattataataaaactcaatttaaaatctgggcccaatctttattttatcagcccactttgttatctagttatcagcccacttgttgttaactttatttcgtcaagcccacttattactattaactttttggtcttcagctacaaattttaatgaacttatataactctagttgttagggatatggttgctccaacatcgaaccataaagaccaaaaattacgcacatcattatgagatgaactgtaaaagaatttgagaattaaacttataactctttccagaatgcaataagcatttggctaaaatttcacactgtcaagttttaagtggttgagagaccaaagaggatccagcagcttgaataacattgaaactgtcccaagaaattgcaaaacatccataataaagggttcaactaaaaaagaggtacttcaagaaccagctaaacaaaaagctctattaagttttacgaatccgagcaaaccacaaacaaaagaagctagcctcttaattcatcctttgggcagcctcctttgcaataactctttcctttgccttggtctttgcctgagacttagatcccattatgcctcctccccatttcttcctgtactcctcgtacttgtcattgaagttggcctatagacaaaaacccaaaaacacaatcataagaatctccaacaatatgtttcacacaatctaccattctattggtcacaagaagtatttaccttgatagcttccaggattttgctgaactctagcttgtcctcgttcttgacagtggtcaaacacaagcaagaagcagtcttctggtgaacaacctgaaagtcagagaaagaaataaagattaactctccatgctagtggctataaactagagagaaatcacccacaacacataccgctccaagacgagatttgcccttgacaatgcagtacgggacttccatcttcctgcacagagcaggcaaccagacaaccaactcaattgggtcgacatcatgagcaataacaacaagttgggccttgttctgctcaatgaggtaggtcacatggttgaggccgtatttgactacaatgggcttcttagactcagaaggctttccctcagcttcagcttgggccttctttacaagacgctccttcttggcagctttgtcttctggcctgtacttcagaaggaccttgaagaggctggtagctgcaattatcaataacgaatataaataaggcaccgaagtcttcttataaggttacagcaacacaagatttaccagaactggtaaatatttcaataataaattaacagcagcaagtagtaaatgtttgaagagtagattgagaatgaaatagacataccaagattcttgtcaagagtcttggtgaattggttaagagctggagggaccttcaacctctgcttcaggatcctcttttgcctttgaagacggatggatttgggccatttgatgtagcgagagagatccttcttaggaggtaaagctccaccaataccgaattgcttaggcctcctctcgaatagagggtttgaaactttctcctggagaaatcagaaatcaaaacacaaaacttcagcaagaaagaaaaaaacaacaacaaagaacaaattgaatgttcgaaaacctaaaaaagaagaagagaattggaaatgaaacataccgcggtcttcttcttagcagctaccttcactcctttcttcggggcctaaaaccaaatcgtggcgtgattagattgataaagtaaccacagaacatttgtgacattgctctctacgcaaatttctagatggattcataagctatatcaactaccaaatctatcaaaagctaaatccaaagcagataagcaatgatggtgttaccaccgagaggaaatcgaaacccatgtgtgttcatcttcaagcgagaatgcatccaggaaacactaactctatcgtgaaggatctaattcgatgattctactatgaaagcaaacaactaacagatcccaaatgaaacgaaatgaagatggaaggaagagagatgataccattgtcgtcgtccaaagctccaactccaaatggtttctgcgaaaggacggctgagtcgaagagtatcgttttctagggttttgccttttatatatataccatgtacattgatagggcttctctattttctctaattaaaataataattaaaaattgccagcaaaccgtaattacaaatatacccttattaatctttcaatgtgttacggtctttttaaaccggtggttaacatggcggaaaaaatgagaaaaaaccggtttaacattttccaccagtgatgaactttctcaaaagagtttattatatacgaacctagctactagccaaagtcttacttttctcaaaaccaaacgttaatgaaactaccatttgatgtatacatatgggtagaaaacaagccaccgacacctttgtcactcattgggtgagctcttcctaaagaagatggtcttttccaaattccaattcagcagcatgtgtagtagtagtttcgtggatctgtatgtattctcgaccgcggttacaactaacgatttataactaaggcgttttagttttacgaatagtatttcgacctcgtgttatcgttcccatatgggagatttatatctttctctatgagatgtttgtgagactgtatgattttgtacatttgagtttttggaattgttttcgtcaatttaacaaaaataattggtgacaacaaaaaaactatcagtcttagtaatatgtgacgtatttcttatcaaatttagattgaccatgtaaagagtttagcaattaaatccaattacattgcttgtgtacttattcatgttgtaataaattgtagatttacaactatgacaatcctatataacagaacaaaaacaaatacgtatttgaactttctagtttacactttacacgaattacacgtgataaataacaggtagatttatgtcaatgtcatacatagcctaaatcaactaaaaagtaaacaatatagttcaaatgtatatatatactagataaggtccgcctatttaggcgggtgtacccgaaattttcaaatactcgaacggatataaactttaaaacccgaaaaactcaaacccaaacccgaataggtatgcaaacatatctcaaatataagtatatattagttatatttatacttatatatagaaaatattagaatttttttggatattttagttatttttgtgtatttttagatatattcaagcaaaactactcatgttgttttgggaatttttgaaaatttcaagtaatttaatagatttgcacacaaaatttgatatttcaatatataaataactcgaacccgaacccgaacccaaaccgaacccgacccgataatatttttttgtttaaaaatacatacaaccaaaatcttatttctacccaatttctttaagtaataattatattaataaaacctacagtctaatttctacagcaataaaacttacagctacagtcatcacacctacaacaaaaattctacagcagtaaatctacagttacagacaaaccaatcacccacgtaatctcgtaagttaattttacatcatgcaaattaatattaaatgagttaaaattaataaatgaaaataattgaaaagttaaatcctataagctaagctatttttctcaaagtgttctattttcacttatgattacatgagttaaagacaaatttgttaattttgcttttgttgaataaatgttaattgtttataaatatatagacatataaattagtatatgtaaatttgtttactttttaagattttctatttttttaaagaataaaaaagttaaattttgaatgacacatgtaaacatctaatcgtttgacttgacactgtgccaagtcaattttgaaaaccatactttatataataagatatatatatatatatatattttttgtcctcatagttcaattgtatatatctcaataatttttttaatcagaaaaaaacaaaatacatatatatccactaattctgatttgataatgcgttcacacttcatatttatcatgtttatcttttataaagaaaataaattagtcaggtcaggtttttagtaagatatatgtttatgataatatctaaactcgaggagatgataaaactaatattactcaggttgaaattaaaatctaatgcttataaggatgaaatgaaacaaaattcagggagtaaaaagatataaaaaaaacttgcaattgaggtctcatattcttaaaccttaccaaagaaaggcgagattaattaatcctagttagtcaagtaaatcatccaattagataagatcacgtgtcggtcgatgtacgcttgaatcctcgtttcgatacaataattgaagtgtgtcatgcagagattagagagatgtgtataaatggctcccaagtctccaccgcaatatccaacgcttgaccgattccaatcagctcctctcgatttccgtttgtcggaaaatctctcccgtgatcggcgtattgtgaatgccgctcaccgagatattctccggtacgtccgcattgatcaatttcgtcgcgtggctcactctgtttcatctgttcttttcttattttttagctatttttgttgagatttgttcgttgaaaattatggttttgtgaaaagaacccaacttgttttactgaacccatgatgaaagttataatcttttgatctggttacctctggattttgattacgcatacagtggaacatgcaattgttattagcattggttatagattggatttcggttacatgccattggatcctttgcaatgtttagtttgtgttacagattctctggaaagaaatctttttgcatgttccgtttgtttcgcatcctcttgatactgttcgatcgatcaggctacaggtttcatcagtttcttctaaaagttgtaagcttctttttggtgtgccagattcttttccccagtgaggacaagtgttcagttgacttattaggaggtggggtttgaataagttacaatggcctcaattcttaatcaaacccaggagttgcaagaatcttctaaggttcttgggcatttaagatgtgaaaacttctttctattccccggagaaaacactttgtcagatggtttgaggggtgtgttatattttctcggtcttgcctactgctttattgggttgtcagccatcactgcacggttcttcaagtctatggagaatgtcgtgaaacattcccgtaaagtggttacaattgatcccattactaaagctgaagtcatcacatacaagaaagtttggaactttactattgcagacatcagtttgttggcgtttggaactagcttccctcagatttctttggctaccatcgatgcaatacggaatatgggggagcggtatgctggaggtctggtggttgttcctttcttccttccaaaactctagtttttacttttaagttcatgaattcttatatcatgttttgtcatataggtcttggtcctggaacacttgttggctcagctgcatttgatcttttccccatccacgctgtttgtgtcgttgtgccaaaagctggagaactgaaaaagatatccgacttaggtgtttggctagttgagctcgtatggtctttttgggcttacatctggctatacataatcctcgaggtaactgtgaaaagcggtttaaacagattctgttgagtctatactctatactgataaggtctaaaaatctgtttcttttcacgtctcacaggtgtggtcaccaaacgtaattacacttgtggaggcattattgacagtactgcaatacggattgcttctagttcatgcgtacgcccaagacaagcgatggccttacttgtctttaccaatgtgggtttcttttccagacaataatattagttccttcaaaatggatttctactaaagattgtatctttgtgtttgtatttgatacttgcaggtcaagaggtgataggccagaggagtgggttccagaggagattgatacatccaaagatgacaatgacaatgatgttcatgatgtgtattcggatgctgctcaagatgctgttgaatcgggaagcagaaacattgttgatatcttctctattcattcagctaacaatgatacaggtactaagtatgattaggctgtctattctattgatataagatcagttttagcgtatttgcttatttccaaatctatgtgattcccatatttatctctggtagtatattgttataaatcaaactttccctgtaacaaacacttttgcagggatcacttatcatactgtggcagatactccacccgattctgcgactaagaagggtaaggcgaagaattctactgtttttgacatttggaaacatcaattcgtggatgcaataacggtaaaaatcttcaacttaccaagtgttttctagattcttctatatcctattttgggcttttgatcattatcaacacatctttcttaacttgtttctcttcctattcgtaatcaaacagttggaaacatcagaatcaaagaaagtggatagcatttatcttcgaatcgcgaaatctttctggcatttactcctcgccccttggaaactgctttttgcatttgtgcccccctgcaacattgctcacggttggatcgctttcatctgctctctcctcttcatcagtggagtagcctttgttgtcacaagatttactgaccttataagctgtgtcactggtacacaccctcaccgctttcaaaaactgaagttataagattaaacatttgagctctaaaacattagaaactcttttcatcttgcaggaataaacccatatgtgatagcattcacagcactcgcaagtggaacttcatggccagacttagtagcaagtaaaatcgctgcagagcgacaactaaccgcagattcagctattgcaaacatcacctgcaggtaaaaatctcaaaaccctttacaaacattgaagatcttttcatgatctttttggtgataaattatgcagtaactcggtgaacatctatgtggggattggagttccgtggctgataaacacagtctacaactactttgcatacagagagcctttatacatagaaaacgctaaaggattaagcttttcgcttctgatattctttgcgacatcagtgggatgtatcgtggtgcttgtgttgagaaggttgattataggagctgagcttggaggtccaaggctatgggcttggcttacttctgcctatttcatgatgctttgggtcgtcttcgttgttctttcttctttgaaagtttcaggcgtcatatagaagaagcaacaaaaggaaaaaccccatgagtagaagaaaaagtcttagcttacttgcacatgtctcagtttttgtttttcttacttgttaagggggttttatataattatcaaagttcaaaggcagttggctaaatatgtgttgcaaatataaatcatattgactatgattttggaggcttcatctctagttaggaggtgcatatatggagtacattttcattatcctgcagttttttttgtttttttatttgcagtgttaccaatttgtggtacatatatgcaaactttctctaaagtcaagcaaataatcttagtcgattaatataaacttttatatgtaactttcatccaagtaactagtgtttagtacggttctttaataagtgttgtagaatttctaatgcccatttaccacgaagtgcatattctagttgctgcttgcttctgatattagtgacatcttaatattcctgaatttaatattcatagacacaactacttcggttattttctaagatacattctcaagtcttaaccacaaaggagagcgtctcaaattgtagagactttttatggaatgagtatccgaaatgtttagaacagggaacggacaacttgattgagccaaaaaaagaagcttagattttattctcctgacactcaagtttcaaaagagagcagtaaagtcctgtccggatagcaaattaatccaccatacaccagagtagggcaaagaaacaggtcgcttctaacttttccggtcacctgaaagttttcaaatgtttaagcaaaggcaccggtacaggctgtagccggaccagcctcgacctgcgtcttcgctgagctgtatttcttggttataaacctgttccaagtttaaacacacatcaaagagagaatcagacaaaatacaaattctacatttctactagggggcaagttaagaaagtaagagctcacctgaagaaatccctccatagcaactcatacattaaccagttgagtcctgtatctcccggtccgttcctgagaaaatcatttcaaagaatgataattagacacatacacttactatgttcaccagagtttcctgaagtgttttgcgtttctgagacattaccttggagttgtggaggtggttgatgcggagattgttttcttcagctcatcgaacatggaacgaggagagatgcttcccatggctaaccaaggtgatatcttgcaagagaagtttgcaccaaagacactgttgttgcctcctttctggtttcccttgctcaaccgagcctgacaatccgcggcaaagctctttagtctagtcaacgcctctgtctctcctccaaccattgtcggtttcccctcctgagcagaacaaaatgttaactcctaagagaaggtgtaagacagtaagagccgcagacgaatattggacctaaagagaaacgttcattgatcctaagaagaatccatggaccttcaaacagcactactactattaacacttgatagtacttatccctatcactctatgggtaagtagctcttctcctatagaaatggaaccaattggcagagtttgaattataagtcccacaagtttccaccttttctaaatgcctaaacctagatggataaaggaatcaatcaagctaagcaaagatgaagaactcaaacctggctagtcctaggagtggggctaatgccaagatccaggagagaaggaatatcgccaagctcaacgtctcctcgagagggcaagcttttcaattgatcaagcgctgcgatagtcttcctaatctccaatttctggactttatccttgaaagctccgtaatttgacggcaagtcttcaattttgaagggcaaatcatccaaatgatagagagtgcttccccagaaatacttgacttcaacgccttcctccttcatcgcggtctctatcttcccttccgctttaacctcgtcgtgagacacttctctgtgagcataaaccgcgtcagctccaatctccttagccaattccaccaaaacagcttcaggtttcccgacacggacaactagattcgaccctctggcttggagattcttccggagctccgaaacggactcaatcagaaactgggcacgaaaaggccccgttttgtcgaagccggaagaggacttgccgtaatctctagggtcgaagcagtaaacgggcaaaacggagacgcactcgtcgttggcggagttgagacactcgttgtcgtggacacggaggtcattgcggaaccagacgacagcagcacggcggagagcggcggcggaggaaggatcaacgggacgacgagggacgatggagagaggggattgaagagggttagcagcgatggtggatttgaaagagattctggaagaaggaaaaggagagacagaagaaagagagagatgagtgagagaagaagcctgcgtagggatcttaaccttgtttggatgatgagcaaacaatttgagaaattgagtcgaggatgggaacaaggtcagagaaagagatgcgattggtagagaagaatggaaaatggcaagtgggttttgttcttctgcggattttgtttctgggtttaggttttcttcaacattcgaagaatccattttgtgtgtgtgtgtgtgtgtgtgtgtagagagaagagagtgaagaagagtgtgagatgaattgataagctctcgtcgattttccccacacaatttcttctgtttagatcaaatattttaataaaatgtatttaaaatatatcgtagcactgttattttattttcaactttagaaatattgattgatttttttctattataaacactactaatgaaggaaaaaaatacgaattttcttaacatttttaaatcctattatagttctgaacagttttattgaaatatattttgtcaattaatataaaatttgaaattaaaatttttgaataataaatttatttaaaatcataaaggtctcaattataagtttcctatgttttatcattttgccatttttacacatataaaaaaagatttataaaaatgaagataaaactaacattattgtaaaaccagaataaaaattgaaaatgacaaaattagagattaaagtagctaaagtacagtttctgatcttcaaacaagtgattaattcgatcttacatatcatgggactctccatatattcgttccattttgtgtatatgaacctctgatcaatgcgttacatatgctgcaaaaaccatcacaaaagctaaatgtataactctgtaggtaatttgaaacgaataacggtccatgcagtgaagtatacaaccacaagttcgaaaacactctcgtaattaatgcaagccaaagagctcaatgagaactatatatggcgaagacagagcttgaaattacccttttagtttcatgtgcattgtgcaccgtcaatcccatctagaaacgctacattttggtcagcacacaataaggttcaaaataaccaaagcaacacttacatatatgagaactataaagatttaatcaaccgtcgaacacaaatgatttaacacacatatacacacaaacaacgaagagctagtcaagaacaacgaaaaacacattatcaataaggtttaagggatatataacatcaatgggtgaagagctcatgttggagaagttaagtacgtgcaaataagcaaatgagacggatttcgtgtttgttggtttgcacgtgccctgcttctccaacatggagattctcacccgcatttccaagcacatgaggggcgtttgtagtatgagaactttggttatggaaaggtttgtatatataggcccaaagattgcattaatggaagactagctcacacgcacatccgtatatgttatgtgtgtgtgtgtgtgtgctggcgtgagtgtgttttacgtaaggcaaaagaaccataccatgccatgatggcatctcacgcaaaagaagggttgaactaaaaaagtgagagagtgaagagagctaaacgatcgctagctagggccaaacaataccttgtctaataactgctaagttttgaaagcttttttttattccatattactgtttttttagtgtgggggcttgtctgccctaaatttcacaaactctacatatataagtgctaggttgctaggcgtaccatattgtcttattgctaggatcctatgaagccggtcacgcgttgacaagcaagaccttagacctctcttacgactaatctttagctagcatctactctatggcatggtaaaaaaatacagtatccatattctttcacttcattagaatgaattaccggtatataccaaaataaactggatatccactagttcctcactaataataatctacacttaactttgtttcagtttatattgaaactcttcaaattcaaatattgatatacattatacgatatatatatatatatatatatatctgtaaattttctactacataaatgatttttttttttcctctatcgatcgatatgtatgtatatcatgatgataaatgccgaagcataaaagaaccatttgaattaataacatacatgtgcgtgagagagaagggtcaaaagggcaaggtgggtcgtcaaagactgttgggggcaaaagaagagaggaataatgaaagagtgcacgtagggctttgcgtgttgtcctaactttctctaacatggaaaaaaaaaaggtccctatgttgataccattcctccctctttcattagttgattgtgtatattatatatatggtctatgattaatgtataatcctcctcagtccacacatggactcaggataggtaaatatgatctctagattaatggtcttactatagctagttaaattgttatatagtaattgaagatgctagcaagtgatccattaatgtttaaagtggtgattcattggacatatacataatgacccattaatgttttactactaagtactaagataagctagtaagcaagagctgagatacagaataacactaattaggcagtgtgtgtcacacagaccagagaggcagagatgaatcagcaacaaatcttttgtcttgtaaaaagaggagacagagtcagacaatgaagtcatcaccaaatctataaacacatgcattaatgcttttacgtgtccgtatcacactcgtgtttcccactaaatgctcactcatttattgaaccatcgtctaattaatgcttttgataacttaaatgcatggaggagtgtccttcgcccaatatttcaaaaaaaggagagagctcactcaattctcttgacgcacgagttttggacctaataatcgctgacctcatcagcaacaaagaaaaacagctacactacaaagacttttctttcaccaatccaacatcaaataatgattgcttcttgtttctcttttattagatatccaagaattcgtaaataaaaaagaacaaaccaatcatccataaacctttagtttaaagttcactttgcgagttttttactttaattcattatagtttcgtttaatcagtcaaattaaaggtcttcagttatctgatcaaatatggaagaagaggcttatccataagtggaagaaggtgacgaaatattagatagacaaacaccaaatcgagacgcttattgtctggatgaaaaaattgtaagttagatgattgtgtaatattctaagcaattctacaacaaacacacaagaaagacaagtttccttcttgcgcaaaccatggaagaagtaacattgacagatacaaacatatctcatcgaaacacaaataaaacgaaattgtctatttcttggcatacgtgatgagcatctggttttgctgaatcttgaaaccttgaagtccctgcattgcgaccgtcgactgcatctcatcagcaaactccacaaaggcgattcccggtttggcttcaatcattctaacttccttaaatccttggtactggcagaacaacatctgaagcaccattggagttgtctcgtgaggaaggttttggacaaagagaatattatttggcggagctggtgcctcgggcatattgggtttcataccaccagggtatggtacttgcgatagctgtgaaaagcgtggcaataagaacgatcatcagaatacaggaaaagaattaagagcgtcccccaaacgtatgaatcaagattagagttaagaagatgttgaaataactcacaggaggtgcagctccatagacacctggatatgctgagttcatgggcatgcccatctgtgtagaatcatggtgctggtctttctttttcttgccgcctcctgcacttccaaagacgatatttagatgcgaaaacaaactgtttgtaggttgtggagaagcaatgtgaatgtgatgtgactactaatgatcaaatgcagaatgtgggaatgagaaacagagcaataaatctcatgtacacatatgcagtaatggtcaaagtgagccaatgaagcaatgaagtaaaaaaaaagtgtcacctttctcctcatgtctctttctcttctcgcgaggaacaaatgtaccatcggccttggcaacaacatctgattttgttttggcatattgtattctctgtccacattgttaaagttaggaattaataatatagcaaagtgattgataagtatttccacaacctaaaacatggtcaataacctaaaagcaaccactaaacatataaagggtctttcaaatagaatccatgtggttcactaagaaaagctctctaatcagtagattcaaaccctaattaggtgttccactaactctaggggcaaataggcaaaccaaaacacatcgagtaagaagaagttatcaagaaagtaactggagtggaaggaattggtaccatctccttgtcgtagaaaggaaaattattcattttagcaatagcagtggaagcagactcggtgttgtcgaagactacccaagcttgtcctttgtgcttaaaggtcttaaacgccaatatctccagtatcttcccgaactgagagaacactgcattcagcgatttcttcagctctgtagaacaaagttaccaataacaacaatgaagagatcaatcaactcaaatcggaggagaagaagaagatatacgagacgataaaacaaaaaaaaaaaaaaaaaaaaaattaagtaccatcaagcttcactttttcgttgagattgttgatgtaaatcgtctgattcggagaaacctccgatcctcctccttgattagcctcttgcatctccatcgtcttcaccaaatctctccgtcgaattcggagaagattattagccggaaccacccaaaatcgaattaataaaaaaaagtgaggtttaactctgttcctcctaaagccctaataagcccatcagttagcccaatattcttattagtgggccgattaatatatttagcccatcaaaaaccctaaactgatacatattattagtagtttcacttcttatcttcactcccaagcaatcttcggttctgcttctttctagattttgactctcactttgggcttcttctgtgtgtttcatcattttagggtatcgatttgatagccggaggtaagagcaagaagacgaaacgtactgagcctaaatccgacgatgtctatctcaagctccttgtcaaggttgaggatttgactaaaaatccgtcagagattaaattttttttttttttaggcgaaccgatatctggtgaggagaacagaaagcaagttcaatgccgtgattttgaagcgtttgttcatgagcaaagtgaacaaagcgccactgtctctctctcgtctggtccgatacatggacggaaaggtttgaattttgttgttgtttaggttgttactgcattgagttcgatgttatgttacttggtggcgactcatgaactaatgctctgtgtgtttgattttattaggatggaaagattgctgttattgttggtactgtgactgatgatgttagaatcgaagatgttccggctcttacagttactgcattgaggttcactgagagcgctagagctaggatccacaaggctggtggagagtgcctcacttttgatcagctcgctcttccgtgccccacttggtcagagaacacggtatatcccattcttgtttcactcttagttcagttgtcgaaatgtggaaacttgtgctaatcgtttacttgttcgtgacgtatgtagcttagttcagttactatgtctcgtttcatgatgattggaatttgaggttactgtcctaactttcaaaatctagtggcttgtaagcctttgtttaaaaggctatctcgatgaaaattagagaatatctatctcgaggaccacttgtactcagtttacaagggttatattttcactttttattattgcagtagcgattgatgtagcattccgtaatgattgcaggttctgcttagaggtcctaagaacacacgtgaagcagtgaagcactttggaccagctcctggtgtgcctcacagccacaccaaaccgtatgtacgtcaaactggtaaaaaaattgagatagcaagaggaagaagaaggagcagaggtttcaaggtctaagcctagctacgaaacttcatggtcagtctgtgtatgacttgagtttatcttttaactattatggattatacttttacattgctataatgatatatatatatgaaaactaagtaggagaaaatctttctctcttttagttctgcttttgctccttatagtatttgatttgattagttatcataaatggcaaattggatttctgatgaactagagtaatacttgaaatttttctgaagtaatcggttacctttcgactttcaaaacttgtcttttccttttttatttgcgcattatcgggttttggattagatcaaatgtttgatcctttttcatttgggtaactctctttgtcaatacctttaattgatccaaaagatcttctcacgctatgattagattgtgtaagtgaagaacgtacgttgggtttcctcatctttgtaatgtctaagatattggcgtcagtcactgtctttctttctgattgctaataagtaagctggtacgtgttattgttccagtttttctttaatcttttggattcgaaatgacttgaaagaaagaaaaccaaaataaataaataaaggtgaggcaaaaaaacgttacaaggaaaaaagaaagtaataaaggggaagaaagggagaggaatgcgttggccatgactaggctcaatgtataaaccttgacttggtgttacatcatattacaaaatcaaaattttgaaaaaagaattatcgaaactacttagatttatctagtactatttattcttaatatatcatttgtttacaattttactaaatataaaagtgaccttaattataaaataatttgtgaaataaattgtgtttttgataaataatttactaaaatagggaattattttattttaaaatagatactagtagcgctatccttctttattttattgtatttacttcctttttctgtaaaatcaattcttactttttcacaaatgtccctattttcagcctaactcttttgtaaatgtttttctctcttgccttttcttgactaccaatatcctttctaagaaaattttaaaaagagaaagtggtcatctgaagtttcatagaaatgtgaatgattatttcttgtatcatcattttattaactgaatgaaattcaaacaacaaaacatggtcctagattgcattttattttggtgtgtcgtaaattgattccatcggaaaggaaacaaactaacaaagattgtttttgatattttggtatgtttttttactttttgacaactttgatagtacattattctagatttgccgcacggcacatcacatggaaggatgatgaaaatagaaatatatcccaacttggggaatgttttgaccaatgggcaaccttatcttgttcatcaaatcataatacaatcttttctctctcttattgctgttggttaaacaataatcaaataaattacccaacatggcaacttaagtgaatacccatagattcgctatttctgcggccgacgtatgagcaaacccgtgaattaaaaaaacaacttgtacatcgaaatactattttaaacaacatttcactaaccttggccaatatattaaaactacgttaactttttgtatatttataataattgtaatgctgttgaacattgagaagcaagaaaagtagaaaactgcgaaattgagtgagaaatgaaaagaataataataatggtgatggtaactaattatagaagagcatataatttgtgacccatgttgtctatgagcgaaataatttttgattttataactattaaatttaacatgaaaaaggtgtatagtatcaaatctaaatctaaatgagtatatgtgattttgggggaaatcacacaccattgtcatttgtatattattatatggtagaccaatgttatatatatttttaatcgatcgaggtagaccaatgttatgtaaagtagaaacaagactgaaaaaggcgtagagagcaataaggtcgtaatcaatttgtaaaacagactagaaaattccaacggaaatccaatttacattcctcttcacgacaaaacacttattaggttctgatgtgtaaaaatggtcttaaagccatatttttgaaaatgactcaaacgaaaggaaatgaaagaaaaatatatatttttattactaaaaagcaagagaaaacaagtgctagagctagcctagagatcgatccatcaaagcaaagcaaaatgaggaaggccatctaagattagcatctaagcaagaacaatataatgatattcgtccgtgtgtgtttattaagttatgcatgaatttctcagtttgactcgtgcatatataccccgtgtgtgtttattaagttatgcatgaatttctcagtttgactcgtgcatatataccccgtgtgtgtttattaagttatgcatgaatttctcagtttgactcgtgcatatataccccgtgtgtgtttattaagttatgcatgaatttctcagtttgactcgtgcatatataccccgtgtgtgtttattaagttatgcatgaatttctcagtttgactcgtgcatatatactatgttaattatttattgcttttgacatccatatctaaaagtaaataaatatagactctgcctacttgattataccagatcacaatcaccaaatcatgatataaaaaataaataaacagaagtttagcataatgactgaatataaatcatgattctaaataaccgactgaatcataagaaattgcgcaattccgtaatcattgttcaattcaaccggttatgtactcatcatcacaatcgtgttaaaacaaaacaaaacaaaatctgtattagaaaaaaatgggggagaaaaagacaagaataatgtatgggatgctcgagagtaatttgagggaaatcacaagtgggctgaagaacttgttgagtttcttttgacatatcaatagactaagaagtcacaagtgggctcaagaacttgtcgaattactttcttttggcatatcaatagactgagaggtcacaagtgggttcaagaactaggaacttgtagaaaacttgaagaaataaaataaaaagggagggaccaaatggtaaaaataaaacataagaaaatatttgctataaatagagaagaggagctctaaaaccccaaacacttttattaaagaacttgtccactgtcttcttctgcccattttaccattttgattaggctctctgtttctctttcttggttctaaaagatatccgtcactctttagtattatgggaatcggtgaagaaagcacaaagcctatttgggggagcgtgagccacacgtcttcaggctacgctctcaacggcaaaatcatgctctcctccgtgatcgttctattcgtcgccgttattatgatcctctgcttccacagctacgcccgttggttattccgtcgtcacaaccgtcgcattcgccgccgtattcgttctcacctccgcactctctccgcctcaccccgagaccaagctctcgaccaggctgttctcgacaagattccgatcttcgtttactcctccaagaatccaccaccaccagaagagaaggaggagtgctccgtctgcttgtcggagttcgaggaagaagacgaaggccgtcttcttcctaaatgtggccactcttttcacgtcgactgcatcgatacttggttccgttccagatccacttgcccgctttgcagagctccggttcaacccccgtttcaggtcattgaaaccggttcttcttcttcttcttcgccgttgacatttccgacggagggttgcgagagagaaccgattgacctcgccggtatcattgtggatatttccagagaagttgaatttgaaggctcaaatccgggtctacccatcgaaaacggatcaaagtttccgggtagtcgggttttgtctttaaaaaggctatggagcatctgattgcgggcgggtaaatgggtttctatttttttcaaaaaacgcatgaactttgacacgtggaatttatatcagcacacgtggccgttactcctggggaccactgagcctgagcgtctacttctaattagtctaatcacattaatttgattacccgttcattattattagatttcgaagaaaaccattcggttgtacaatagtaagttaaagttattacaaatcgtattgaatcaggcaccactaaataattatttgattaaaaaaacaacacatgaatgattaaataatttaactaattaacatatcatatatagtataaggttggttgattatgcgatcagtccacccacgaaaggcactccggtttgtccaatccaaccttcaccaacaaggaaattggtgaccgtgaaattggaagcatcagttgcgttgatgacgtgataaccaggccaagtgactcggtttgtcgtgtcagaaccaggtccggtattattatattccgcgtagtaaagtgtgctcaatgcaaaatcaccagaccatgcattccaaccactcggttctagaaacccgtctatgtaagtttgcatgacaacggttctagaatattccttccatggtcgaccaagataagtcttcactgtatagttgctcgtagccaaatcatctgccggtcttatagtacaaccatgaattgccgtcccagtgttttggttcggatcagtacgaccttgagccgtaacctcgttcgattgacctttgcgaggttgacgtggatacaaattacagttttgtaataccactgcagcgttaccaaatataaaatcaacagtaccatagacatcacattcacgataaaactgtctgagagaatgtgtgtataacgtgtcttgataggcttcaaaactacaactgtagaaaacagacaagtccccaccactcctcaatgccacagcttggcctttggttggtcctgccgtattgcggattgttatgtttacaccaataaagttgggacctgatagaactgccatttgtgaacaaaacgtagagttagttaattattagaattaaaaaaaaaaaactataaattggactatgaaacaaaatatttgtaaagaggaaaaaaaaaaagtttattggactatggtattaggttagttgaggacacgacgaattgacgtggagtcaagactttcggtggaccatccgaccaagtcgccatccattgcatgggaaagtctatactaaaaagctaagtggacttgcaatatttttatgttcaacttacaacagttattgtttcttaattaatgatctacatatttgataaacaaaagtttctcaaacaatagttacatcgcacttgcacgaagaagccatgttttgtgcacatgtcttcatattttctaataattttaaaaatcgtgtggacaaaactctaatgctaatctaaaccgtatattatgttctaattttttcaatatgaagttggttttgtgtgattaaatgaaataaatatgaacttactaaatgtggctgaattgaaagttgtccatccatcaacgacactcctgtttccggtgataacggtctggttgatgccgtcaccgatcatcatcacatatctcttgttcttgggaacttccacgtattcctcgtacaatcccgccgttacgtagatcaagaagtaaccgttactaccgtcagttttatttggtgcagctgcaatggcggcgtttatggtcgtgaagtttcccgtcccgttctggatcaccgtcacaatgtcgctcacctgaacggcgtctgcatccgattggagaagctttcttctagtcacggtgttgtaaacggcacgtgccctttccgtcatctttaacggtaatttaccgttacggaaaccaaaaaactttttgaacctggcttgtggttgccaaatcggtctcgatctttgccttcttggcacccaacctacaaagtcaaatacgaaaatgcattttcatattttagtttatatatgtacaggcacacatatttctcctagtaatttgtggttgtgatttctattattatttctgacgattttttttttttgacaaataacatgtattaagcatttttgaatcggatggtggcaaaacgacatacatccacaaaccaattacgccacaagccatgtggtcaaaagatttctcctataacaaaatgatgcattcttcacgaaagcaagaatagtagaaattaaaagcaaattaaatgaagaagatttcgtgcaacattatagacgattacgtgtatatttaaagtatcatatatgaacaaaaaaaatgggaattacgtgcatgttggataacttttgtttatacctttggagaaaagggcaagagacaccccatagagttttgtatcgttgaaaagatcaccggaaagaccattttcggacgccgttgatttaagtccttcaagacaagtctgctcattggtgatggcagcactcagaaatgtatgaacatcctcggccctagataacgacagtgttttggtggaatcagccgtctgtgagctactaaggaggtagtccatagtcaggctggctaggaatttgcagtcttcgagagcccctactgtggatttagcagccactttgcctttccggtcaagttcagcgtcgatcatcgaaatgaaccggcgggctcgtgagagggatcttcgtagagacaaacgtccgtaggaatatatatctccgggctggtttggaagaaccgatctacaataagatggatccggcgcgaatctacatatatttgacggtgaagtggcatttccaatggccggtatttgggcggagataaaaggagatggtaacgaggagaggcaggcaagggtgaacaagaacatgagtttctgagacatcctttggttttttttttagcttaattgtgttttggtttggagatattttgctaaatgttttggattatatatatagggttttgagaacgttgaatttgaatatacatacaaattcaagtcaatgataatgtgtgtgtacatactacatatataattgtggcggtgtcaaaaaattcaacatatataccatattgtgataatattcacacgcatagatctgtctctcaccaaaaattagataaataatcactgtaattaaggagtaaattccatccgtgataattatatataaatgggtgtttaatttaagtttaaggtcaattgagtttttttttttttacatgaaagtcaaattttgaccaaacttctgttaccgcaatttgaatatgcataatcagggaaaggttttcgtaatataaaattgtcaaccaacgttaggcatttcaagaaaaaattcgattatatatataacatgttggtaaaacagcacattacactacacatcagcaaaaagtcaagatcttgacattataatctctgatagaccattgcaaataaaattcgttttagaactgtatatatactaggaaggttccatgcataaggtgaaaaactttagaatgatgggacatttggaaaaattattttggacacgaataccaatttggagtgtttcaaatggtaattcatttgtttaacttttgattttacttccattgccaatttgccattgcccaaagcgtaatggatatgattttatagagttgtaacgtatccaattattgatcaattagttaatcttgtgcattaaattggctggtatgataattttttcttttgtttttaagttagaggacaggcatgagatacgtatttggatatgtttctatacaatatacacagtgacacaatgaaatcgaatcagttttaagagaatgtacatacatattgatgcttttatttgtcgacagatattaatatcttacttaattcattacctacacatgtatctgaccgtaattccgttatagaatatacattaaaattttattgacagatgacaaattatttatggaaaattcaccacaacatacatatagcttaatcatttgtgataatgctatttgaacttaacaaatatatgtattatcaatgtagattagtgtacatattgtcatgtgaagagtatacatcgtagagcacaaccctcataaacgtaatacaacatgcattcgcatgcaacgaaaacataagcatagattgaatgtagcttgtccattatcgaattttgggtaaatatgttcccagtgttgtcttttgttgtctttttttttttttttttttttttttaaaccatcttttgttgtctttctattcaaattcaagcatgtgtgatagaattatctgaccagaaaaggaaaaatggtttagacttgagacttaagagacctggtgtttttttatgggaaacaatgtctactaacttttttcttttcttttaaagtcttaaaaaataaatttaactcctaaaaaattatgaatcatatatatcttccgaaatccagataaccaataaactcaaaactacattttgttttctttcttttctttaagagatatttttttggttatactttttataaattatcattatcatgcgttatttatttaatattttttaaataaatcctctaaattcggcaagataggacaatgagtttgacttctgatcaactaaaaaccgtgttccatatccaagtccaaggactgaataaaaagtgtatctctgaacggcgacgttttatttgatatgaaagtataacgcgtgaagaaaattcatgcaatgccaaaggaattggcccgtttgcgtaactcaagaaaatttaaaccacttttgtaaaagtcaagcatatttaagataatttgtatattttaatgactcaattttcaaaattttgtgtaatgtatctacttaagctgttaagcaaaacccactagcactagttgttcaaattacgcggaaaaagcatgtgccttcttcatatttaaggcaagtttctttcgagttgtgtttattaattatttgactctcaattttgtcttgtgcccttctgtagtaattaataatcactattatacgaagcacttgtcccattaaagtgtaataatttgatagtttgcttattggaaactacattaacgtacggaggtaattatgcactgtataaacactataattatgcagcataaatatatattcttactcacaatttcaaatttagaagatattggattccgtaattatattgcaattttgatctttgatttatctatagtgtgtataaaagttaaaaatcacgtgcattaatagatattcagtatattttcagtaattgttgcatgtgtgagttatgcaatcaaaaagccactaaatacataaatatattatgatatatgggccaatatgacccattagggcattagaaactgaaaaagaaaaaaaaaaaacattgttaaatttagtagccgttggggatagacttgtcctgagtttcctcagaggagaagacgaaagggccaacggtgaaaagcttcatcttaagcttgttttctaggagacgatagttttggagaatggctccgctgattccacggttaatctccgtcggaaaagaacacgtgtcagatggagaaagctcaagaaacgccctgcactctttgatcttgatcaccttcttataatccttcacctccgacgaagaaagcgtcgccaagaaataaccctttgcatccgtcgcttggctaagcaccgtcacatcctccgcttcgtaaccatattcatcagttctctcacatgtcactctcgccactgcacctgtccacatatatcaaacaaaagcttagacgagaccttgaactccaatcctagtttacaatatatacatgatgagatttaccttggataggtgtaagcttagatcctcgtttgcagtagatgagaccttggactccgatcatcgaggaaagcagttccccctcggtgattgtggctattccggcggcaaacagagacgagagaagcagcatgtagggaatgtagagaatcgaacaagtttgggccattttttaaaagtttaattcaatatttgaatatatgtctaaatgtgtttcgttgatgaatgaaagttgtaccatgagagttatatagggttttagcgataggttaatatataaatccaaagttatatgagaataagggatctgacttgagcgcacgttttagctcgtgatcctaatcattgcattcttatgctcctaaatgtgacttttgatatagtataggacgtgcagagacacttctttttttttttttttgatttttaaacatcagtgtctgtttcaattccgttcgatgatagagctagcgagcctcttcttttcaccagaaaaataaaatcgctatataccttttctctttctaatggtaagctttgtacttgtctatttgagattttaaataaatattaaatgaaagcgtttactaaatacttaccattttaccaattacgtggaaaaaaaagtactcaccatcaccgcgtcacgactaatctgtaggcaacatataagacgaatagaagaaagtcccagacccagaataatgttattaatgcatacgtttttcaacttctctttactcaaattttaagaagctttctaatgggacggatgatgaccgtcaatgaaatatagttcttaatttctaatctacaccaaaactgtcaaagtttcaacggaaccaattgggataaaacaaaaaatattatctttaaataatttgttaaatctaccaagtatttctttaaaggtggttttaaggtaataatttatgacagtaatggctaaaaccaatctttttcaatcagacacatattggatgaaagattttcactgaaatgtaacgattttgttatatcagtatattggaattaatcatccaagtaacatcttatatgcattctcttttcttttcttgttgacagctttttcttattaggaaactaagtaatatttcattaatgtattattattcaacatagcaaaaggatagccaagattaataaaaaagaatgagaatacaaataaaccgcgatataatgactgattgtgatccctagtaaacgggtttgggagccactggacttgagaaatagaaaggttcaagggtgtagagggtcaagttgtcgtggctaaggaacttggagttgtcgggagagagtggagctccggtgacacctttgttgacattggtcggagtcttacacgtgaagaccggagagctctcgagtttcactttgcagctgctgatgttattcaccttgtgtgagagtccgtacgtgatgaagtagaagtatcccttcaagtccgttgggtagctagagattgtaaccttagccactagctttccatatgaatccacgacaggacacacaaccttaaccttgccccctgtcaagtacatcaccggtttggtaagatgtcatgggatgtaacacatataatgtgaaatcgaaaatgtagttgcaccttggatggggtaggttttgtagccagatttgcacaagatgaaaccttcgatggcgatgtcagggtttgattttggcaagtatggagtcttaaccggtgatgtgtaggtggttgttggtttgggaacgtaaggttgtggttgcgcatagtaatcggcagtagccacaaccaccaccatcgcgaggaggaggaggttagtggcggcgcctgtggatgccattgttagtagttgctcgtctgttgttggttgtttaaggtctgatcacaagacatggcctcctttatatatgtggaacacaatgtcgacagaagtatcttaagattatataggacaagtgtcaactagatgttggccggaagagaagagacataattgggtgcacgtttaaatttttatatttccccaccaaaacctaataatattgatcgagaaatgttttgataattattactcatcacactacaccaagctaggatccgaattgagaaggaaggaattactgttttgtggttaattcttgagtgaagtatttataaatacgtatttacatgcatgattagataaattaactaaaacaaatagaagaatttggtaggaattaatattacgccatgtaatatagtatttgatgtgggagtagaaataattaagaaagcgttatggttcaaatgataactgcaaattctatgattaattaacttattattatttataagttgttaatggtagttgcaaaaggttatagagcacacagtaaataaagtagatgatattaataaaagtttctagaagaacttggtcgtcaagcaaaaacagcaacaactctgacattgtctcactatataaaacccaaattctctttctcttttaggactcggttcaaaaacgaaaacgcaaatacgtcttgttctagtttggagttggaagcgtaaaaaacaaaaaacaaaaatgtgtgggggagctatcatttctgatttcatctggtcgaaatctgagtcagaaccgagtcaactcggctctgttagcagcaggaagaagcgtaaacccgtctcaggtacaacacttttggtttcgagttttgtttttttattataaaacctaatatatccgtttctgattcgggaatatcttcgaacagtgagtgaagaaagagatgggaaacgagagaggaagaatctgtacagagggataaggcagaggccatggggcaaatgggcagcggagattcgtgacccgagcaaaggtgtacgtgtctggcttggcacattcaaaaccgccgacgaagctgctcgagcctacgacgttgctgccatcaaaatccgtggccggaaagccaaactgaatttcccaaacactcaagtagaagaagaagccgatactaaaccaggggggaatcaaaatgagctgatttcggaaaaccaagtagagagcttatcggaggacctgatggcattggaggattacatgagattctatcagattccggttgccgacgaccaatcggcgaccgatattggaaatttatggagctatcaagactccaattaaatctcttatttcccggccggtttgctcactcattaatatgctgctaatttacttgttttttacttaacaatcaagtctaatttgtttccatcaatatttcagataagagtaaagcttcaattgtctttaaaaacagttttcagtgctttatataaatagtttgtcaagaacaaacacactaaacaccgtcgtttatagtcttcaccatgttttttttttgtttgattagatatgatatcacagaaacaattcatatttaagtttaagattctcattctcgttttgttttcaacacctaaattttgaacttcaaaaaaaaataaaaataaaaatttaatatgttaagtatagagattttttttctttcaaaaagaacattaaatgtaatcatggagacagtctcggggaaaccgcggttgtggcggcggcggagcggaatctgttggcttgaggacgctcatggtttcatcgtctaaaggtgtgtcatgtttgtattcttttacacctttacgctacgtcataagcctcgttcaatttgaggtctaacaaaagcccagtaaagccaatccaattttaatcggcccaaagagtaataaatcctagcgccaataaggctcgtaccgtgagcccaccgaggagagagagactaacgaaactcagaaattcttctcgctgagtactcactctcttattcaacacaaaaaaaaaattgatacataaagaagatcatagtttagccgtaagatgaagaacaatgttgccctcccaagaaaatttgaattgtttctggatttgctcatttttattataacctaaataaaagcatcagaagaataatggtacttgaagctttggctccaaaaacaactatcaatcggagggaccaatcatcttctcaggaacaacaagtgtatcaaactcttccgcagtaagcacgcctaaattcagagccgcttcctgtaggataaattaaaactcaaggtttaacatactatagaacctgtttacaataaatttatgtaatctgcattgcagatatatttgctatcaaactgctgatgcaggcaataacgtctttctcttgttgccaatcaatttcaattctctataataaattgtttcttgtgtttaccttcaatgtacatccttctttgtgagctttcttggcaactgctgcagcattgtcatacccgattttctggtaaagaggataaggattccaaaactcagcatcaaagtacattcattagtaatcctaatggtaaaacggatgactaaaaaggcggagttcaatatttagagacttaccggattcaatgatgtcacaagcataagagactacagataaatacatggaacaaaataatcagttcccagatatcattttcgtttgatggaaaattttcagaccaacaaacgagaataagcctacctcgtgcaatagctttgagattctttctctgttggcctcaatgcccctcacacagtttttctcgaacgaagctgaagcatctgctattaatctgacggactgtcaaagaggcgagatcaaatggttaagactggtatatttttatataaaatcaaggaaacagacgtagaatgaaaatgattgacatacatgtaaaagagcactcgcgatcaccggcttgaatacattcaattcgaaatgaccatttgacccaccaactgtcacagctacatggtttcccataacctgcaatgttattggttgcaacccaaacagtcaaggaacaataatacaaccttagcatctagattcattggtctgtactaagaatgtattgatagatgggacttacctgtgcacaaaccatagtcaaggcctcacactgtgtaggatttaccttcccctgagaaagagataaaaattcatttgaatcaaaactagtgaaaaagaaaaggacagaagagcaaaggaagattgcattcatacaggcatgatactgcttcctggctcattttcaggtagtacaagttcaccaagaccacatcttgggccactatataaagacatggtaaaccataaggacatagtgcatgttaaagaaagaaaaaaataatccctatagattagatccataccttccaagaaaacgtatatcattggcgatcttcatcagcgatgtggcgattgtgttaagtgacccactggtttcaacacaagcatcgtgtgcagcctggaaaaagcagaataatttagcaactgatttcaccgtttaggaacatcttgtctagttggcaccagaggcagagctaggaatgggtttcgtgtcaataaataatagaggtagtttggaggctaccagagcttcaaacttgttttctgcagtgacaaatggcaagtttgtttcttcagctactgcagcagctatctttacatcaaacctgtacagatattactagtgttactacagtggacaaagcccactaataaaacatcaaatttaggagagatgaacctgggatggaattatggaaataaaattagaaatgagatataccctttcttagtgtttaatcctgtcccaaccgcagttccaccttgtgcaagctggccaaacatttccagcaagttagacctcagtataaactggagaagtacaggaaatcagatccccaaaagatatcatttcccaaacctgatagaggcgaggaagagtgcaggtgactctatttagtccatacttaacctgcaggtgagttccagattgtatgtgattttcaactttgttagacaaacacagttttctgaacaaaaccacttacttgagtagcatagccaccaaattcttgtcctagtgtcaaaggtgtagcatcttgagtgtgagttcttccaattttcacaatatctttgaactcgaaggactgccagaaacaaggtaagtttggaaagaattaggattcagagcagatagaccataaagcccaagtgcaaatgcaataggaatgtgaagaggtctagaaaagcaggattatataacaaagtggcagggtcagaagatgttccttaaacgcaacaatgcaacatctacaaagcaactctcacatacaaatagtaccacacagaactaatatcagaagtgatccatgatactatagaggtcagagcaagttttatttttaaagagtcttgtgttgcagtttagcgactagatcaagtgtgtcacttaagaaggagcaagaaaaaagtcagaccttagattccaaagtgctatgcaaagtttttaaactagggatgagcctcgaattaatctcggttgcagctgcaatgtgcatgacctagacaaaagccaaaaaaaaaaaaaagaccgtcaattagaagttgaaagggaagtgagccaacatataagaaagaaaaattttaaaaacttaaagcatgtaaaaagtattggtagctggaatgcaaatgaaagcttacggtaggaaaagtgtcgttagaagattgtgatctgttcacatggtcatttgggtgcacacatttctcaccacgtttgcgaccaagaatctcagctgctctattagcaatgacctgtgaagagcaaataacaaggccaaaagaaaatgaaaaaacataaacagaaagccttctcttgtagctagctatatacaatgagatcctcaacagatgtctcaaaaactgcaaagaaattacctcattagcattcatattactctgagtcccactaccagtttgccagacaacaagggggaaatgatcattgagctttccctcagctacttcctgagcagcttgcataattgctttcccaatcgtcggatcaagaccgtattccatgttaacctataaaattatattaactcaattcatcacagaaccaaatacgagaaagcaaatgagaattcagatgcaaattaaccccaaaacctggagctagaatgttaccttggcagcgcatttcttcaagacgccaaaagcgcggacaattggttcaggcattcgctcgcgctcaccaccgatttcgaagttctgcagcgatctctgcgtctgggctccccacaatctgagacacacaacaaataaaacactgtgaaacgtttccctcgaggataagagaaaattcgacgttgcgtaaagatcagatcccgaacttatcggaaggaacttgaatcggcccgaaggtgtccctctcctccctaaacgaggtcgaataagatctcagagaggtggcataacgcagcgccgtcacagttgttccgccggagagccgtcgcgacgcgacgtaaatcgacatggattcttctacctgacagtaaaactgcagtcaacaaagaggcgagcgaagaatcatcaaactacgcatttctcaatccaggataggattacgaatctgtaaacgtaaatagcaaaaacaaaaaccttggaagacggagatggagagctgagagaagacgacggatcaagttgcacaagagcagagggagaaagaaagatagggcaaacaacaaaaataaaattataatattcgagaaacggattcaacgaatcagaaggttggtcgatatttgaaaagtactatgctttttttttttctgttgtgaaataatactttcccaaattttacatatttctaataaaatatttttatactagcaaagattgcaaaagttgtaactaattagaagaaatgcaacaagtctctgatttgaagcattatagaatatactaaaaaaactctcaagcaaatagttaacaaacaaatctttcatattttttatgttcagctagtggaagaatatacatagaacagaaaagtaaaacaaaacccaagaaagagagcaacaagaagaaactgttgttgcattgtctagctattgtctttgtctgtgttatgtatataaaagctcgcacaaccaaacgagagaagaagaaacaataaaaaccaatggatgaaaaataaacaaatcaaaaccaataagaagccatgtgagtgtgtatgtatgtatccgtgtgagtgagtggccttcaatgtctggcgttagtagctttccgcttcatatcagcaggaccgaactgtttcatgccacgaggaccattccctaccttctgtgaagccaaaggacgtgaaaccgtgttgtttgagttgttcctgcattttttttggaaccattcaaaagaaactgttaaagattttctatattgttgtttcatttagtttttgaccgagtaaaggacacttacctggattgaggacttcttataggttttgagacgggtttcttgagttttgactcaatattgcttcttgtaggtatcttggtggactggttgaattgccagagcaaatctggctcagatgagtcacttgtggctgcatctagatcgtctgtgctgttgttgtttcccatgaagatgttgtaagaatgttcagagaatattcttgaagtgtctgaagccaaatctctcctgtaaaaatcttccggcagaataccaataccattctctgttgtggctcctccccaaagactctccactcttctcatctcgtcttgtctgttattcaccatcaccttgtcaacccactcgctggacccgaaacttcggtcatcctctctgtaggcttgtcctggacttgctactggtggccaaggtggtgagttcactgtaatctcctccacttcacaactctcagatttctttgtcatgatgttattgttatgaatctgcaatcactcagaaaacaatgtccactttgagatctgattttaaatcatagagaaggtgcttgagaaaagaagaatcacctctacttcaccagttttggctttgtgtttctcagagccaccaggagttttcaagatgttgttctgctgtgactctgcttcttttctcgcgagtgctgctttaagagtagcaatctgtaaacaaagcaaaagcccatgtgtgtgagacaatcaaatactatcaaccaagaaagtgaaaccatcagattcagttaatgcaaaaagagaaaaaaaaaacctgttctttgagttccttaacatctgaagtatcattgttcactcgtgcagccccaagctcaaccgtagctactctctctgcaaacttcaaagtgcttattgtttccccaactgcatctgcctcaggactaatgtggacaaacatcaatgtctttgcttgtcctcctgatataacatatttgcaatcccaagttaagaaaaaggtgagtttttatttagctgcaaatattcaggactaaattacttgtatccttttaccaagagagtcctgaaggagttgtgtgagtttgctgtttctgtaaggaacatgtgggttcttgtgagctagcgaagcaatcacatctcctaaagcagagagcgatctattgatgtgctgtgcttcttttagtctgtctccagtaacctcggatttgtctaccctctcactgcctgctagatccacaagatgcatgcatcctcgaagcacagctcctgaagtcaagtctcttccttgaacatgaacagtcaagcagctgcaaaaaaaaataagattgaaaaatgttatattgagtaagactcttgaagattattttttgttctcgctgctcttgaaaacattttgtcttttacctatgagaacgactgcttcgatcattcaaggctgttgatccaacggctcgattcttgtgcccagttttcattagatcaataacatcaaatgttgaagagactggaacaagacttgcatccggtacacttagacccttttgagagctattcctgatctctaacgtaccaaaaaatgttaaggaatatgaaactgaaacatgaaaatgatctctctctctctatctaatcaaaacattaagaagtatatccattcatgaaaaaggatatcttttattgcttccatcagtaaccaaaaggtctctaacttgctcattgtaaatctcaatcatctgaactgcaatatcgtagcggaatgtgtcttttctttgttcagcaagaagaaacagatcaccaagtgctctgtaattaactccctggctcttctccgttagatctcttggtccactctagaaaatttacaaaaatggaaacattaaaattctctagcttcaaatgttaacagtcttcaaaatttattcaactctaatcttaccattgtgaatgtttttcctgatccagtttgaccatatgcaaatatgcagacattgtatccatcaagaacagaacggatcaatggctgcatatcagaaaatacctcttctacaaagagcaagatagatccttcaggttaaattcaatcactagagaataacagcaaggcatttcaattacattaccttgagttgcagatgggccaaagactttgttgaaagtgaaggatttgagtgattttccatgtctagatgcagtattgatccctatggtatcatcctccatgttcccaattgtactagaaaagctggattgtccaggcaaaaatggccgcacccgacaataaacacggatgctacccttgagatcctgcacttgattataaagttttcggttttcttcaagaactcggtgatagccagaagcagcatgagcaaggccatgaacgtgcatacctgtagacagatatagattcattagtgtcaaattcttggatatccaaaaaaaactttcttagaaagtaagagaagaaagatctgaataccaagagaagagaactcttcttgaaatttcttctgcataaattgcataccagcccttgttgtgtagagcgtctgtcttagtccctaataaacataaagaacagcagatacactcagaatctgtgctatcctaaactcaaagaaatggtgggcagtgtagtgcttacttctatatcttcttgttgttggttgaagattgtcagttgtttaaattggcgagttttcatcttttcgtcaagaatctgactattgtgatcatctttctttattgctttgaaactcttctcttccctctacaaaggcacttcattaatcagcaaaaacttctaagttttattttacggaaataaattgaagactttacctctctttcaccaagaggtttaagaaatgatctgttgttctgtgacgaagttgattctcttggagctgctctaaccttcgcatgacagaactccttagattagaagatattttgtggactaaccaattgaaccaagagacagacgtagaaacaagaaacttaccaactcatactgatttgtaactcgattttcaaactcttcgactactttactcagcagagattcaatcagctgttaccacaacaataagcacttacatcaagccacaaagccagacgatttaaagtaacgagaaatgacaaatgtttttgtatagcagagcaggtaagtgaactagtctcgaacttactttgggcacatcctcaggctttttatctgatagaacagcgcgaacaagtgtgctcaaggaactgggactggactgaaaacataagcacaaagaccataaacatcaaatattccacttgagaacacagaaccaaccagagacaattgaagaggccaaccagcttgttagaatcattctcagagggagctttctcattgttgatcgaggaggttctcgataaagagttcatgaatggctctgagttttttctgacaaaagatgacttcccaagtgcaggaggcttaatgttgccaccaaatttccaaactccaattccaccactttgtttccattcatcatatgatttgatagccaaaacacaattcacaactcgagaagcatttcctccctacaaaaaaaaagagagatgcatattcatgagcagcaattcttgaacattctgagaaatctcaaaatcggtcttgagcaacatacttgctcgagatcagatgcctcaaatgttggaaaccccatttcctgtatagcaacaagaaagttcctaacattctcaaaatactgaaatgctgataacggagctccatccgcaacaagaatggcatcacaaggactttccacaacctgaagaaagatcaaatttctcaaactctgctgctaaaacaggatttaagcaaaaaaaaaaaaaaaaaaagaaaaaaaagaagaagataatggtttcacctttgagacagctccaggttgaaccttattgaggactttacaaaggataattccacttcttaaaccaagcctaagcccttcttctgttggctctgcaggcaaatccttagctccaacaactccaaccatccttctcagccaattagccgcctcatatctcctcgatgctacgcaaatgcagataaaccataagctctttctctacaatttaacaaaactatcaaaagctaaaagctagtagtcactctaaggaagaagagagctattcaattttcacaataaattttgaaacccagaacaacaattttaatcagatcaaacattctgtgttatagatcatggatgctcaactatcagctatacacaattcacgaaaaaaaaataaaaagaatagagaccagcttcttcagctcgacgagacactaaatcatgatctctaagcccatttccatgttgctgcaacacatcctccattactgaagccacagtgaagcttaatcctccatcctccgtcgcagtagccgccatcaactccgtaataacaataataataagctcacagcatcaaaagcgaaaaccccaaagtcaatgaaacttcactgccaatgacactagtccgatccaaataagatcggagacagagagatatatgagaaacggtagaacaaacaaaaaaaaagaggatttgggagatttcttctctgttttttttggttaacaagtttggggatagatttaaaaggtaatgagagatttaattagaaaagaaaaaaagttgagaactcataagctccatgaatggtctcacaaatacaaggttgtaaagctataactgctttatactctgttgtcctcttcactctttctccttctctctattctttccgaacctcttgcttcgtttcttttttccctccctaaccaaaccttataattctttataattcttttttcacgatcacgcgagaatctttttcggttagcctctaccgtttggattttattaaaaaccttactatttatatctctctatttaagtttgttaccatttactattgttgcttatattggattatatatcactcatcaatgatatttgttcctaatatattattactagatctagatgatactactgatgtttcattattactagtatcatttttaattgaatccaagatcattgtatacttttcttggaaaatggtcagattttccgtttcaataaaacttagtgggatcgtgttttgttttattatagtaaccatggaaatcgtaatgtgattattaatactagtattgtgaattactccaaattgtattttttctatataattatctcatttgtattttctattagtattagtaattgtttttctcttatatgtaagattgtaaatatgagacaagaggatgtgtcattaaaacattccacaaatcgatgtagctagtagcacagtagttgtgaattagttgattccatgtgtctttgcaatgctttagaagcaaagctaagaaagaaattttttataaaaagtgatactttagtattgagcgaaacaacaattaattgcaatgatttgttattttataatgttgttatatagaagaagaatgttaggcgagacattcctttccaaattatcccttgagaaatatagagttagttgaaagttactgcaattaggtccattacccaattactatttcattctcgttttttcctaataaaacgtccatttcattatttggtaactaacatatataggattctttcccatcctaaaagaaatatgtactataatcgttgtatttattacgtaaaattctcgtaaaaaaaaattatcttcatacatgactttactagagaacatttaaaaggtaactcgagaaatgttaaaagaaaacttataactcctctgtgaagagtatgttgtattaacgcatggttagtacttagttcatgtatcttagtgtgtaactccagacaagattaatcatgtaatttcattttttttctcataacataacgaacgcacttaattagtgacatatatatctataatcacggttttgaattccatgtcgatcgataataaacaatgtatatgggcaacgagtcaacatcctacggtgtcaaatgagatcatcacaccaccaaacattgacggcgatattttgtgagtccgattatgcacatattgatattataatgaatggaatttcaaattgaagaaaacaattgctaaaacaaaaagggaaaatatggtgaagatagagagacgaaccaaagtgggttggcttcaacgttcaaaaaattcaaatcagagcctcggaatcaaggttcggaaaccgagcctagcatgtaaccccacgtagagcgtctttgacgaggacacacgtctcacaaagaaaatcgaatgtggttggtgctacgaccgactgtcacccaagtcaataacacgaacgaatcgatatctgccacgtggtttcggttacattttctctctttcgaagagaaacgaccactcggctgacttggcgcgtgaccgtgtctcgcccacttcacgcctaaccaaacaaaaaaataagcataaataaattagaacctaaagaatttttttctttatccaaattgaaatttcgaaatgcaaccatttcataggagccggctaatataaaaaataattcaattttggtgattaaacagtagaacgattgatatataatcattatgtaaacataacaaatttactgtaattacttttagaaaaggcttttccattaaacaaaatagaggagaaagaataaagatgaagaaaaaacagagcatgtgagattcaatcatagttccatgacagttttgatgtttcaatacctttgccctttttaaaaaaaaagttaatttttaagcatcttttattcccctaataatccatcttttattccatttttgtaaagagattagcacaaaacaacatttatacaactctgaaaataacaattttattaaaatcttgactacacacttttcataaaatgaaacctaacctgaaaatcttataatcaagtgtgaattagattattctagctagcattatggtgaaacataacggcgtacgtgagctaaaatttacacatcatccttaagcagttatggccgctattgaactggaatcacgacatgggagatgattaggcatactactaattaaaagcatattggctaactactagtattgactttatttactgtaaaacatcctaaaaacaaaatgaagtatatgtattaaaaaaattaaactcaccgcagtgagatcacatgaatcccgatcccacaaacatgattgtaatcgtatgggggaattacaaattgctgccatcacaaaagatgtactttcgattcatatgtttcgttttttccctataactttattttcccttcctcgtttccttttttttcttgttgtttagcttaatcagggaatttcacaaataaactgcatttgacttgtggtgcaaccaaagaaattatgtcattcactcatttgcatttgactactacatttatcccataattttccatagtgattaaatgaagatttattgtcaagtcaaattgtatatatttcaaaaatattaaaataattgaaacgtttttacatatatattatttttgtatgaattgataaagctaacttatagaacaaagacacaccttatttgcatgcatagggtaagtggttcaggttgtgcagttagcaatacaaatttgttgaatatcaacgcaaaaatacattttaccaaacgattgctgaacaaacacacctttttgcatctccattttacatcaccgttcttttcttgcctttaaaatgggtgaaaccgtaagtaacagattcattttacatcacatgttaacaaaattaagaacagaaaaaagcaacaacaacaaaaaaagtatcccaagttttttatatcaaaaaggtaaaagcaaagtgcaacaacaacccatcaatttcattattattcgatttcattggccttttccttttcattttaatttaatttaattgatatatatataatatcatggatccaaagctcatctatgatctaacaagctatacacaaatccataaggcccaaagatttcataacactctgaaaaccagaataatagtataatcatttcttgaagataatatatgtttcctttcagtaacatgaaggcccaaaaaacagagaaataaaagagtcagttttttacactaaaatattctgcttttttgggtctctcaagtttcaacccattctcagattctgatttctccaacagagagacataataagtcaccagaaaagaacttctattttgaatcatttcccaaaaggggaaacttttttttacctgtgtaaaaataacttttaatcgtcatcatcatcaaaaaaaaaaaccggatttaaagtatagagctttgctcagaaggtatatgagtgacgaggaaacgatgcaccatttcgaagctagtgaaagttataactgctgcaggagttgttctcagtagattcgtggcgcagcctctgtaaaaaccagggaacccatctttctcaaacactttcttgatgcaatctcttactcctgagtaacgtttctcactgtggtgcccttgctcttgaagcctagctcgtactacctgcacaccgcgagatcaacatgtttcattcaaaccataaaccaaaagccaaactgatgactatgagagtagaggtttgtacctcgtgcgggtaagttaatgtggatgcaaatatctttgcaatcgaagaggcaactgctacatcacgagcattgaggttatcgactgatttatcacctgttgagttcacaaatctttatcttatcatatctccactaagatttcacctttcttttgttttacttcatccaattcaaaagatttatggattacctttcttggccaagtacactttgatcatctcatatgtgggaaactgaatggcaacatgactgataccagctagtgcagggacaagaccactggttggtagcacaaagagggagagaaaggaagacctttaataaaaggacatttgatccgttaacagaaaaaagtgttggctagatgaaaaacctgtacaatccgcgaattccctcctcataagctattctccttaaagcagaaaatgtgcttttgtatggcactatacccactctcattccttgtgtctgaagacgagtcaaaaaggtgttggaaatagattcttatattgaaacacaaatttacatcaaatgtgtagtgaggttcttcaggactaaatggcatagtaccaaacagctaggaaaggcaggtgtatactactaactaattaacgttcccttttgttactttctatgatagcacatatcaagcaaagaaaaaaacggacctgaagtctagtcttgacgacccaaagaggatttgtggcaatggtagttgcagctccagctcccgaagcagccaatacgttagctccaacgctgagtttgtgatctaattacaaatagagaagaaggtttgagttaaaggatcgcagaaaccgccacttaagcagctattaacaaggttttgagttgaaaagcacaaaccatttgaacaaagaaagctcttgagctggtcatacattgtaaaataaatctgcaaaagtccaataagacttattgaataagtagaataagtacaaagccgaattaaagaagatagatagctccaagaagaagaagtgaaaactcacggcccaattggagagaagagccatgacagtaggggaaagaccgcggtataagccacgcatcccttctctcttgaagatctgctcaagactgccaacaattagactacctgatcaaaaaccagatacgatgacatcagcaacggaatccaatttctgagaagatttaaagggaaagaaaaaggacaaacctttgatgtttgcatcaccgagcttaggcagcccatgaacctgaaacctcgtttttataacatcaagaggacacacaaacgtagccgcaacaacccctatcagaaagtttgaaactttaatcaaccaaaccaaaatctaagaaaaagttatgaaagaagcagatcagagaattaccggcggcggcaccggcggctgcattacagaggacgtttttggaattaggaggatgagaattagcggacatctcttggatctgaacggagaggaagaagagccttgaggaaacgcgtcaccgaagaagaagagaatgacaaaaaggttgtatcctctcgggagagggatttcgcggcgaacaagcgtcgcattgccgagaaagatcccaagtctgacagattttctgaactatctcctctctctctctctctctcttttaagaaatttgaagtcaacgcaacgaccgagttaaacaaatctgaaaatcaaaacgaagaagaggaacatcgaagaaatcgcagagaaacagaacaaaggctgtgtttttttgtttaccggaagctaaaaataaataataaaatatatacgattttaaaaatattttttacttggctcttatttttttaataacaaatttcgtttactaaaaaaataaataaattatactttctttctcagccagacgaatcagaccaaccaaattctggtcccatcagcattccataagtgccatcatcttttatattttctgctatacagtatagtactatatcacttaattaattttaatagatatcagttaattttaattttaaaaaactcttttcttttggatgtatgagccggggttggcagttggcacaatggaccacacctgcgcatgatacaaagccttggcaccttttgatgaaaactattaacccagacagcttcccttcacgctatatattacggcttggtgattaggtttcttatcattgacttgcctatgatgtaagcaatgacggttcgttaaaactcggtgctttgaacaatcaactacgtaatacttgtaacttgtacaatgttataaaattggtcgttacttggatttacgaatcacaactatacgtaaagatacgaattaaaagcctaaatggtcaaccaaaacaatatcatattaaacacgcattaatctcaatgacaacacgtcccctgaactaactaagaattttaaattgaggtggttagaagttacgacgtaaatgcaaatcttgattttattcggaatcaacttttattaatttgatatttaataagagtataagtttaatacatatcacaactttgacatcgataaccatttattttttatgtatatggatttaaattacctaatgggtgagagtaaaatcgaatttgaggacagtttaggtacgtcacggtgcacgagattcccctgagccatcaatatcgatttgtaaatctccaccagcttcttctcgtcatactccttcgacgccaaacccgacccgtacccatattcgccgtacccgtacgatgatccgacgacccgagaattcgctaggcgcagcatcatgttgacgtaagcatctcgaagccacgttaaaagcttcttaggcgacgcctttttcaagatccttagcttcggcactatcttgatcctccaaaaccgtctcttccgtgtgggatccattttgacccgctttacatttctccggcccgagctcgccttcttggcagaaccatctagcctttggtatcctcttaacctccgccaataccttatctccatcacgatctctgctcactatgcgtattggtgtctagagatccagagagagagagagaatgtgaacagtggagaatgtagtgagagagacggagacactctaggtttctttataaagagcacggatcgatatgcattcgataacgtaatgttcgatatagtagtatatattatctgtttttttttgttgttgttaaagtatatatatatatatatatatatatatatatatattagtatcttttttaatcattccgaaattattaatcgttcatgtgggaaaacattaaattattgctacgtacgaatttctcatccgacaacaacaatatgatcatatccaaaatgggaaagtcaatgctcaaatttatgaagcatacagagtttatttggggaaataaattcagaggacgcaatcagatgcggtttacaagcgagatgattgctgttgcaataaatggcagagatgtgtttaagctgtagtaatactctcaacccctgaacaaattctgaccgctggattctcttttcatgattataagtttttaaacaactaaaaaagtttttttaaacagttatacgtatgtttggccctttttttagattaaattgacgatttgtgttgtctcttactcttaggacctataatcagacaatttcgtataaatgcagactttaattaatactagtactaattaagaaacaaagaaccatcaaaatttgaatgtttcacgctgcttcttgtacgtttttttttgggttttaaaagtataaaaagagtgacgactcacaaaactaccaccaccaacctcttcctctcacgtcatttatgtgattgcggagtatccaatgtggcccatatgtaattcgtaaaaaggcctgatgtctggcccattatgttctgattatctctagtgttaattttttttcttttgaataaaatctctagtgttaaattaagcaagaggtacatgaccattttcctaatatttttgttttcagagagtcgaatcaaaatttcgtataattcatttcttatatgcgcatgttagcatatttaatttttgcaaactaacagctgccaatatcaacatttgttcaagtgaatagttgtatcattaccaaaggcaaaacttttttaaaaaaaatcagtgaatatccacaacaaggatatgtgacagtagatttcatgtgacaggtggttcaaacctttttttgaggtatccctaagctgttatttcctcactattataaaatgtgtgttaattacagctactaattgaaaagaaaaaaagagcttaatttgatgtttgtttaagtaggagtaaaaactttaaaaaacgaaaaaaggccaaataagagctgtgttaatcatcatcatcatctgttcacttttgctctttgttttttgtttggtttcctcaagccggaataaataatctgatcggagctccggtttaaagggaaatggatagtcacgatggatgtgggtacgggtcgggtcagagaacttacggcgttgatcggaggaaggaaatcgtgagtggtaagagaaatcagatctacgggactcgggattatcctccgtcactgccgcctccgccgggaaaagtagcggcgggaaggagcaacgcgtcgtcgtctttgcgaatcggaggtttaagcgatgcggagatgaagaggaagaagagaatcgcgaggtataaagcttatacagttgaaggtaaagttaaatcgactttgaagaatggattccgatggattaaaaacaaatgctgtcagattgtccatcgtttctgacttctgagttagaaacagcagtctcggtgcatgtccggattaaaaaccattgagagactttttttgttttggttatgttttctttgtagtcctacttaatttacttatttgattagctattgcctagtagtatatcacattgcttccgtgttacttttttcatagacgaaacagtaacggagatgatatgtacttttaaaaatgagacaaatgttttatttattggatgtcctttgtatacctcaatgacccattacagactttttatgaacacgagcctagcccattaataatgaatacgagcctggcccattactgaacctttttttttaacgcgaatgaagtttatgattatcgtggtcgcttgttcaccagagacagataaacttgggttcaaaagagtttcagaactaaccagaaataaccacagacgttcttgatcttgacaaacataaaatctcaaaacagtatcagttataaactctctcgactcctattctcttagcttcaagctatatgacttttaagaagaagcaacgaacgtggttaggatatttctcttgagagtgagttcatcagctttcactggacttatcgacttcccaagcacccgtccaagcctctccgtttctttgctagcatagtctgaacctttttctatgtagctctttgcgagtttcaagtaaagctttccatacctatagagacatcatgaaagcccaataattaaagaggcaactttcaacactcacactccatgtatcgattaagagttactactaacatacctcgtggtggagcccttaagggtacttgcttcctcttctatgcgagacaacactgccttcttctcatcttcactagctgcaactaactcttttaccaaagcatctaagctttcgactataccagcctattgagagtgtgatagaatcaacataagttttcaatttttagtgggaaatggtgattctgcagaagacatgtttttaccgaacctttgaagtaagctgccctttactgtccctgctggtcccagatttctcgttgatgaagcttacaaagtcatctaaatccctgccaccgtcataatcgtgaccagctttgttgtcctttgggaagaatttcaatgttgggaatccactcactccatatctgaatataaggtacttgtctttatgttttggttttatgaaacataaatgactttaaacagtaaaatcggtattaataaaatgcctgtccaacttacttctcgccaagggctttgtgtgcatcagcatccaaattggcgatgactacaccttcttcctgtttaaacactgtggctaccttttcgtatgtctgataatacaaagaaaaaagcattagttatgaagcatagatgactatatatctataataagagtaaacagatagttgagcttacgggagcgagtgatttgcagtggccacacctggaagatggaaaattgatattagaagatagcagcatgaaagcaaaaccatgacggtgaggagagagataacaagtatggttaccatggtgcataaaattcgactaggacatctttgttttgatccagaacaatctcatcgaaattgtcaggtgtcaaaacaaccacgttttgtggaactgcagctaattttacgttggtgcctgaaacatatttgttcaatacgtcagttgtttgcaacatagggaggtatgtcggaacaaaatttatcgaagaagaattataaagacaacaagtgggagaaacaaatggcgagcatatatcctaaagtgacaaatgatggtacatgtcgccaactaaattttagtcataaaccaagctaaaacaagtttcccacaaaagtaaatatctataatccgaaatgatacaagcttagctactatcatacctccttccttgttcacgtattcagccaaagcttcagcattgcgtggaccctcatacctattcaataagatgaacagaaaaaacaaacaaaatcattcactatctataaacaaaagacatccaccaaataagtaatctgcttagagagaataaacagtaaaaagcatacttttgaggttcaagagatcctttaggaaaccactgaatggttgggtatccactaacaccatatttagtacagacactcttttgctcatcacaatcaaccttcaccacaatacacaagttgaaacaatctatcattcatctatcttttaaacattggagctgaataccgaaatagaatcacactaacctttgcaatcaacacagacttagccttcttgaagcttgcccctagcttttcatactctggagcaagtttcttgcagtgaccacacctattattaaaaccatgtccaattccataaatgcaattagtcagattcaacagcacacatcagtaagctctaatttctcagtaaaacatataaatcgaaatcatgcttattaatccagaagactgcaatcacagatcaaaacatttctcgaccagaagatttacagatcaaaaaggatcgcatccgaattgagagaattgaaccataccagggagcgtaaaactcgacgagagctcctttatctttaccaacttccttttcgaagctatcgtcagtcaaaacaaccacatcgtcagctacggctgaaaccagaagcaacgcgagtaacgcaaaaccaaaccagatctgagatttcgccatttttttttctgcttctcacttaagctttgatctttagaacaagtgctctgctctctgtttattaaaacgttcttctctcgttattatttcttcccttagaacagaagatacaaaggaaaaaagaaaaacaatgacgtggcgtgatatcaatcgttgatttaatcacattaatacgaacggtgatcgagtggtctaattacgtggctgggttacatgtcgggctatgaatggtttagctctccacataatttcacggacaagacaattgaaaaagtctttttcctaattagagaaaagaagaagaccctatactttctttagtttcggaaaatacgcccttattttaaaaattaataatctgaccaacaatagaactgtacgaggctgattaatgggcttataactggaatacgggtaactgggtaagtaaacaagcccaataacgacatgatatattgctaggcttaacgaatcatcaaaacatttcaatgttttaagtagcaatcttatctatgatagtctgatatctacaaagtgttaacattcacattgttattttaagagactcagattgaacgtttcttttttaaagttgaaattttatatataaattaagaaatgattttgatacctggccaattcttcagcggatcaaagactctctccaacatcaaacctcacaaaacatgaccttaaggtgcattcactttgaaaaatctcttaatacacacacataaaactacaaaagtttagctgtttattagtatgccattaccatataaatttcagttttaaaagcaatttcttcagtttgtgtgttgagaaattatattccaaggcatactaacaattttcttagagataatttgtttaaactttagatatcactatgaaatttttcaattttttttatcaatcaattttctttttgttaaacaacatattagaatagagaagaaggaaaagtacatgacatcacgtgggcattctagataccgtggaaccaagtcggacttatgagaaagcgatctttttatttctcccttattgtctctatttacaaacttttcctttgtgttttttgtacatagcaaatttgcaagttgccttctgttcataaatttaatcttcgaaacacaaatttaatgcgtaggccgttgcccacaaaatgcatatgtctaggtccctatgatgtttataaaaatgaagtcgttggtgcatgcttgctattggtcatctaatcactagttagaaatggttgaaattgtttttttttcataaaatttgccgagttcaagattcttaactcttaagatcgtatatcattttcggtctgcaactaagtttcaatgcttctatacgttaactcaaaccatgataattacattaacattataaggacgcatatattatagtgttatctgttgtcaactatatatatatagattacttactactcatttacagaattgggttaatttcatgtctctacgataagaaggacaagagttaatttgattgttccaacatccataataattgaatatatatctacttgtttggagtttcgtacaaaggagagttggaacactcaatgtgaagattcgttcatgtcacgttccagtaatcacttgaatggcacgtgatgattcgcagatgtgatgcagctttctgttggtgtacaagaacaaaaaaaagggggaaaaaaactatgtttactcgcttcaaaatgattgaggtaataatatttggccggcaatatcacaagagaaaaacaatgatagttctcgtcgctactccgattgtttgacaatgatgatatgtattaaattttaggagatgagattgattaccagttcagaaatattaaacgtgattttacattccgaaagaggtacatataatagatgcttccaactaaagattttcttttctaatttggcgtatttaatgtcaatagaaatatatacagcccaaacaaatgtacacctacatttcgtaccctctttattaaattacatgaaaatagtaaatacgttacaaagaaaaacatcatattagtttaattcttccactaaagcaaagactgcaatattttaaccttacgtacaatccaaacatcccatgggttttattgcattagataattttaactaatggactaatatttagatcctaaactttatgatatgatacgacgtggaatagattcaaactgtgaatgcacaaaaaagattacataacggatcaatcaatatcatcatgacagaagccaagcgaccaaagcgctttcgtcgtcatgatctaacggttctccaaagttctcacaattactattcccgatcgtggcctcatcatcaccgtctaaaagccacgagaccattgagtcgggattctctttctcatgccaaagattattatcactaccttcttgccaaacacaatcccaatcgataaactcatccgtcgacgcatcgttaacttggtggtcgtagttgagaaacgactccaccgatggacaagactgaagaagacagtcgagattcccttggttccaagtatccgagaaccctctggctccttcagagtctcttatgttatgcaactccccatcaccaccgcacgttgtgtttgtgtacaagtggccaggatctgactcgtccaacaaaagatcgatgatatcatcatcaaacgttaaaactccattatcgccattaatgctcatgagatttttgttacaatcatctccatagtagtcacatggtcgtcctagctcagcctcggctccacttgactccaccattaatgcttctttatcagccccagctacatcggcgttaggctccggtggtgcagacgttttcttcgttttacgagtttttgttctgtggatttttggtttcatagcggacctactcgttctcccaagtctgcgttttgcctgcggcggcggtggcgctgaagaagcgttcgtcatgattacggcggagacgtcttgagagatggatggcttcctaatgaagttgtggagtttacggctgagatgagagttccaataattttttatttcgttgtctgttctccctggtagatgacccgcgattagtgaccacctacatgcattgcattaatcaataattaatcctctgttcattgcattatattaatcctctattcacaatttggaacaaccttgataaaattaaatatctttccggggaataagagaacctcgtggcccaatgagaatcaatagaatagtgttctaaatttgatttgccatgttgatatgactgctgacctaatcatgacatcgctcgagcaatgtcagtaatgagtgacgatgactaattcgtactactctcgttgagttccttgtccgatttccaatattggatttattttagcggacactactatgaatcacatatacttgtttaacgttgagtaataataattaaaattttaaataaacagatcctcgctttttttttctcatgtttactagtttttcatgttgaaaacttgcaatacatatgtgactgtattttgtttgaagtgttgttgtacagatgcacatgtgttatatcaactgtgttcctattaatgcttatgtaatatacgaagtgtaaaaaaaatgaggtacaatttagtttgtctcaactaaaagagaaaaagtctaacaccccaatggttaagaggaagacccacaacgaaataactatttctcattcgacgataaaatagtatttttattttaccatttcgactttaaattaaattttccaaccataaaaatgtgcttcgctaaagtttatagtatttaagagagagaataatcgtaattaagccgtcttataataccgaatctccacttacttggtcgacatgatatcattattatacgatacagtgcataaaaacaaattgaacgaatataaatgggaaaaaatgaaaaacataataaataaaatagagtttggaaaataaagtaaaataatagagtacctgtttcccaaagtggaatgcaatttaacaacgagttcttcttcttctggagttatgtttccacgcttgaggtctgatcttagatagtttatccatctcaatctacagctctttccacacctttttaatccttttccaaaaaacaaataaaaacaattaacaatataataatacacttcatatttagatgcagattcatacgtcaaaatatatgtttatgcagattttgttagataaattttgataaagttttcaggtatttattaatttaactagggtctgatgtgtgactgctcacgagattcttagctttttgatcattgtatttattcatatatcttatgcatataatatatatcacaactacaaaaaattctcaactactacattaagtaaccttctattaaaagcgaggttagaaatcaaatcaaaactagtcatatggttttgatctgattcttgaaatgatatacaacggacaaaaatacataaatacgcttctgtttgtatttccttttaaacatttgtccatatactataagtctataacataacctaccctcttaaagcatgcacttggcagcattttacatatatctacattaaacaacccaccgtgactgtgattcgcacgaaaaaagaaaaacccaaaaactgaaataaattggaaacaaagattagggttgcagttaaacttctaaccttcctaaaaatttaatttattttttaaaaaacttactaacaatccttaattcttttatcaaaagcaaaaaaaaaaaactgactaagaatccatgtttcatgaagattacgacaagaaccacgattatttctctatgtcttattctctcatatatacattgttatagattaaattaagtttgtgttgcatgatcttgttaataaaagtgtaaatgttattaccggcatttttggggagagatctccaagaaccttcaccgttggattgaatgtagttggagagaatctggtcctcctccgccgtccaccgccctctcttgataccgaccttctcgcaacatggcgctcttcccattttctccggcggttatatgtgtttattccactgaccacaaaagtcaaggcaatggagagagagagagagagtgtgtaagtgagaaagagaagttactgagtgacagacaacagaagcaaaaagtgactgatttagatatatataggggcaggtgatatatagttaattaattaattgaaagggattaaaagagcttgcgggttcgagggagaaggagatgatgacacgtgtgtggtgtaagaagcgccacgttggtttagaaggagactgaagtcgtggcttattcaccgtcgagagactcgtggtcggtccgtgcaggttcgtcgtggttctcttagacactaattctagtgtgtgccgagatcattgacgttacttttttattaacacataagattttttctctaaagttagtagatctttattgaaattaattgttgtttgtcacgtgaatacgtagatcagatagtaatcgcacattttttgttcttcttataattttgataaaaattatataaaggatttacgccggatcctcctagtccgttgaccagatggtcttttgctcgagctacaaaacacgtgtgcgttcatataaacacgtgtaaatttacgtcagcgtgttagtgataaccacacaattcacttattgcaataacacaatgaattaagtatgtaacaagtatatgttcaagaaagagaggtcatctaaatttgaacttagaataaagtcatcagatggtcctaattaagcaaacgagtagttaaagtttgttaatgtctataacaacgccggaagacgatcaatctgtatagtctgccatattcgctgccagtccaaaatactgaaatatcaattatattcgacggaatcttacggaatcttttgagaaataaattttcacaggtttccttatctaactcgatacacgaaaatatgaggacaaccatcaaaatatgtttcccatttactgctcatctaactacgtgttccccacatgtcattatttgccgtttcgtatggttttggtactttcgttcgtatttagattggtctactaaagaaaagactttagtacatactattcaatattcaaaattaaatacaatggattcaatattttgaaagcaactctttcattttctttcctataactagaaaaatttggactgaaaccaaaattactttttaatttatgtaagaaaaaacttagtatgttgtcattgaaataactaaatgtggttttatttaagtgaaatagagcgtcgttcaatttgaaagaaaaagcaagaagtcatttttcgtaacactagctaatttataccttaccaaccacacacatcaactaaaatacatacaatacaatgttacaaaccatatcactatcatttaattggttaaaaggtctcatatataaacctagttacgtttcatacaaaatctgaaatatgtagtgttgttaactgtgacgtgatgtcttctgtggtctgatagtataatataaaacccagtgaaaactaatatatttggcatcaatttatattaatcgactggaggacttggctaatgtggtcgcggttaatcgacctagttccttgttttctctaatctataatctacataattgttgtttggttggttgtccaacagtaatttggttgttatactaaatatatttggttgatttacgtacgcatgttgtttacaaaaagaaacttttctcatccgttcatgtcactataactagaagtaacacacatgactagaggcccctctcgaattaagaggaaaattacaaacgaaaaataggcgatcgttgtattcacaaagaaacgaaaatgtgtactaaatcaactccgtcctttttgtctccttatgtccatcatcaacgtaacatcacatgcactgaaaatctagatgctcataataataaaagtctagccattaactgacaaaccaaaatttctctcatatagacacaatgcatcgaatatcgtcaaaaaaaaaaaaaaaaaaaaatgatgttgaattagagaagaatggatactacttattcatattttctagtcatttattcagactttgtatctttctataatttccttaatcgcaaagtgcagttgtacattatcactcttcagaagttgtttttatcaccaacaaatgttacaagaaacggacccataaataaaagttgtgtattgggtttacatgtactctcttcctatatgaaatatataggcccaattaaatgtaaatgggttttgagataaagaaaagcctaagacgatgtattctctaaacctgggacgataaagagcaagtcagccagcatcatgaatctccccaaaaagggaagcaaaattcaaagcatggatataaaatcaaatagtgtccccaaaaggccaaaaaccatcaagatcacatcttaaaagaaaatgaaaatgtaccggtacgtaccaaccgaaccggtcagatgaaccaacacatatgagaaagaagcaaattgagaagaatgtaatcatcaaaatcaatcattcattcattggttgttgttgttggtagagtagaacaagagtagagtcgacattgtcctgaggctcccaagtggcatcagacatatcagtccatttgacaagatactcgatggtcttcccatcgtctcccaccctcttcccgatcacactctccgctacagcgtactccagcccatcctcgtagtccttagccacatcttccgccacgtgtacacctttcacccactcgcaatctccaccgtccttccatctgaccagatattcaacgtctttgcctttccctcgtttctctacgatctcatccacctcggcgtactcgaacacttgtccttccaggacattgatcactttctctaacccaattctcctcccgaactgcatcggattccccttcggcgtcgtcttcagaatctccctcgctagttccaacgccgttaaccctctctcgtcttccacttcaatatcagctcccagctccaccagcgcctccaccacctccggcctcacgtaaccagccgccatgtgcagcgccgtcaagcctcccctcatgtctcggtggtcgagatcggctccagcctccgccagaagccttacgcacttgtccgaccccagacctgccacgaaaagcagagccgtccggccgttttcgtccacggcatcgacgtctcggtcctccaggagctgtgacagggcctgctcgtcggcttttctagctgccgtccaccagggtgtctcgtactccgacactacgtctgctgcgatgtagctcgatggaacccacgacggagaatggccgtccttccactcgataaggtactccatggctccttcccccgccgttcggcttccaatgatcttgttcacttctccgtacgatgatgatgactcatcatcttcctctgcctcttccacggaggaggtcgtttcttcgtagtttctttgtacggcggcacatatagctcctcggaaacacagctcgatccgtctgatcggtaaggattcaggggagaaagcagaagaagaagaagaagaagatttgggaggagaaagtttgatgcgagacagagactgatggattactagagcacaagtatccatggccaagaagaccttttgcataatagaagacaagactagagaagagaagagagttaacgggactcactggattttctagtggataagaaatcttagccacccaatcattttcgaaaattttagatgtctgcagcaaattttagttttttaaaaaagaatctagttttaacatttttataggattttattttatggactgcacttattttcttctacttttagaaaatcaacaggttcttctattttttggaaaaaatctttatatactagataattgtgttaagacattctcatcaaaaagaaaagaaaaatataaaacaataaaataaatatgagtaaaattgtaaatgtggttggttttctcattcatatgatattttcttgtggatttaaattggtatgtatacattatgatatatgagtttgtcaatatattatttgtgtttgattttacgacttgtgtatatatacttactccatctttaaacatctttaaatggcaagcagaccatttttttttttttttttttttgaatttgcacttcagtgatttacatgatatgagtattaacattattatacagcaagtgaatagtttttatttagttttcaccatctatattttatttgcctaattaaattaatcatcccaataccatcaaatggcagccaaactttatagataaggactcatccgaatattactgacgtgagccagactcatcgactatttctaggcaaatctcgagaactcaataataaaaaataaattagtgctcaatagcttaagagataattttgataataaaatgaaaaaaaaagttttgatactagtattttaatttacgtgcaaatcaagcttctgtcgttttatatgcacatgaagatgaagaagaaacaaaggagacgaacattgaagataaaagtaaagtgacaaaattttcttgtagttggaataatcttccaaacctaaatacattgtttcatttgtattcatacatcaaatgtatatatattttcttattttattttcttttttgacggctgaatgatttgtttttctgtccgaagacgaatctacggaaacgacgacgtttccagtggctgacatggtaggataaaaaattcggttcaatattttttagcaggtgagcgcttcgtatttaaccgggattggatggttgaaaccagccctggttagtagattcccaaccgcagcgagatctctacagaatactccttggtacgcattggaatttaccggtttcgtttcagcgtttccggttctcttaatagaaccggatttttcaaccggtttgcgttcttcaatcttttgagcgtgagcaatggcgttcttcctctgctcctcggctatgatcgctgtcacggcggtgtatcctttctgaatcaaacggtaaagcaacagagacgacattttggctcgatctctaaccgaatcgacgtcgttttgatcggtgaactcgcaccgttcgatgaaagaagaggctctatcgggtttgtatctgagacatagcaatagatgagctcgatcgagctccgatctggtgcatccgcgtctgactccgatcaagccgtaataatcgacattcccagtttctccgtttgcgattttctgcttaagtttctgcgttttcgttgtcaaaacgcacaatttcccaggaatctctctgtatttcacgttgtgccgcttccacaccggacccggaagcttccgatcgcgtaaaatggtgttgtagagaagcttcaagtgttctagatcgtgaagcgaatctggaaaacacctgaccgtttctagaagcgcggctctggtttctaacgcctggatacacgagggttcaagagctagggttttattgcaatcggcgatcgcttccgcgattctaccggcggatctataagcggcggctcgatgcatgtagcattcggcgaggaatccttgaggcgcagggcgacggccatcgacgatcttggagaagtgacggatcgactcggagaacagtccagcgtcgagagcggcgattgcagcggcgcgacgacggagaagaagcttgatgtgagcgaggagatgggtgaagttctcgctctcgggtggtggagaagaagcagaggaggattcggagaggagaaggaagctatcgtcggaccagcaaatactccggcgacggaactcggcggaggcgaggcgtttaccggtttgtaggagaaccatggcatcctccattagtcctagatggcaacaagcttgacccaacaccacatacctgaaacagcgtttaaaaatcaacgattgcgttttgcttgaaagtaataagtaaaacaaaaaagagagttaaaagttatattacctccattgcccttctttgtcgcattttttacaaatgcctgccatgactttcttcttcaagtcggaaacagagaagcatttaaaggagccaggggaagaggcgtcggagagaaggttgataccgtcggaggaagaagagccttgagaagaagcggatccttcgtcgtcgagtttaagactggggatataatcctgaagcatatcggcgacatccttgaaacgacggaggaagaggagagatctagccttgagctctaacgcagtttccaaacgcggggagatagataaggctgcgtctagtaaatgaagagctgaagcgacgtcgtttgcctcctcacttgccattaaagttgttgcatcctttatatacttatcaacaagctgagaaaacccaaaaaaagttaacatgattgatgatgatctttgaatcaagaactgtatttccaggttagagatcgcttatacctttctgtgagtgaaccaccagtgcttcttatcgccattaacgttaggataaaccgccattgatgtttgtttggaggaagaagctttcgattaaatcatcaaaaaagaattccttgcttccaaggtttgaaaaaagaaagacaacaacaagtgatttaataatggagagagagagggagagtgtgtgaatgtggagagaaacagagcactataaggaaagagagagatagatgacagcttcagagaaagctttgatccttctaattcatagctggcaccattttctctttttacacttctatattctctctctcttcaatgaatatcatctacatagccatattttaggtaggtttcacacttcccattccctaatttttcattcaactaaccaaataatgtcttcttagcaatatttttggtttaaccttttaacggtgttttttttaccgtgtggtgatcaatcttcagtaagggaacgtagtaagttaattacagtaagattttgtttcgatttttgaactaaaacaaaatctagactttatattatcatcctattcccaattaatcgaggtggtttagactttgttagttttagatatttaggttctctatgatctaaaccatataaatttaatttggattattattgattcaattaagtatactactttgttgttcatatctcgcatatgaaataggatatgtgatttatactagctagattataaattaaagaacattccctaacattatatactcgtttactagttctgtaatcttttacgttttagtcgtcgttttggaataagcatgatatctatattactgtaaccttgtcgcacgatatatgattgcgtttttgagaaacccatatccattatgatcattgccaattattcaactctattttttttcctccatgacgatattattaatttggctagaaaatttaacaattgagcatgtaatattgtttgataatgcgacgtttcagtcttgaccatgtggatatttttgttatagcggcaccttataatgcttacatagtggatacattatctttttgcatgttataccagttcaacgattcatttcattaaacaatggataccctaattctatttcatgatctatcatttagcatgcgtttacttaaattgaaataatataaaccctgattaaaactagagtatatgcaaaccaacatgatacttgagtaattggcatgtctatgtatatatgtgtccaacagtatttaaaaactgattcgatttacttacactaaatcggtaatttgatgataaaaacactagtaatgatgtttacgttaaaataatgatatttcataaaattgaagcagtgaataagttcattggatcgatgactcaataggcacatcaagtagatattactgtatggtattactgtaattaagtgagctagttattaaggggaaagtgcatggtaacatcataagtatctctagcctctaacattatgatttgttttaaccaaaaaaagtgatttggttcttaattatcttgtaagctgtaaggagctcaagacaagaatcgtgctttttaatttttaatcaactaagcacaaatatttattttttcttttctttacttggagataattaaataggacactagtgtctccgttgattttaaacttaaaatagaattacgtactgtgcgagcaattttgatacaattaagttaatttgtttgacaacgatagcctaaacttgtcaaatcaaataattaaatgcactgccacgtcagaaaagccttgttgattataagacacgtgtcactttcagttagatggtaaccaatgaatgaaaggtgtggtacatgtacagctcagctttgttcattgcttgccacacataaattattcttttgcctatttggcattaccaaactctcttaatttcttttgcaacatttgtttgtattttacatattaaagtcattgtgtgttttcttttcttttttagtttttggtattttaaatcagatcaaaaacattcggactcataagtttgcttttataacagcacatcgtgttgtaaatatgttattttttaatacaatttcttacaacaaaacctttcctatttttttttcttcttcttcttgttaaagtaggttaacaataacaaaaacatttataataaaaacttagatataattttctatacgtgaaaaaggtttcgtataaaggtataaagtcaatgatatgaacagtcgttacgtataaaaactacaaaattaaagtccttttttatatatataatgctagttacaatagtttgtataaaacaatggaaaaaaagaatacccgtgatatatcgcgttgatggagtttgtggtacataaaataagaagagggcaaaaacaaaaaggacaggctcatcataaacaaataaatgcataagtggaaaaaacacatgttctggttctgcctcgacttcctttgaagtttgtattaaatcaaataaatttgttgctaatagtaaaatcaaatgaaacgattatagatagatgcaaatatcattcaattttcttctcataggattctttttttctgtcaagggacagttagcccttataattgggaactctattttcctagataagaaaatcactataatccaacaacaagaaagaaagaaaaatatgattaattggttattttacaggtacaattttcctcccgcatttatttggacctgtatatatatatatgttatatgggtgagtccaaatatattcatttcgaattcaataatcttaatcctgcactcattacgtgagctaatagtaattataattacattgagacacaacgttaacgtacaggggagaaattataaatttattctcatatacatatatatcagacactgtcattgatgaagacgttaggtttaaagctagtggtcacagattttgccaggatggttcgagtaaatttaaagcactgggaatctatctgttattataatgacatatatcgagaagatattttactatactcatttcattttatcatccttagttaagttttcaaatagctttaggtttgattaaacgtaattaacggtccccattctttaagcatgtttgtatccgaggaggcacaaaatgacgaatatacaaaatgatcttaaacagctaaactatattggacattttttcgatctcagatataaaagatttcattcaatataatacttggataaatactcttattatttttctttagtttattaaaaaaaacctctaataaatacgagtttaagtccacaaaatcgcttagactaaaatacaccatataatttcaaacgataaagtttacaaaagtaatatccaagtatctcatagtcaacatatatatagtaataattagttgacgtataagaaaataaaaataaataaattagtatcttattttgggtggtgctgactggtgactggtgactgcagaatgctcggcaaatggaaccatatcccaagacatgggttttagatagaacaaaataagtgtccgaaggaatgatattaaaagtcaaatagaataattataaatattgtaattagcaaataaaaacgtcatgattttgttgtttagtcgaaaccaaaaaaatattaacgttgggcatcaaaacaagcatcgagctagttgctcaaattcacacaatttagacctctttgaattttgaaattgctggaacttgaaactaatcaaaaaaagtcagagagacctctgcggaaaggcacgtgttctcggattagatttcacgtgggaatgagttatccatgtgctattccacacaaaaaaaatccctaatttttcaaacactaataatattaaattctcagtttcttctttttactctgttattgtatagctttttgatccatacgttaagcaatatatgccttgttttattcgtttttattttattttttgaaatagatagttgttgcttatgaaaacgaggtagttagatttgatttagaattattataaaaaaatacattcggactctgacgttgaatgattatattagaatgaagacatgaattcaccaaacctcattcaaaaaaagaaaaaaaatcttaaaccgaatgataatttgtttcgtcgtcatttaaaatcgtcatcaatttatttttaagaaaagaaattaaaagaaagcatcggaaaaagagggccagacaccagcttggcaatgctttgctgaaaagttgtgaataatgcaattaaaaacgaacgaaaataaataaacaaatattaaagaaattcgaatgggaatatcaacaaaattatttattttttagttatggagacaagaatcgatccaaaggttgtactctggacttgaaagtaaaaataaaaagggaatgacaataattgggaaaacatgtgataaaagtctgaattcacagactttgacagtagtttatagtttcatgggcttttttttttcctctctcacaggacacagaatcttatctaataggagcagccgctaatatgcactgtgtttggcatgttacgattagcgttttagagaattagagtttgattgaagtgtgttttatatattgatagtgggacattacttataaaaagcacaaggatacaacaatagagacagtcacatgtatatcacataagtggatggtcctcaatgtgttgcttgtaggacatttgtgagtatgtcaaaaacttatttcacatggtacactcatagattagccccacttaggagtgtctagaaaaagattgggactaaagtcttgttggatcgaatatgattccaaacacgttaatatttccctaaaacccatttcgaaaagtatggaatgatgaacacattataaatattttggttgtgcgaaataggggtcaaatgtaaaggttaactttgtattagttgatggatagtaaaaggtcaaatttagaagtattgggccaaatagaaaacataatgggccaaacagaccaaaagaaagacaacggtgaacgggtcagaacattaaaacatacattttctcgctacaattaacgctatcaatatatttataaaaccatttgtcatttcacttccttaactaatcacataaatgatttttttttgtgtgtccctactttttttatataaaatttaaaccggaaagttacattggataaagctttaacaatcaaaaacgtgttggatatatatataagtaacaaatttacttcttttaataattataataatattacattaaaatataataaagcatatgttacttttgaagaaaactaattttggattaaaaatttcacttttattatatttaatatgtgatctcaaaatttataaaagattatcgtcaaacaagtttatatcataattttatggtatatatatttatcgtgtgaccattataatctaatctatggtgtatatggtatatatgactaaattaccgtatttggagaagtgaaaatgttgcatcgtcccacgactcttagaaaatttgttagtcaaatcattcttttaattaaaaatttagatgtaagtttaagtcgtgaatttacatctaaaattttagatttaagtggcgaatttcgcagccaaactattattttaccacagacatgcagtgttgaaatctaaggtagtatgtggattttttttttggcagcaaaacgtaaagttaatttatctttatatatattaaaatgtaatttatctttttatacatatatatttatacacatcatatcataagacatacatacataaatctctaaatatgtaaggggtgtcatcagttttgccttctgtttatggttcactcgatttcacattaattattcactcaaattcacaaaggttatttcgttttcattagcgccctttctctcgactttcttgatgaatctttatttcttctatgtgaaatctaattaagactattttcgtgttatattgatgtttaaaaatgaaaatcttttggtttttatgtttaatcattttcatgagtattaaatgtaatagatttaagttaaaactaatatccgaatgcctgagatattgtttcctaaaatgagatgattgtttttatttattaccatgatttgtttgtactaagcttcctttcccctttgcaatacataggatataaattcatacatgttcctaattttatttttgcacttgagtttatggttttctttggtggaagatctatatgtatctatatctatattattttactcttttcttcgtcgtcatttatagtatattatatatatgcacacacacacacacctatatgtatagctcaattctagataaaatatatagaaatggatcttgagaatcattttttttgtattcttttgttatcaaagggtttcgactttgctccgaggaagaagataatatgaaaagagctttttagggtttatcattctccttgactttgcaaaacgtgaaatgtaaggcactttgatcgttgtactttgttgctttttatacgtatcgcttcctacaataagttaacaatgcttcctcgtagaattgcaaaacatttgtggaccgtgatttacatgactgagctcttttcagtggcttctttgcagcagcttcttccttggaggactaatcaagacagaaatctgttcctctaaaaacgatcgccgttctaggtaatcttgccattcttgacgagtcttgatctttagaatcaaatttataagggatcacgagatacacgtattaattattattttttttttttttgctttttgtggttatacaagttcactcaaatgatggtgaaagttacaaagcttgtggcttcacgtccaattgtggtcttttgcgtcctggtaattctgctttctttcttctaaattatacgatgattctacatttctactcatctcgttcttgtttttcaaatgatataattattgtgtgtatatcacccattcatgtatatttattgaaaaatataggcattcctggtggttgttttcgagtgcatttggatctcaaattggcgaacaacaacggagaacctagtcaaagaggtcgcttcatttaccgaagatctccggacaagtctagtttcggagattgaaaacatcggaaaatttacatatgccaagacaaacttatctacgatcggtttagcgagagttatagattcttatatcaccaacaacgacactggttttacagagattcaaacacaggttgttaaaactaattacataaattcaattattcttagttattatcttaggattagtttgagttatataacattaactataattttatgttgttgttgttgttgttattattgttcttcagatcgcaccattgttgtttgtagcttattcaacgatccttcaagtctcacaagtttcgtacatcagtagggacggtctcatgttttcttacattgcagaatcaaacacaagtgtcgctgtttttgccaattcctcgtcgaattcaagtcgtggagactacacttggtacactcaaaccgtggatcagttaactggtcgtcttaacgggaactcaacgaaatctcagtcgttagatgtaacccatacagattggttccaagcagcacagagtaataactacactacagcctttgtaggaacgagcttgggaggagaagataacgagactctaatacagagcgtggttagcttgtacagcaagaaaggtcttgtttctttagggtttccggttaagactttaaccgaagttttgaacagtttgaatctacacggcgaagagctttacatgtggacaaaggacgggacggtgcttgttcgtgaaggttcactgaatgattctttcttcatctccaatggctcgatttgcttcggtagagaatcgaactccctctggtctcaatgcatccctgaaaattgcagttccagtggctacgaggtggagatcaaaagattaagataccaagctttttgctctgttattgaagtttcgggcgttcctctggtaaatactgaaacatatttcactttgatgcagtaaaaatgcatcgacttgttgtttctcagcttcttccaatggttttttttttgccagagatacacactcatgtttcccaacaaaggaggagcaacacgcatcaagcaccaagcggaaaaggcaaaatatcaacttattgtggttatgatatttcttggcttcggttggcctgtatggtttgtgtggtttatgatgcaagcaacaaggagagagatgcatatgcgtgcaacgctgataaaccaaatggaagcgacacaacaagctgagagaaagagcatgaacaagagtcaagcatttgcaaatgctagccacgatattagaggtgcccttgcagggatgaaaggtctgattgatatatgtcgtgatggagttaaacctggctccgacgtagacaccactctcaaccaagtgaatgtttgcgccaaggatttggttggtaagactctgtttctttagctttctcttatgcgttttcttcactttctctctaacagaaaattcttcctcatgttgttaaaattacagctctgctcaactctgttttggacatgagcaaaatcgaaagcgggaagatgcagttagtggaagaagatttcaacttgtcgaaacttcttgaagacgtcatcgatttttaccatcccgttgcgatgaagaaaggggttgatgtagttttggatccgcacgatggctcggttttcaaattctcgaatgtacgaggggatagtggcagactgaagcagattctgaacaatcttgttagcaatgctgtcaagttcaccgtcgacgggcacattgcggtaagagcttgggctcagaggccaggttccaatagctctgtggtccttgcatcatatcctaaaggtgtgtccaagtttgtaaagagtatgttctgcaagaataaagaagagtcatcaacctacgagacagaaatatcgaattccataagaaacaatgcaaacacgatggagtttgtgtttgaagtggatgatactggtaaagggatacctatggagatgcgtaagtcggtatttgaaaactatgttcaagtaagagaaacagctcaaggacaccaaggaactggtttagggctcgggattgtgcagtctttggtaagctactaaaacagaacacgttctttctcttcacaagtaaatctagatggttttcatttgtggtctattattataggtaagattaatgggaggggagataagaatcaccgacaaggccatgggagagaaaggaacatgtttccaattcaatgttttattgacaacattagagtctcctccagtgagtgacatgaaagtgagacaggagatcgaagcaggaggcgattatgtatccacgccaaacctcgggctgactataaacacttcacttggaggtagcatgaatatacgtaacctgagtcctagattcaacaactgtctcagctcaagtccaaagcaagaaggttctagagtggttcttctattgaaaaatgaagaacgcagaagagttacagagaaatacataaagaatcttgggattaaagttacagtggtggagaaatgggagcatttgagttatgctttggagagactttttggattttcacctcagagttccatgggaagagcagagtgtagtttgtcatgtccgagctcaagggagttacctttcattggcatggacggtattgattcaagaagccaacttcctaaaaggagaagcatcagtttctctgcagttgtccttttggtgattgatgcaaaaactggaccattttttgagctgtgcgatattgtcaaacagtttcgtagaggcttgccccatggaatatcctgtaaagttgtttggcttaacgaatcgagcactcgtgtaagtgagagaggggacattagttgttcgagacctttgcacggatcgcgtcttatggaagtcttgaagatgttgcctgaatttggaggaactgtgctaaaagaaccacctactgagctgcaaagggaatcattgctgagacattcttttgttgcagagagatcaccaaaacataaagtccaagaagaggggccaagctcaatgtttaacaaaaaattaggtaagaggataatggcatcaacagattcagagagtgagactagggtcaagtcagtgcgtaccggtcgaaagcctattgggaacccagaggacgagcaagagacttccaagccgagtgacgatgaattcttaagaggaaagagagttcttgtggtcgatgataactttatatcacgtaaagttgcaacaggaaagctgaagaagatgggagtctcagaggtcgaacaatgcgacagtgggaaagaagctttgagattagtcactgaagggcttacacaaagagaagaacaaggttcagtagataaacttccgtttgactacatattcatggactgccaagtaagtttaattgattaacaacctttcataacacaaaaacaaatagttgagtcctaataagtattaatgttctgcacagatgccagaaatggatggctatgaagcaactagagagattaggaaagtggagaaaagttatggggtgcgtacaccaattatagctgtatctggtcatgatcctggttcagaggaagcaagagaaaccattcaagctggaatggacgccttcttagataaaagcttgaatcaacttgcaaacgtcattagagaaatcgaaagcaaacgtcactagtattgtataagtagacagcacgcagctttgtgctactaccattagtgttttagacaatacttttttagtatgacgatgtcatagcagttttcttctaagtttatttaaagtccatttcagatacagaacacatgcactagtcttaagtcccaaaagatgtaggcaaatgaaaccagtgcatcttttatgggcaacgacactgcattgagctaagagaacaaaatggttagatgaactcaaacttcacagaaaaaactgattcattatagttatgagcagaagaaagggttgcgtcagtaactcaaagactttgattgattttcacttccaaatgttaaaacttgaacaatagtaataagtaaggacaaaactttcacaccacaaaacgattatgtgaagtgaataccagacttgttgaacaaggaaagaagatacaaaaactcttgttgtgatagctttgaagatctcttctcctcgaaaccaccttccttcaagacattcataactttctccttgaactctgatgtttctcctccgtctccttctccctcatccatctccatatcatcgtcatccatttcgttgtcgtcatcttccattcccatgctctggtcaccaagatccatggaggtggtgttcaaagcaggttctccattgttctgcaacgaagctagtacggcctgaagagtcttgaagttcttctccagcatggaaagaacagacttttgcttgaaaatggatcccaaggttttgttctttctgatgaaacagactcttaagaacccatcccactccttcttgttaacctgagggccaggcctccttggttcgatcctgacaacggaagaatccacctttggaggagggcggaaattgttcttgccgactttgaggaggtgggagactctggcataaagctgagtgttgacagagagacggcagtagagattgtcaccaggctgggcaacgagtctcatggcgaattccctctggtacatgatgacagcacatctgaagcttgttggatggaagagaagtttgaatgtgagaggagatgatatctgatacggaatgtttgccacacatatgtcaaacctgggaagctccgtcttgagcacatccccttgaattacctttaaaagagacaaagtagaacagtcagcatatgttccagtaaccaagacacaagaatctatattccaagacaaagataaatgaatcatcacaatgaatagatagatgctcgaattcaataacaatcgagcagtagagtaccttcaagcggttagagaagggagttccttgaaaacggcgctgaagctcgagaaccatacgagagtcaagttcgacggcgataacttctttgccagcttctagaagcttcttggtcaagtttccagtaccgggaccgatctcgagaatcacatcggtactcttgataccagctttctgaacgatcgaatccacaagcagagggttcttaaggatatgttgccctttcgatttgtggaacgatattcctccttggtaatggttcgatggtgctctattcgaagccttgggcttctccttcctgatcttgcctcccgccattgttgctcactttgcttcttcgaaacctcttacggccgacggcgggagaagatgaagatgaagattagggtttttctctttactttctctcagccgtgttttctattcaacctactctgtttttattttattcttttctctggtcggttttcatttaatttaattttattacatttcatctcaagtaatgtttgttttcgatttcacaaaccttttaaacgaaaataaaatgttaatattagtagttaaaacgaaaataaaatgttaatattagtagttaaaacgaaaaacaatttagtttgcaaatgaaatgataataatcttcttgtaataaaattagacttatgatgtcatttttgtgacaacagagtaaatttcggttacagacatgtggtactaaaactatacatgaaacctgtgtcgggttactacaaacaaaaccgacttcttttgtttagagtgaaaacttttaaattttctttttaacactctcttcgctatataatgaaaaaactgccgcagcctaacgtgtttacaagatcaagaaaggaccaaaagaagcataccggtgttgccttatcctcagatcagctttcttaacgtttttgtcaatttatctcgcagtcgctttatcttcgaaagcatatgtgcacttctaacgaaatacaactccgcatttgagagcattgcatccacgtcgtgtttaaacgattcaatacttctgtagtactgattctctagtctttcgtgaatcagctcagggtataatggaaccgggaacctgcgattttaaaccagagttacacaatgcatgaatcattactgccagataagaaaatccacaagtttgatcatatgagttatttaaataagcaccgactcaactatcgtttctgcttctcaagtataccacatgggttttcatgttcgagtttataggactagggaggttttgaaagaatcaattgcagagagctaagtgttgtgaagtatcgtacctattgcagaaatccatcttttgagctgcttcgtttagcttttggatcccgtaactatcctgaagaaaatatataacaaaagcaaataacagttacgaggcaagcaaggataacagcaagatgagaaatgatagtttcgggagagaagacaaacctgatgcttgctgattgattttactagtccagcaaataatgaaagcagtttctctcttctctcatcttcgatggtagatttttcccagggaaactcgggattgtcaaactcccacgggctgtgaagactcgtttcccctgtttcatagacaactctgtatctttcccatggactctctgggaagtcagtggattttacttgtgaagactcaatcctaccttcccaccaagccccgccttcaccggttgcgtctctccaccacacacggcactcattaccaattttccagtttgtttgaattgcagcgtcgtatcgagtcttctccacaataaaatcagggaaattaatgagctcaggaagtgtcagttgaaactctttgcgggaggcatgtgatgaagaagaatccagaaccctgagggtcattttgcagcagctatctccagaaccaggatatgtatcatagttaagtttctcgactttgcaaatctctactgctcctaggtttcggggaaggtaccttgatcggtccctgtcatttaattctttagttttaaggaactcttgatgaccctgaaaacgacagtcaaggaaagtttattaatatcacagctggcaaattaatacaaggaagtgaacaacgaattagcagccaagaggacgtacctgcttgaagtaaataacttcatcccctagctgaggtatataacggcagccttcctcgtgttcagacaacaataaccatgagatttttcctgagacactattcaaccttatcccagtatgaagacttggtttgctgacgcttgcagatctagacctggacccagcttttgaggtagaaggccattcttcaagtgatgcatcatcatacacgcttgtggaaggaatcccttgtttctttattttgtctacagatccagagcccaaccttatgcgtaatgcgctatttcttgtactagattcacttcttatggatcttttcctacgtatcacatcagctgtagcttctccaaactcaaagttatgtgcagaagaatctctaacgctatctatcacaggttcagaatccataatcggattcatgaaagagggagctatggatgcaaacccatctccaccatctgccaaatcatctgccacctcatcaggttctagttttcgaggactgttgggatgccgaagctttaacctcagtcgtcgaactttctttggaagaatctcatcagcttcatccctgcaagagaatacgatgaattagatattgcggaaatataatacaaacataacgttcccattatagtctgatttccctacccataaaatggttgggcttcttctatgttctcaggcgcagttaattcggtaggttcacaaacaggaatctcttccctccacttgcacatattctggtcttgatctgaagatcttatcaactgattatcggccttttctctctgtggcgtattcatagagtagggaatactctgacaccctgaatcaccttttgcatctacagaacttgacccgggttctctggaatatataccaatcactctgtgattctcctccaaaggtttggaagatagttgctctaaatcagcctgatttatcacatctcccttgcttcccatagactctgctggcttcttaacagagatctttacaatcaatcttttcttctgtttgtcatttgaaagagattccagcatctgagatggtttgtccaactgtcgcaaagtgggtatgcttctatcagattcactgttggatgaatcattatcatcatcaacttcatccgaagagcttccagaaattttagaaagcaaggatcgagcattttgagctgctgctctctgcggccgtgatgctttgacatcagaatgttttctttttgaagccttcacgacaattcttcggttcttggttctcttaattccagaattcgagctatcattctcatccaaaatcctcttatcacgtcttccagatgaagtagagacgttgacctgagaaaacgggagttagttaatagatactgacaaacaaaatcgcatgagttgagcaaaacataccttaggatgttttcttcttcttttccaatgatagctactttcgtgaatattttcaacgtcactgtcctcggagctgcactcaagttcatttgaagagttggaacatgggcttgccctagccccatcagaggaaacttcagcattatactctgaatcattgtcgtcactcagaacttcgtgttctggttcccagtacatagcatctataaactcaggcaatggctcaatcagtctatccagatcagccaaaggaggcattatataatcttgacctaaactaaaatcagggccaacagaaaactttatcgaggaaggacgccattcaactcctaatgcaccaagtctgcgttgctgaaacattgtctggtcaggttctggatacggaatcatacctgaaaaatcaaaataaaacaccaggaatatgtttcctgaataaacaacatcttgtataactgaaataaagatgagcttttggaaacaaacttgaatcacaaagaagatcctgaaggttcctccgatgaggaagtagctgcgtctcctgcaccatgaaaattataaagcttattattcaaaaataccgcaggtgcaaggatataaaaagtatgcacagttcggtgaggtctattaacaagaacgcagcagaaattagaaagaaaacagaagaaacaagtatttgaaacaaacctgatcaagaacatgtccattggtatctcgaataagaggacgataatcaccaaggaagaactaatcaatacaaagcaagacaaagggtcagaaagtaatagagacttcagccatatactagaaaatgatcatgcatctgagatgtaaaatctaccatacctggtcgtattttgcattcttttgagactctccttgtcctgtgtttagaaaatatatctggccaacatcatctgaaagcacaatagatgtcccatctctacacagtgccagggaaatagtatcttaaaaaattgattccaagactttcatgtgactaaataaatgcttcagaagcagatgtctttactgaaagaaatatgaatattgtacacccaattggatatgcttaacatgactgtttcttctagtttcagactcaatagtcaattgcatgtttaactggagtcatttgcaaacacacaaaaaaaatatagaagatcttgtcgtggacatttcattgggtacttactgtgaaaactttccatcaaccaacttaaatctcccgatttcgtacactttgattggtataccctcccatatctagaaaaaaaaatctaagaaggtaagtatcgctattgataagattaaggactattcctatccaaaaaagtaaactcacatcccagatgattgttttcccatcatagccagcgctcatagcaatccgaggattgaaaggatggacatccaagacataagactacaaagagaagattcgtgaaattttaatatcaatattagtatctcccaaaagcaagtcggggatgaacaacaaaacttaaagctagatgcaacatacaatgaactatgaagcacacaacattcaaaaaaaaaaaaaagggcctactaaatgatggagtagaaatgtagaggattgttaccgattcactgtgaccagttaaacaatgcactaagctaccatcagcagcattccaaacacaaatcctgcaatctgaatatacactgacggttaaagagaaacagaagatagtagtacgttcatgtaataccaacaggtggcccaaaaacactgctttttaactgttgtgtattttactatccacggttggaacacagtgagactgagagatattcatcaaaatgataatttatgcatcataagatttcttctaagattaattatttacccatgatagcggcaagtacaaaacgattatccaagctccatataatcatattaacaccccgtggtgttggaagaaacctttgacgtgggcctcctcgaggaggttgtggaggaagtggaggaggtggaaccttcagatgatatcctttcatccagcgtccagatttcccctggaaatataacatcgaggaagctgagggaactcgggaagtgatgatagaatcggaaatttgctgtcattaacttgcacattgcattcagtgattgattgacagaacttacatggaatttacgtgatcttggagtccatataattgcactaccatcgcgagagcaggttactatattgtcatgacaaaacctagtagtcaaaagtattaattcttaactaacaatagatgaaagatagaggaatgacgataagtccaacacttaaaacgtgaaacaaaccaggaattcttaaactttgggtagctatcttccttcagagcatcagctgttgaagattttggagccacagcacaaccactaaaacaaaatagaatatacccttttagatatctattcatgtcaaccaacaaaatgcacaatctaagagaggcaccacgttcgctggaaaatacctaaattgcacatagttgacatcattctcatggccccgtagaacatccagctcatgagtcggctgttcagcatcatccaagttaggttttgaggcactccaaacctgcaagattatggaaatactgacaatcaagactaaaagtaaacaaaaaccacatatcccacagtttctgcattactaaggaggataactaaagttgaaagtttaacacagacccttgcattgctgtcagagctacccgtgacgaaaatggttccattagcattgtatgcacaacataatatttgatgactctgagatgcattgctcgtggatcctgtgttggaagatgtaaaagtgctttcgcctaagagagaaacttccaatgagcctataaccaaatatatcttaacattgaacaaaatatgatgatgtaccactttttaccagtgttagcatctgaaggacttggaacatagattcgtgggagccactgagaatacctagcatcccagatacgacaggttccatcatctgatgacctacatagattacgaaaaaccacaaataactgattaccaatccagacgcagtatgaaacatccaaactaaagatccaggggtcttgaatagagcgaaacaaactagttaaaatagatacatattgaacagaactcacgataaaagttggtaaacagacgcctgtctgggactgaatgcaattgcggtaacagctccagtgtgtccccgcaatacagaaattggcattccatcaggcaaccgccactgtaataagaatcaatactatctaactgacaaataaataaaaacaagtaagacattaaagactagaattgtactcttaccactcgaatcacaaaatcgtttgaagctgaagcaaccaaagcattgtttgaactaacggccaagtctgtaatgtcaccctacaggaaacatgcataggcgagactaattttaatagaatagtcgagaacctatggcttacaaatatggaaagcaatagctcacttcatgcccacggcagctagccaagcaaagcgcagtttccattgaccaaattttgacaagccggtcatcggagccagtgataacatatcttccagaacgatcaaatatagctgtgcaacataagtataaatagccatactgttacttttctacccacaaaaaacattctatgacaataaacggtgctcctatgatggacatactacattacaacttccagatcccctagtcagaagatgtaaacagactggtataatatcaaggttgcacatgtaacaaaacaaagtatagagttcccacaaaccagagattcaagacaaaggatgtattatgaagatcataccgcagtagacagcattacgatgtcctctgagcttctttatattttgcatcttttgaaccattgttgatggttttgcaatagcatgacatgctgaaagaatggacggagcacggtggtgtttcctgaaacctcctccaatttctctgagacttaggccacgcacttgatcggcatgcatatgcggccagcgtaagtatgacgcaacatgcctagctttctgagactctatattgttaccttcacagaaaaagaacaaaattaacgattaagaatctacttaatcaaagacctagggtaagaattggagaggttagggagactatccaagttaaagcacccctggacttaacttctcctatatgagctacttcaccagaattcccaatacaagtcatgataccaagtaaagattgccaaagccagaaaaacaaatttctaaaatgcaaagccttagagccactatcaggttctatgcatatatgggattttttcaagtcccagatccaaaggaacatgttgctgagcgatccattctagaaacaacgtgcggtcgaaattaaatcagatgaattgcatgcaaaagttaaagaaaaaacatatcctgattgccaaacatcaattcatggaaaagcttttgaaattcaggtacgacaaagtagatgaataagaattactacgatccacaagtgaaaaggtgccagatcccaatagtgttggaacatcagcagcattaggagcatttccttcaactctcatgtgtgaagggaaagacgggtttaaaattagttgtttgagaagctt

SEQ ID NO: 389 - DNA, 106355 bp, Arabidopsis thaliana
gaattcgagttactgcaacccctaattctcttaggcctataaccgcaccgccccttgttgaggaaagagttgagactggcatcaaagtaccaccgcttacctcttattcagatgttttcagtgatttgaagaagccggatcatgtattggtttgtgcgcattgtggagaacgttgcgattctcctttctatcaacataacaaggtagtttttttttgctttttttcgattagcatatttcatactctctagtctgttttgtttatgcttcttttttttttgacatatgatgttggcagggtatagtcaacatatgcgaaaagtgtttcaagaatggaaactatggggagaacaacactgcagatgattttaagttgattgggaattcagctgcagctgtgtggacagaggaagagatcctcctcttgctagaatctgtgctgaaacatggagatgattgggaactcatttcacaaagtgtttctaccaagagtagactagattgcatttctaaactcattgagctcccgtttggagagtttctgatgggttctgcttctggaagactcaatccctctatcctcaccgaggatgaaaacacggaacaggtgcaaactgatgggcaggaacatgaggaaacagagacaagggaagaaaaagaagatcgcgtgaatgaagatgagcctccagcaaaaaggaaacgtgttgcactgatatcagagggtgatagttcacttatgaaacaggtgaatgtttggttaaactatatgccttgtgttcattattttccatatgagtgtaacattcgggttcttctctgacctttaaccgtcgcaaagaatgccctttttaactccactggaaaagaatgttcaagagataacatgtttacatattgcacaacaggtcgctgccatggcaagtaaagttggtccatctgtcgcaactgctgctgcaaaagctgcacttgcagctctttgtgatgaagcctcatgtccaaaagagatttttgacactgatgactacagcaatttcacagttgataggttcgattctctaagccctcaatttgcttgtggtttggcttctcatgtcctacactaatctcaagatacaaaactttgctcacagagccaatggagagaaagatacagatatggaggaacagcaagaagagaaaggtaaattgtgttgtgattcaatctgcattcctaggtttataatgaaagctcaaggcttaagatttggaatcgttatatatttgcagacgggcctcagggtctacctgtagcgttaaggataagagcgtctgtggcaacagctctaggagctgcggctgcacaagcgaaaatactggctgatcaagaagaaagagaaatggaacagttagctgcgacagtaatagaacaacaggttggttgtaacttgtaacaacattaaaacatttgtgtctgttccactgtgtttgtgtcttgaaccggacatgttttgcttctctttgttgtactcagctgaagaaactgcagagcaagttgaagtttctagacgacttggaatcgataatggatgaagaagagaaagtgatagagggtgtaaaggaaacaatcatccaagagagggttagcgttttgcaatgcgcgtttagaagcggtattaccaaacgttgggatcatacgtacgtgaaatgatcttcttctttcattcgtactttttttttctcttggggtagagttgttttctcattccttatggatttgttatgttgacttttgaggattatatgtatttagtattaatgtgttttattgacttaatgaggagagtaggtttaggttacatacctcttttgtcgatatgtctgaccaatggatgggtctctctactaattcacacgcgcccagtgtgacgtcaaataaataaaattccgaaaacattttctgagctttccataatttggaaaaaagtgaattgaaaaaaagaacagtgacactcttgtttctataaattggtgagaccgtcctcaaaaccccttcgtcaccttcagtgtctctctctcaagatctagctccggtcatgaagtcgtcggaattccaataccacgaggttctctctctctctccctctctctgcttagagattttagatgtagtagtaatagtttaacaggagagtgaagatgtcaagaggtgttgagatgattgattagatctttgaataaacaaatatgtgtatgaattggtgacaggaatacgtgagaaattcaagaggtgtagagttgttcgcatgtagatggatcccatcttcttcgtcttctcccaaagctctggttttcctctgccatggttgcagttatttccttattatttctaaaagccgctttcttcattacacataataaaactgaacaagttggtggtgattttgtgcaggttatggaatggagtgtagcgactccatgaaaggtttttcattattcttcttccttccaatttatgattcacatgcacaatagtaatgcattagatctaacaaatctccaaaaatatggattttttgtttctcttgccttgatttggcggtgggattttagatttaattagcaagttttttttttgtgttgcttctatcagttctctgaatcagattacgcatgatactgagaaaaaagtcatttctttcactgcttatcattttttttaacttttatattttagatttgatgcattatactagttaggatttgtgtagtgatagtagcagatcatggatcttaaattcactgtggaccttagaacatttatgtgtgtagtaatactccttaaatgcctctagaaagcaagtcatggagggtgttaggaccggtaggtcaacaagtcttactttatgtggttggttttggttggagaacgaccctcagactaaatttaatttatttcatttttttggtctttcctcgtttagagtgttgtatttgatcccttgcaaattaaattacctttctttctatggctagcttggtggttgagaaaatttattcggaagttgatacatgtttgaaactaaacaaactgatacatgttttgattttagaatgcggaatcaggctggcttcagctggatacgcggtttttggtatggactatgaaggtcatggaaggtccatgggatctcgttgctacatcaagaagtttgcgaatgttgtgaatgattgctatgactactacacatctatttgtggtatttcatttgacatatataacaataacattcctctctctcttcttctccgtttatcagtaagaagagattttctcaaccccttaagttaatccggttaattttatgtgacaccagcgcaagaggagtacatggacaaaggcagattcttgtatggagaatccatgggaggcgcagtcactttattgcttcacaaaaaagatcctttgttttggaacggcgccattctagttgctccaatgtgtaaggtaaaaaacctgcaactataattttagattgcagagtcgtaggtgataataatattgaaatgcaaagtatattgttatgtttaaatatgcagatatctgagaaggtgaagccacaccctatagtgattaatctgttaactagagtcgaagaaatcatacctaaatggaaaatagttccaacaaaagacgtgattgacgctgctttcaaggacctcgtcaagcgagaagaggtctgtatagtgtataccaaccctctgatcaccatcgaaattggttatatgtaaataatttggtgtgtgtaaatgcaggtaaggaacaacaagctgatatatcaagacaagcctaggctcaaaaccgcacttgagatgcttaggacaagcatgaacctagaagacactctccacgaggttcatgtctcttattgattgttcttgatcccgtgttatgacattatttctgaccaagacaacatgatattgcagataacaatgccattctttgtattacacggagaagcagatacagtgacggatccagaggtaagcaaagctctgtacgagaaagctagcacaagggacaagacgctcaagttgtatccagggatgtggcacgctctgacgtcaggtgagcctgactgtaacgtggaccttgtttttgctgacatcatcaattggcttgaccttcgaaccgctgaccctgcctctctcactgtcactcctatacgagttggtaacactacgagcgtccagagggtaactactgttaacggcgttagtaacggtcataggaggcctaaacgtcccttcttcaatctcctttgtggtttgaaccgtggccgtttggttccacgatccactgtgtaataaaattttatcaaggcaaacaaaaaacaatttatgaaaaagagagttatgattttgtgtgaattattaaagattggtggtctcatggtttgaaatttgaaaatgtatggcccaaagaatttataagttatggctacctaaaatatttatattcgtttggaaaacgttaaagccccccaaaaaaaacattaaagcccatataaattgacaaggcccaaaatttgaaaggcctaacttaactatgttgtagcgccggtccgccaagtactttcgagtatcgagtcgtcgttcttcttcttcctctgagagagagatctgcggaaaacgaaagcgagatttatcaggtaaggtaaaaccctaacttcttcgatctttccttgtgcgaaaatctgtaattctgctttcctgagtctctttcgtattcctttactttgataggttcggtgattctttgtggagaagaagctcgcgataagtcaacatgaggtatatctctcgatggttctaagtttcttctgcattttgtggtgctcaatttgagacttgtctaacactgtggtgtttctcttgattttctatattttttctcgcagcaagccaatggaagaggataccaatgtaagcttccttctaatttctctcgctactgcttttctcgattcgctgtttgccataattcatctactgtttccagtttcatcaatcttagctgtctctagtacttgagtaggactgtgccactaaagattttcactgaatttttgttccgttctgcgttgaatgggcagtagagaattggatgttttcatcacttctgccctttgttgtaatgtcatttgattgttgctgttataaactccattagtttcctgcttgtatgatactcttaaggatgtgttctctccttaaatgttgtttctaattcatcatgcttgatactgtccttagcagggcaagactgaggaagaggaattcaacaccgggccactctctgttcttatgatgagcgtcaagaataacactcaggtatagagatctctaggagatgtattgagcttctgatgttagataatgatgttgtatatgaaaactgattaaatggatagatgtttttgaccttcatgggctaggtgttagacaatgaaatattgaaatgtataacgaagagtggttaaaatggaaaggttattaacaaggtcaacttttttatgttcaggttttaatcaattgccggaacaacaggaaacttcttgggcgagtgagggcgtttgacagacactgcaacatggttcttgaaaatgtcagagagatgtggactgaggtagccaatattcattatcctgaaatcagttttgtctacatataaaacttgtggtgcctgagatggcgttggtttggtttaggttccgaaaactgggaaaggcaagaagaaagcacttccggtgaacagagatcggttcataagcaagatgtttctacgtggagactcggtcattatcgtcctcaggaatccaaaatgagaggaagagagacttagagacatgttccttgtttgttgtgctaaaactgataaattcttgtaggtagtagcatcttttaaagttattcgtctcattttcgtttatgtccgaattgacaagatcttttaaagatcttttaaagacatgttccttgtttgttgtttgttcagctcgcatgtccaagctcaaaactacggtgattgcattaaaaaaaataaaactttaaaatcggtgaggtttcaatatcactacattgacaggaatagaaatatcaaaattaaaaatgaaaacgaagagaaacgagaatctccagcgacagttactctgttgatgatgaagtggtggaagaatcctgcttttggtcgccaaagacacgttgacggaaatctttgaccataagtgggagtccttggcgtagagccacctttggttcccaaccaagaagctctttggcctttgtgatgtctggtttcctcttgtgtgggtcgtcctctgtgtttggtctgaactctatctttgcgttcgggtcaattgtctcttgaaccacctgctcacccaccatccactcgtttgggtcagatacaaagattttgagtgatcagattatatgtaacaacaagagaaaaatgtaccttagcgagctcgagcatggtgaattcaccggggttaccaaggttaaatggaccgacatgttctccctccatcaacctcatcagaccttccacctatcacattatattttgcactcaagtttaccagtacacaataataaataaccatgtaaggatacgtagagacaaaatgaagcatgatttttcagctcaacaaaacaaggacatggtataataaagatccgttgttggtaccataacattgattgatatccatccatccccaaagtttatgtcacactttacagagctaatccattttactatggcatcaaggttagtgaatcccgttcacaaaatcaaatcatagagagatcgtaaatacaagtgattagactaactatccgaacctcaaatatagattctcagccacttattgtatcctagtgagatcaactataactttgaatagtatcaagatagactgttttctgtttttaccatgtcaagtctgaagtataccccatgaaagtaacaattgaaaaagatgtggtcatggcaaaatttgaagaagtagggctactacaccatgaattgaacttttccttgtttttatctaatcatgaatttgaaaacttaaggaggaaaaagtaaaaggggattaccagatcagagacaaactggaaactcctagtctgcttaccatcaccataaacagtcaaaggctcttttcttaatgcctgcacaacaatcatcattacttaataaaaggtataattccgttgatcatttattaagccacttaatctaacacaaagtcctccgcacctgggcaacgaagttgctaaccacacgaccgtcatcgatacacatccttgggccataagtgttgaatatcctagcaatcctaacctgttgaggaataataaatcagtcaaaatctgcatctgcattttctagcagcgaaatataatgaaaaagaaaacagacctcaacattagcgcctctgtgatagtccatggtcaaagtctcagccgtacgtttgccttcgtcgtaacaactccgaacacctgttccaatttgccatatcactactctttcaatattccaccaaacacaaattgctcaatctattatttcagaaagaagaaaatttgattaaaatgtgggaaggggggtaaaagcgtcaaataaggaggataaaaatatctcctgcgggtgcgtctatgaaagagacacacgtctgagagccgtacgattaaaggacccacaatctacgcttcaaatggaaggaactttgaccagatcttaaaaaagaactctctctctctgtgtttcttctgctaacgtgctgtgtttcttctgctaacgtgcgcttaattgttgtttcaaaatgaggaagaagaagaagaaacagagagggagatgaaggggtagtaccgatgggattaacgttgccccagtaagtctcaacctgaggatgttgaagaggatctccatagacctcactcgtactcgtcagcaagaatcttgctcccactctcttcgctagtcccaacatgttcaatgttcccaccacattcgtcttgtatccacacacacagagttaaggacaagagcaagcaagatccatactacatataacaacattgatgatgataaactgaaattcctatagaaggaaaagaaaaaggatatgatagtcttgacgggattgaatttgtagtgaacaggagaagcagggcatgccaaatggtagatctgatcaacctctagaaggatcggctccactacatcgtgacggatcatctcgaaattagggttattgaaatggtgcatcacgttctctttccttcccgtgaagaaattgtcgaccacgatcacgttgtctcctcgagccatcaaccggtccaccaggtgtgacccgacgaaccctgctccacctgtcacaacaacccttagcactttccgtttcaagcctagagggattttgccgcctgccgatccgatccggctcatgtactcgatgcttggcttcttatgaatcgtcgctggcagatacgatgactccgatcgcattccgtatccggaaagcggatccacgtcgtaaggaattggttggtggttggatgatttggagaagattgtgaatcctaatgtggcgatggcaatgccgacgaggacgaagacgagtctctgttctctgagcatgtaacggatcggacgaatcgctacgaaccatggctttatcggctttggataataagattccgcttctggttgctctatctcgtgtcgccggtttgtcagctcagacgccatctttcagagtttctggatccacgatcgtgataaatggaaggagaaagtaatcgtgattttaccgagtcgaactagccggagactgagtcgacctgtaggacggggagtgaaaaccgatttgggttttcgcttgtatttaagtagacgaaggtgcgttactgttttagcctcgttcttcttcttttattacgatgatgcccctatatttactttgtttctctctctcttttaggcgtttttcagatttgaaaagtaaacgattcttcaaaaccggacggacattgattactatcttcgttcatttgttgaccaattacaattttctcttttataaaatgttgtctttacaaaattaaatgactagttttataaagaaataaatttattttcagttttgtatttattacttgttgtgaatcaatctatttatgacttattaaataactttgatgttttatttggcaactactgacattttctttgcatttttatattttgtataaattataacttttgtattcattgtcattatggggaaatgaatttttgaattggaaagtgctgacaacatataaagtatatgtaatatgactatgtaagtaaggaattatttagagaaaacttcatactcgatcgatatataaaaaaacgacgaaaatgtatcatagagttaacaaagtagagtaatgtaccttaagaaagtcaataagcgcctaatttgtcacgcaaagccaatttgatggcaactttgagtgatttcaacgctcgtttattttcttctgtttaattatttttcccactagtgatacctaacatatatatatgatcatttatgtatacatttatcgttaggaaatatatttttctcgtacgaaacgtttattgacagatttataaactcacatgcattcataacgttttcacttttttgttgagaagaaaacgtgacataacaacgttttttgacacaaattttggcatattattatttaggtacaaacatgttttgagtttcgatgataactttttttatgggtcagattatattgtatgggtgaccgtggtaataacatttatctaggtttactttgacgttaacttcctaacatacataaacaaaaacgaatataagtttgctaagagaaaagaggaagaaacaataagagattgatttggtgtcgataatggacaaagagacgcacaaattttatatatttaatttctataatatatatacatcatatttaaaattaaccaaggttggcggaatattgacaattcaacgatacacatacatgcatgagaatgccttgtcaatatttttaatttttaatttttttggtcgagccttgtcattattttgataaattttctgcatataaagaaatataaccaacataatataaaatcgattaatacaaatttgattctgatttcattgatacgtgaaactcagttaaaagttaaagttatttagaatcaactacatttagttcgtaaaattagtaattaatgttgtgtgcttgacattatgtgaacacaacttaatttactaaacccaaattagaatgaaaattgaaaaaaaaaatgacgaagatgaaaacgatagaggaggaggaggaggaggaggaggctcgcacgtcggagaagggacttggtcgtgaagcgacactgattcatatattgccacgtgtatctctattatttcccacgttttctgcactctttcattctccccattttcgagccagcagcgtcactttttttttttttttttttttatttgtttagtatagagtaagtagatgaacatatataatagtgtatgtgcagaatacgtctactattaaaaatatcaacaacaaatagtaggagtagtaatttgtcacgactcacgtacatctactgcaagtctgcagcaaatcattgccgagcattataacttaaacagcagtattttcagaactatctcacggtttttacccaaaaaaaaaaaaaaaaactatctcacggtttaattacatgactcaaaacaattgatattgctgttgtaacgtttttgtgaaacaaaaacaaaaacaaaagaaacctttgtttgtgggccttttggagtagtcacggggaaaaatctgaatccgcattttgggctaaatgtaggcccatctctgaaacatctaccaatccccgttagattcaaatttgggctttagctaatatagtgaccaatgaccatctcgctccccttttgtttattcgcctcaataaattgatatgtagaatattttgttttattccacaataaattttgtcaattacaattctccaatattttaataaagtgaaaaaaaccacatgtaatgaatatacttgtggaaataaataacgtaccattaaatgaatgtttctgaaatgtagttggaaacaacttttataatgttttgtcaccaaacttacggaatgacaaaatggttccatggcaatcacgatacgattgatccaaaaacattgtaacgttacgaaaaaatgagatatttgcaagatataatagataataaaccgaggccaactgattttgtaataagtacgaaaatgataaattcatgataatttgtgtgagttaagaataaccaggacaacaatcaacaatcatattatttataattagtgttacaataatagttcgaaagtaaaataaagtttttttcttcttctaatgtatgtatgattcatgattgtatgggtaataaataaatatcatagcgtagattacaagccatcaaaagcaagcttcttgaggagagccagagcattgctgcatagtcgcatacacttggtggccttcctccggaccatcctgaccgtccgtgttctactcgacgtctcttcaaatccatctagacacgtgtcatcatccgtgagtgctgcgcttagccacgtggcgagatcgcttatctgccgctggaactcatccgcgttcagtgtccgcagaacggcgagcgacttgtataggttgtcgagagagtccacgaagagctctcggcaatccgacaacgcgattcgctcgctttcgccaactgctgaacgctgcgttttgagcaagagcctcagcacccgtttggtgtcggttatggtaaccgcgacgctagctcgagcccacttgctggtgttgtttcgagcgacgattgcaaacggccatagcgttcggacgcagaggcggttgtatcgcgttacgttgcacgcgtttctaacgtatgtgctgtactgcgtcacgatgtcgtttgtgttgatgttgctaccggtggaggctaacgacggatttgggtttagtgccacaagaagagagagaagcagaagaagagtaaacgtgataggagaagaagaagacgaagtcatgttctttattggaggaatccaaactttttaagaaattgggacgatatttcaaatggagatcgagagagactatattatatacacaagaccaagaaggagcctatgggattaagttttaacctttttaattagggacgtgtaattgaagtttatgagggtatttgggaggttcatttgattttgtaggtattgtagtcatcattacaaacggtttaagcattatttttggatctagctttatggtgttgttttgaattctgtttttctttcttttactatttcaagtaaaactaccactaccagcgaaaactagatatatatgtgttcatttcttaaaaattgcattcattattggttttgtctggtcacaaaaaatcattaacatttttagaatacgtaaaatcatgggattgccaataaaaaacagtaaagaaaaggtgctaatcaagggagggttgcagaggaagcaagagaaaggtgagaagcaataatgaaagttaaaagagtatcaaaaagtcacttggagttggtaattcttcaagcttaatttttgatcctctctaatcatttaatgttatgaatttgattattgtttttctttaagcaagagggaaattttagaattttttggaaacatatctgaacgtggatttcattttacaataatagctatagagatacctagggggtccgaatcaattcactcaataccaaaaaaaaggaccggttaccatatcgttatccaaaccggttgattcacatttattaggatgtgttttcgcattgaaattgagtgaggccagtgatgttaacccaaattcacgacctaaccacatttttttacgtggcgtcacttctggtataatatcgtcagggttagttatgagtctggttcgaataattaaagatagcatcagatagaaaagtaagagatcgtcacatgaattacatggttatggccattcacttgatcgccatgaaacacaaaacatatgatgacttaggaacagagacgacaaaagtatcaaaaggtaagagtttttttttgtcttttctttctcaccaagagatcatttgttgtgaagagatttgcgaagaagagaggtgtagttaccaaactggatgtcagaaggcggatggagattaaagacataggagattggtctggagactagcataggcttctggattgttaatgtgtcttggaatgcaccaaagctttctgaatcgtgtgggaaagactctccaaggaagaagaagctttctctggctagcttctcaaccttgacaaaaaaaaaacacatacacaaataaatgaatggagtggacaaaacaatgaaggtgctgatacagcaagacttttttttttacctgtaagagtgagaatctgacgttgttcattgtgagaactactcggattttgtaaagcttatcgccgagtaatctgattgccatgtgctcgaagaaattctgcagaatagttttctgcttctcaggagtatcagcatagctgtctgggttaaggaaccacagcacgcatttcacttcgttccacgggattgggttctcccttcctgcttttgagatgattgtctggtagggatgattgagaccccagaagattcttgtgtctgcaagtgatgaatcacagaaaagcgtctctgaagacgatgatgttgagagtattctccaggacggataacggttggctatacttgaggtgaaatgcatgtcagagtcatcgaacacaaggatacatccctcagaagaagtaggaaacaaatccagaaggggcgatgtggaagagccatcttcttctggaaggcattggggaggtggaaggtatgatgttgtccgtcgtcgcatggcgtgggaaaacaaacacgattctccatttcgacatccctgcaaagacgacttattagcatagactctgaagatgacccaactaggatggtaacgtaatgcacctgcgatgatgcgaaaaatttgcaggctggtcttgttgactgaagagtatgagtgaacgtgcactggccaccacggttacaatatccattaagaaaatatacacagactggggcctctccatactcaacgtaatcctcaggttcgagtgctccatggccattatcagattcagatggtgtgcattgagttcttatctatggcaaatcgaaacagtaatagatcaatacgctgtaaggaagaaacattgttttcagctctagcatccaccacactcttattattgaaaaacttggtacaatgagaagattgataagcctgtaaacgcaattactaaatacacgaaacaaggtcggaaaatgaatacctctttgataatactggccatgttttctgcaatagcatttgcttggaatgcgttaggaggaacaaacggcactgatacacattttcttacttcaggaggtggttgattgttatctacgtcctcagagtgtagatatttatcttcagagggttggcactcaatatagcatgtatgatcaaattcatatggattgtaataggttggttgagaatcagaggaactgatgaattgaggtctaaaacgatgaaatgagctaagtgtatcttcatctgtaaaccagacgaaaaattccaattaaaggcagaagaaagtagagaaaaaaaaggaaagagaggctattagcgcgttaaaatggaaaggctatataaaaagagtcgaggaagcaatgaacttacacagctcagacacatgatagaacgaggactgggcaatattgtggaaatcacaccactctttctcaatctcaggaaacatcaacttgagatctttgtctttctcttttgacaggagttgtttcaagttttcaagacgatgcttatccttcaaggagagaaacatcggtaagatcttcgagaagagaagctggtatttcgtgggaatatggcgaaactatattattaccttaaagacacgttgccaaaactgaaaagcacaaaagtttgccatgagtaccatctccctccgcccaccagaaatggtcttgctgccaccaaaatagtggtcaacatactctagaaactgtaaaagaagacaaaggtgaagtagatgattaacatcatgatcaaaaagacgtgtagaactgtagattaattcaccaataggacataccagtgaatcatctccaaaaggatgatggataggaagtggtagggtatccatcaggacacctaatagaatcccttgtcttagcattcccatttcaccaaacttgacgaccagaatagatgcatcaaaggacaatgggaagctagcaagcaaccgtccataaaatgtgggctcgtaacgtcccctaggcgatttccgcaatgcttgtatgcttaacagcatccttaatgcatcgtcaacgacatctgggtctggtggatccatagcttttgccagcaatgctaagttatagaatataataacactcagttcaactgacggagtctgattagatagacacaataacattttggacactatcttatagattcgatctattgtatttctaaagcatatatgcacccaatttttaagaataatgaaagaatactcccaccataagcatttagcttcatctaaggatcttcgcaccaaacaggaactcatgtgataggtacttatgcagtagcagaagacctagcaaacccgactgtccttactatttcacaggtaacccaagtttgacatcttctattataaaagaagttaaacattctctacacaattataatattattaccatttgcgtcattaatggctctggattccgtgcagcaaatatggagaacttgttgtctcaatgacagcttaagtatagatgggggctcatgttcttcaagcttgttaaaaaatgcactcggcaccaggcgatacacctcaccatcacatgttcgacctgtcctccctctacgttgctcagcctataacccacataagaagctaaatttagaacatccagtcatccactattattccataaatggtaaattctagcaatacctgagatctagagacccaaacaagctgtactgcgtctctttttctggacggatcccagaacacttgcagagaccggcacgagtcaatgacatatgctactttgggtattgttaccgaagattccgcaatgtttgtagccaatattacctgagaacagtattttggaaaatttatataactatgacgtcacaaaatggtagttgcaactcattgcatcaatacgagtttgatgtccccccaataataatgctcatctctcaaggacaaagaaacatggaaaggtaaaagagaaaccttgcggcgggatctgcatatcttcatagccgccaaggcttgctcggtgtcaatgcttcggtgcaatatgtgaacctcaaaagatgcaaaaaagggttccaattgatgatactgctgctcaagggagtagtatgtcggaaggaaaaccaaaatactcttctcaatgtctggttctttttcatgaatatataagataagatcatgaataagattttgcagttcaggtttgatttcagtatcagctgaagaaggacttggaccaggacagtaagctgacaaatcagaactcacaccaagcaatcctgcaacctgcttcacaaacagtgtcatattaattagcttggaaatacttgccgtcagaaaagaagaaaatcaattggataataatatagtttcataaagagcaacaaatctaaaaaagtttaacctgctcaagatataatactcttcgctggaaaattgttctctggtcagggctaggaatagcaactacttctacgcgttcacccctgcctagttctttaaagtagtctctgtaccttgttatatcagcagttgcagacatcaagaccaccctgtaattaatcaaatcacctctttaataaccatgacctcaatacaaacgttatcgatgataacacggttgaagtaatgaatcggtatagtatagaactgacttatcttctatcagcaaacacaaccacgcgaaacaatttaagaaccttaaagtaattacatcatgttgtagaaaagggttataacctgaggtcattattcttcatgagaaactgcttaacacagacaagaacaagatctgactccacagatctttcatgcacttcatcaagaatgataaccttgtactttagtgcattcaaccccttgtctagcatttcatccaacagaactccagcagttttgaacagaattttcgacctgcatgcaacaggataattgcataaaagtcatcaataagggggaaaaagccaaatattgtcctgaaaactcggacacagtagaagaaactgaaaggagatattgttctataagtcaagaagatgaagataatgatagttacccttcggtcaaaatcttagaatgcccaatgtggtaaccaatttctccacctaaatcggagttgcgagatttagcaaccatcttagcaacagctacaaccgcaaatctcctaggctgtgtacacaaaatgggagccatgtttgcttccagaaggaactgtggaacttgtgaactcttccctgaagcaaagaaggacaagtaagtaaccacactacgtatgagatgagtcgaaaatccagctatccattacaatcacaacagttcaaaggcgcagggaagctaaatatggcccaacttgtactatttccgtttaacgcgttaagatagaaacgaatcaaatggactatccactcacagaaaacattcaaaatctggtgtcatacaggaagaaaccccaacggagcatttctgtaatcaaaatgacgaagacgacaaaacaaaaacaaaaaccccaacggaaatgcagattactaactagagtaagtcgtctcggaacgaaggaagaaaaatagaataagagaaagaagaaggcgagcgcaggtaccgcatccaggctcgccgacgatgagagtgacgcgattctcgaggattttgtcgatgattctccttttcatcgccataatcggaagcgaagcgaagttggaggagggtaaaggtaacgattcagaagagctggaagacgaagtcggcgaagaaaccgccattgttgtcgtacgcggagcactgtctctcttcctctacacacagagtctagtccagtctctggtatttctaatactgccaatcacatccttcctctctacgcttttaggggggttttaggggagcgtcgatcaggtgcgacgagcgtacgtttagctcgctcgttgatctctcaagtctaataagttgactaggtttgactagtcaaaatgtgtgcgggtgtatacacacactggagagcttgccgcgaattacctaggtcccactaaggaaaggacatatatatatcatgggcaaaaaagtgccgccaatcaaaacacttgaaaaaaagcaggaaaaaaacttacaaatagaaccggcccactcatagcccagtaataaaaaagtccattaatggatatctcgggtcatccaaaaacccgaacccgaaccattttcgatgaagttgacgaacctgtctggttttgttgcgttcttccgatttgggttggagaggaaatggcgtcgggatggggaataacgggaaacaaagggagatgctacgatttctggatggatttcagtgaatgtatgtctcactgcagagagcccaaagattgtacccttcttcgtgaagattacctcgagtgtctccaccattccaaagaggtaggtacccacttcttttttccggtgatattgtttgaagaatttcattgatttgatggttctgatgttcgccactgtttccggctagatcagtgtgattgtgatgtctagatcacttagttgtcgaaattccaaaaatcctagatcaggtcgagcaattgggaaatgagtcccatgcctttgttgattggccattttcggaatcctcagctgcagaatcaagatgccattgaaagatcatgttctcttgtttaagataggatgtatcgattaggcgtttctggaactaaatcatctctgtacatgttacaactgtttcttctgcaattacacggctctcttagaacattacgattgacaccagtggtttctttactttgaatgaagatgctgtaagtttaagtttttatgtgttgtgtacctgttgttgcagtttcaaagaaggaacaggatatacaaggaggagcagcgtaaactaagagcagcttcgaggaaaggtgaagaagccggagatgggactcacaaccatcactagtctcaacaatcctccttcaagcttcatccgattccagagaagaataataaaaggttcatggaagattttgtatcttggaatctctaaacgctttgattgtttttcagttttcaattttatccaatcatgttctgctttctttttatgttaaatcgtctctttgagacgtatacttttccacctgaattatggacatgtggattgtggatcatttacttcttcactattactccatccaaccaggaacaatggcaacattttgtcgataacttgtgtttaattaattataacaattgttcttggaaagctcacaatgtacattggaaaccagttatagttacatcataaacaagttttgatcgatcaaacaagtccccagttttcttttatacattgatcattaagcctgatagaattctcccaggcgactgtagagttctgacacaacttctctcagaagtgtctatgccacaagctagggatcgtgcgatgattcgatgggacagggaaatgtgggaaccaatctctctcccatgcatgaatttgatcggtttctggttcatggtgtccacctggataaatgaagaatccaacgttctgatctggcattggtgggggaggtggcggcggcggtaatccccttcttgtcatggagatgagaggtgatgcgagagtgggaccattggcatgatgttgttgcctctgatgattataagcatgatgctgttcacgcatttgggtgctgcttccttggtaactgttaattgctggtgaggacctttgattagacctacaatgcccaattccaaaagaatattgtaaaacactctgcaagaagttgagagcaatagggagtttgagaagctaaccggtgactaaaaagaaatggatgcgcataaggtaggcctcgtgctgctgaagagtcaacttcaccatcaaccacatgagcagcgggtagtgaaaacgatggggaatggtgatgatactggggggcaacaggaagctggtgaaagtgatcgttagagtggctgttccagggatgatcatctgtgctgttattgtcgctagttctcggggtagcggctgggccaggtccaacatatgcaagatacgaatgattcacagcagcggcgtgatgtccatggaactcagtatgatctaaggaagaaatatgggttttgacattataaacggattgctagacaaaatgaaatgattatatacagaacaatcagcgtctaacttacatgtagtggttgcaggttccagttccctgaaacacagagcaaaagtcaattctagctttcgcgtttgaaggatcaaaagccttagaaaagagagataatagcaaaaaccatggtaaaggtgttgtaggcttactcgaaagaagctgctgcttgagagagttcaccaaacgggcaccaatggacccgatattgctgcaaaccccgtaaaaatgtcaggataagcgatctctcataaggaggttatatgataaaagcacagttctcatgtacacgaaaagaaagcatatcgttgcacaaagtagtgagcttttaccatttccggatagcttaaaccgtacaagtcttcttcagggatccaatcttccatggaaaactctggaaaggggcgagtagaaccgtttgcatacaaccactgacccttttcgacattgcgacagttagggcattgcatggctcctttcatgttaaatgctgatccaatgcaatctgcaagaaaccaaaaaacaagctgctaaagggaaagccgaaaatagcaacaaattcagcagccagataatagaactagcaagcctcattctatatctacacaagagaagaaaccgattcacaagttacgacacacatttgtcagaactcgatcatttctaggatcaaccaactgcagagtcgtggcaatctaagcttgtaaacaaagcaagggattaggaatccatctatattctcaaattcattcaattatcgtccaaatctaccatcagataattgcacaaaagcttgtacaagcaaaaagccatcggatcatcaaactgtgatggagggaacgcaaaatggtaagagatggaggaagggaatgaaatacccaaatggaactggtgaccacattggagcttagccttggatctggtaccatcatcgagcaccgattcgaggcaaatcgagcacgagacttcgacaggagacgaggaatcctccgggttcccgcgttttccagggtcacatccaccagcaattcggagatcatcatcgcaacccgaatctttagctccggccatatcttcaccagcaggccaaatcggagggaaccaacgaaaattttcgtttttcgaaagaacaaaaaaaaagaaaagaaaggattgtcaaacaaaaatcaatgagaaaccatgtctcgctatcgctatctgtctctccgagttcgtctgccttttggaacgccgatgcggtaaatctatccttcctcttcctctctctctctctctctctctcgtccgacctgttagagatgacgtggttcaaaaccggacaatgacattggactctcccttttcttttctttcctctcccattgtggataattttttattattattttattactttagttttggatagatgatcatcaaaccatccatccatctgaaccaacaaccaaactataaatttgttcatttaaatcattaatctctatttagttgatttgttttcttctctagtctctttcatatgaagtttattataactttcacatccattttgttatgagaaagattagcatattataacacacgaatattgattgtctaaggataccaaaacattgtatgtagtaaacaattacacatatagatgcaaatgtatattgtcttgaatcgttgtttcacatcaagctaatattatttcactttattcttctgaattagaagactatgcagagactttgctttgaccgagtagccttcccttaggtttcagaccttgatcttaggcttcttcacgatcatcaccgagcaatgagcatgatgagcgcagtagtcactcgtactcccgagaaccgccctgccacacaaaccgacaagtgaatcagaatgggtgtatagttgaaagattgatcataagaattaaggctgaatgaaataatacctcttgatagctccatatccatggcttcccacaacaagaatagaagcatgatgcttatctacaacttcacataggatattccttgcatcaccttcgaaaacttcgatcaccgcgccatgaacctacacaacaaacctaggaatgatgattgaaaagaagaagatagttgctaaccaaagatagatagttactataagaaaaaccagtgctacttagcttgaagctcttaaatgtgctagagattcacattcacattaccaaactcatctaatagagtccaatacaacacatgatgacgattataaaatccaagaaacacataaaacgaatttgaatgtttgataatagcaagatcgtaccgatctgctctgacaaattgctttggctttctcgacaaccttagcagcggtatgcttcagatcagcatcaacataaggtacaacctccgcagttcctaaaacacacagattaacaaaacctaaatgatctctccccatcgctgcccaaaacagaacccctagaagagtagattcgagagtgaaagcaaagagcgtaccgggaccagcgagaccaacggcggagacggcgttaggtttggcgtggacgatgaagagcttaaaaggataattgggagcgtaaggagcgaagaaacgatcgagcgtccactccaaggcgtaagtgctctgctcgctgtcgtcaactccgacgaccatcaccgatttcccatctccggtggccatgactctgacgttgttcgccggcgtgaagaaaacgcgctcttgtgtttgtggtagaaagaagcctagaagaatcctccaaagtgtttgcacagaaaaagagagttttggtatcttcttcttctattatttaatttctttaaataaaaagaaaagaggaatgtgatactttgatttgatgacgtggctggtcctcatttctttatgcctttccattagtaaatttcccaatatttaaagttacccacagattttaaataagaagaacccacagattttacacaaaatttattctaatttgaatattacccataaaacaaagtacataaaaggattttgcaggttaacagttattagctttttagtaacaaactgatatgaattggtttgataactttcgattttacttggaaattaactattacaagaaaaatctaatttcaaatagtggaatgatttgagttgggtaaaatccggctcagatgataacaattacaaaataaaaatgagacggccggctgtagaataatatgacgacgtgaagcaaaagcaggagtgcgacagaaacctctctaaccaaattgcttttagttatattcttcttcgtcttgacgctactctttacctttttttatctgatttcagatttctccagaatcttcagattcccatggccactgttcatgttgtcggtctgaaaatcaattctggatctccagggaaggacacatcccgaaaggcacctgatgcaattcatgctgctttatcaccgtcatcatctctatcattactcagaggtacatataccttaaaccccaaaccagtttctccgtagcattttgagacgtcatcattcttatctatcatcaaaccttgctctttgtccatataggagtgttaccaaagtatttcagctcagagttgtcagtggctcagttccggttggtcgaaggatcttaatacatagtggcatttggacatgagaagaacacagattcttgggatggatgggaggtaagagaaccataccctaaccttaataatgtcctacaagtcggatcagcagctttgtttgatttttgggtgttttgcagcttctacaaaggccagttttgatccagtacacggaggagagatgtctcagctcgagtatcataactgtctgaagccgccttctgtgttttgaaacaacaagtcagcattctcttacttcctttatatatattaatcttgttgagattctggattttaggcttgtgtctttggtaacatatgtggtttccggttagttatggaattgtcggtcaatctcgaggcaagaagagagagtatgtatatatgtaaatgttgaaccactaatcacttaatgattatttagttaattacgttggatctcatattgagaatactattttgcatatatatttttctgaaaaaaacaacaaaaagaaaggtcaacattacaagagtaaaattgcatatgaagagagtgataatgaaagttcaagtgtttgtttctgaattcttgacatgtatataatcaccatataactgtttccaaattgtagatggtaatgcaaaaatctgatgaggagggagatggttctgtttccagcaactagatttagttataacataaggggattgattattgttattgttattgatccttcttctcctgttgaattggattgagagttagttggtcaaaaggtgttatgggttttagaaaattaataaaaacaggtgggctttgtctgtacatgtccttaaattatttgttttgggagtagtttaatatcgaatgatacgtttacacgtaaaaagtcttttcttttgagtcgtcgtctcaggaaagatgagattcgtttctaggagaggttgactttttcaatccacacttataactctagaatcttatgtcattgatgacgacctcctctacacttttggatttgtatgtttacaaaggaaggaaggattaccttagaacagtttatgtgatgtttgtgtctttctatttttattcaatgaaatttctttacatgtacatagattagctatattgacatgaatctaactgatttttttgtttgcaaaataacaaattagtgaggggaattttgtttcagtcaataaatccgtgatttctatatgttagatggataacaatgcaataaataaaggggacccaataaaaaaaaaggaaagagagacgtgcctgtgggtagtgggtggtggtgagaagattctggaaaaatgggagcaattcaagctcgtcttcccttgttcctttctcccccttctataaaacaccataccttccttcattcttcttcatccaattccaatttcaaaatcagatccaacaaatcttcttcttcttcttcttcttcgatcatcatggccagtatcaaggttcacggagttcccatgtccaccgccacaatgcgcgtcctcgctactctttacgagaaagatctccagttcgagctcatccccgtcgatatgagagccggtgcccacaagcaagaggcccaccttgccctcaacgtaacccctttctccctctctctctttacgaacaaacaaaactgaaaacactttatgtttggtttttccaattatctgacaatgatctttgttttgtttcagcccttcggtcaaattcctgctctcgaggacggtgatttgacgcttttcggtcagtttacttttgctttgatcaatgatttgacttttttagatttacagaaacatcattacgccttagtcactttgtattggataacgatttatctgaaatgacagactgtgatgattatttttgttgctgaaagtttttgttggtaatatatttgcagagtcaagagccatcacacagtacctagcagaggaatacagtgagaaaggtgaaaagcttatctcccaagactgcaagaaagtcaaggcaaccactaacgtatggcttcaagttgaaggtcaacagtttgaccctaacgcctctaagcttgccttcgagcgtgtctttaaaggcatgttcggcatgaccactgaccctgccgctgtccaagagctcgaaggtaagctccagaaagtcttggatgtctacgaggctaggctcgccaaatctgagttcttggctggtgattccttcactcttgctgatcttcaccacctcccagccatccattacttgttgggtactgactccaaggtgctctttgactctcgccctaaggttagcgagtggattaagaagatctctgccaggcctgcttgggctaaggttattgacctccagaagcagtagtgaccctctctctttcttcacttcttttcttttccttttgcccaaataaacgagtccagtgattttcttttcttggcttatgtacttgtgttttcagtattatttatgtcatcatcatcctcctcttttgtgttattgttgggttcattcacatttgtgcaattaaaaaccagagtttaaacgccaaatttgcaaaaccgttacattttaccaatgaagaggttaaatgtcacgaaccaatattgactaaaggactccaataatccaataactgttaagctgagaataaccttaattatatggctttgttcaagagccggactttaaactcaatcggtttcaaccgaagataagttgcttgctctgcaattgcgtgacgccttgggaaccaagataagtggttatgcccttaagaaaaccagagcaccaatgagctgagagtttgggagatctcttgcgatgaggatcatgactcagtacattcctaaactattctcgtatccactgagttactcgtacaaatccataaatgaccatacaaagtagcctctcgtgtgaaaatagtgataacaattaaaaatgaaaaaatgcgcatccagggaatcgaaccctggtcagtaccgtgggagggtactatgataccactacaccagatgcgctttttattatgctgacaagtgttttattattaactctaacatttgttctgccgggaaagtttcctgatgatagtaagaaacagaacaactcgaaagagaagacaatggcgcgaggaggattttaagataacgaaaccagagaaagcctgcactgaagttagaaaacggtgaaggaagaagaagaaacagagtagaggaattggtaacgccgtagcggtgaagcaacgacgtccgtcttaagtcgataaaatttcttataaatatgttttatcaataaagcagcgaaaaaaaaaaaaaaaaaaaaaaagcagcgaattcgatcggatggttattattacagagagtgtaaaaatttggtaatgatgattaaaagtcttgggatcatggaacccaagtcgggtcacgagggctaaagaaagaagccattacgtgtccgttcaagagcttgaacgttgcactgttggacttgacacatctcggcgttttatactgattaaacgaccctccttggcttataatcagatccatcagtttctcgaacgttcctggtttcaccactctgatctctaatgcccctatcgatctctctttcgtcctgcactgtctgtatatgtagtccagctcttcctccaccgcaacgcaacactcttccatcagtttcggctcgagatgaccttggatctcccagaatagcacgtagtgacctggcactgatgacgtgtccgcgtagctcgtgtactccgccaggaatgcgttgcttccaagcttcttcttggctaacgttatgctcctgtgtagatcttcttcgttggttttgtctaagtcgatgcttagaaccacgtttctcctgcagataaaccggaactgtggtgctccgttgtagaaacccgccacttgaagaacgtcgccgattcggtaacggtacaatcctgcttgcgcatgaatcaatcatcaaccaatccaaaacactaattaaaagaacgtttctttaaatacctgcgaaagttgtgacgaccagttcatagtagcggccgagtttgacattgaccaagtcaacgactttatcacaggggacttgttcatcgtcgtctagatcaaaagagagtgtcccgtttttgccgagagggataaactcgaagtagcacatgttaggcaagagagtgaaaacgacgtcagatggtttggagagtggttccacgttgactccaaagtaagtctcagaggaagcatacattggacaaaccaatggaatcttcccctggctaaaaaactcaagtgcaggtatgtattgagccattgagcccgtcactactgcttcgatgaactttgccttaggccagagctgacacagaatccctttccacgacgaccgcccacagatctcttcgatctcgctagctaactctggattcggcgacattaaaagacaagacattgccatttggcaacctggatcggtgatcatggggttgagactaccggtgcggatgtcttcacagagctgactccatttcttctcgagataagagattgcacggagaaacgctgaagcaaagactgctcctaaacgcatcaccttgtgacggtgaatcagaccggctagtaactgacagtacatgctttggttgctgtcttcacaaaggatggtttggataggactggttaagtcgttgaatggatcataaggtctgcactggaaatgcttgcttttgtagtaactagtgaggacagctctgattggtaaaccacaaggagttgatgtttcagcctttacgaaatttaggtacattgcttttcctttgtcaagtcctgttatgtacctgttgtaaaaaggttaaaaacagagcaagaagaagatggtaaaagaggtaacctcaacggatatgaaagattctttaggtttagtgagtgcatgttcaaaattcttagagaatctttagtggggacatcaaaattggcgtgtggataaaagatgatggaagcaaactttatagtacatgacatgataccactaattgtccccaaaaaaaacaaaaactttaagaagaaagcaaacttcattttcttcctaagtgcgaaacccattgtgatgaatatattggtaccacactaccacggacagtacctcttatgagtgttaggtactgtatgtactaatttccatatgttagtggtacaatgattatgaaaccatagtcacactgaggtaagaaaattgataattctttcaagattttcaatagtaatggataacattgcagaatttgatgtgatgtccttccatttccatagattggctttggagacatatccattatcctacaactagaggaacagtcctagtggttcttttatggaatatgagatcacccatttttctttgttttgagcatgatggtcacttattaagtaaatacttatgtgcacacaagacgtatatctcttttaactctaaagatttcagaaagtagaaaaagagcctgacttgcccttaggattttaaacagcatctaggagaactaattattagaggaatcaaaggaggaattcactgacttgttcacgattggaatgataagattgtagagaaaagtgcggcgatcaagatcttcaggaatggttggcattagctttggctctccagcagaagtcccagagctgcgaaatgcaagaaagcgattacattttcatcagctaaagaaagacatgcacagagacagagaaggcagcgactaacaaagattcagactgaaacagatacagacctgcataatatttcagtaatagaatggccagtaataagagatgagtcttctccattagcaattctctgaatgtacggatagatatctttgtatatgatgattggcacagcgcgtttaaactccagaacatccttagagccattcatgtacttactcaagtactctgtgtccttgtttctttccaagatcccacgtaaaatgttatcttgaacttcagcagctttcgaggtgatcctctcaagctcttttaatacactgtcgtgatcaagcttcattacatccatttctcagctaacccaaagaaagaagaagaagaagaagaagaagaagagaggtaatgactgcctcaggactcaaagtaagggggtatatttatagtgggtttagccatatttacatacccagaaatggagattaactttgtccttgcaatatatcagttaaagggaaaaaaaatcagtgctgatatcatcaattatgcaagctcagtttcaaggaaggacaatacgtataagaaaaagatgtacttaaagacactaacacaacaatattgtgtaaagacatagcagcttctctctacttttttactttaaaccaaaaccagcatatatatcagagttaagttgactttctgccacatagcaaaaccttatataatggctacgaataagataagtctacaacagcctgagtttacagctaccaaaagggtcattaacaagttctcagtaaatgaagagactttgttcagcatgagaatcagggaagcaatcacaaccatccatattttatcaaaaaatctcaacaagggggccacatcttttgatgatcaaccacagtcatgatcatcaagctttaaagcatgatgcgtttggtgctcgccgcatctgattattggcgaaagtccaccactagctaaacaactgctgacgctactctgtccctcaagaggaacaactctaaccagacattgtggacgctgttgggtgtggattctttttccatatgcagaaagggtttagtgacaaacaaaaagctaaacttgcttctctctgttattttggtgactcagtttagcatataatgtatcgcactattgacccttttccatgcatggtgattcacttctcaccattcccataaaaaacaaaagagatctaacagtttttaaactcagattctattggttcatagtcttatccacaagctagatcttgttccctctccagatttccctgtttaaagctgagtttcaacagcacagcatcaatgaaacctatgtgggtttttaaatgtgaaccaatgttttaattagggtgaaaatgagaagttgttacacgaaactacatggctgttctagtgtcacaatcaaacttttgactatatcagtgacatgtttattattcctctgcaagttgtagaaaggttaaaaacttcacttttcttggcatttccgtgttaatggaattcacactcaacaaaaaagcaacagacaagctgatatcagctgtaagaagaagtttttctatgtaaggtaagtctgaaagatgactatcaacattttcaagagtaaacattaaaaactttagattcaatggatgcagaacactgtatgccatatgtatcaagactatgtaaccaccgagtcttatcttatttattaagagaaagaaaaggaaatgaagatgactctcatggtaaggagcaaaaataagtaaaagaaatcaaaatagatagacaaggtgaagcaaaagcctaagaaaataagctcatgtcttcctattttgggcgtcaagctttcatttgccagcaccagccaatgttttaacagagacacttctcgaccagtacttaatagaagtatcacgagaccataaatgtaactacaactgaaaaactctttgtttaccttctttaggcaattatcaacagaacacaaggacagacagtgactaataaaccaagaactatatagaaaaccacaagtctcttttcctagtcactgtggaggttaaggaaacagttcttgtatcaaaaaagttgtgtttttttctttctaatcacagatgatcattccaatatgataacagtttgacaacaaaaggtactattttcaacaaacaaacaactgaaacaagtgttgatgctaaagttaacatggacaatagtaatcattcttcgtcatcagtgaatgtataacaagaatcatgaagggggcaatagaaatttcttgataaaaatgtcttaaagcctcgtggttttatgagacaacacgaatcatgaagggggtaatagaatgacctcaagtccttagtgagctttggagatctttctatggtctgttttaattcgcttcatctagattcagcttgatccaatccacgcccatatcggttatgacttgccttgatcaatgatcatagagtagctatgttctatgctacatgatcaagttcaatgccaaagaagttactaaaagaataaaaacaaaaagaaagaaattaccatggattcaacacaataagacaacaacagtgaaaagtctaatacacaagttagcatatttgctgaggaagattttgcacttgcaaggacagattattacgcaagaggcacatattctacaccaagtcaaatcaaggaaaagctaagaacccagtttaatagcattacgactataaactacgaaatttaaaattctcattttttagtttcttctctttcttttagtacaggaagattcccaatgccgttgaaaaacaaataccttgtgtctaattctaaagcatttcgtactaaaataattgttagaatttaatgaccaaaatcattaacacatgtaattgccgccaaattacaaatttttttattataaatcaccatgtttacaaaacacatatagttaagttaaccgttactttctttagcttatctctaagtcttggaaacaagaagaaaaaaaagagcatcaaaaggttcagttatgcttttttgtgtatttgggatttagggtgttctttgagctgataaggatcgactgaaggagctaaccagagacccaccagaatgatcaagtgtagacacaatagcaaacccgaggaggacggtgttgatggataaacattccaacagagctcaatgccgaggaacatgatcaagcttttacagccaaaagaaaaacaagaagacgagttaggttttgatattttaactgttgttacagtaagaaatgcagaaataacttaccgcagccaagtgggaaacggtgttctccatagtagataaggtagcgaatagaagtacctgttatgatcatatgagtattggggttgaggctaagaatgttcgagaaacgtaagatttagccaggttatttggttaccatgagtagaactggtagtgcagagagcgagcaaatacaatgccgatgaaattcccaacaaacatggccgtgacgacatctgcgaatcaagtggaatgcctgtaagtatggacatagggaaacataagctaaaataacagtaagagcttacgttctttcgtaataatccgtgaggctgatacatcactgaacgagagtgaagacggaagtgtcaagaagaaatgcctagaacgcatgaagcctataatcccgccttcatgcctataaaatcaacatattaattacaactaatgctaaacacacaaactgcaactgctttcaaattgcagctgccttatgattgtacgtacttgcaccacttataatttgcgaacgccacaaggagaaaaaggtgagcaatgagcaagcatactgcaaattctttggacacaaaaactcgttctggaacaaatttgaagttaacagacctgttgagagctcaaactagagttagaggtcaaaagacatttttagatcccatcaacatgttttttagatttggcgggagagaagcgaacaataccagaaatgaatgaaaacacgtccaagatcaaaggcgtttgctatgtatgaaaccggatatgttatcagaaacggcagtcccacgagtatctgtataaccattcattgaccagctgaatggtacttcttgcataatcaaaactataattcgctggataatgcaactcacctatttacattgaagaaactacagttaacaagtttccaaattgtcttggagaaacaatgctacgcatacaaattggtgaataagaaggcttataagagatatagtgaaacctgaacaagagctgcaccagccaaagcagacaccactccaatgatattcatggcctgtgaatagtaaaacttcacatatgaagaaaaacaatgctagaagaataataaagcaaatccataaactaattctcttccacgaacatatataccttaagtagcagaagtaacaaagttggagcatacaaaagtacattcatctttacagaaacagctccactgtataaaaagaagggtaagcagactagtcaatctaaagaatcgagaagcaaaagcagcaatctaacctgaaaacaagcatccctagatgccatttacgatagagaaagagagccattgatgcatgtaggagagtcatggcaaaacaatcattaaagagacggagaacaaagattgaatgtatcctcttggataaacatagtagacttaatgcccaccatggcacctgaaatacgtaaggatacaagaagagatatcatcactgaattcactaaaatcactcccatcataaacagacaaatcaaaaccaaaatattgttcattaacatcgtaaatggacaacgcttgacaacgtctacaaatacttgatgaaaagagataagaaataagtcttcatttataccacatcagtcttcacgtagatgatcaagacgatccccagattgacaatgtagagaacaccaaaaagaatctgcaaaatgtaagagagtagaattgagacaaatgaagcgatggatggatcaaattccgcagctaatccaaagataggagattcaaagagagggaattgcaagcacctgagcagggtagacttcccctccagttaagttctgcactgcagagtaaacatagaggaaacctgctggataaaccaatggccctgtatcgcctttcaagttcccatagtctctctctcccccgagaaacccactaacctgccccaattagataaatttcacttaaagactactagtttactttgaagaaaccacagttgaccattgacacttacctgtgacatgtaagcatcccaatcgatcttcgtgtctgttaaaggcaaatgacgaaatttggtttaaaacctatgcaaatgcacatttcgagggatacgcaagcaaaaaaaaaaaggaggtaaatagctctcacatggaacataggcgataataagtgcgactaggattgcatcagcaagaattagcgcgaatgcgaatggaactgcaggttttttgaatagatcggatcgattcgtctccttccccagccgacggctacgagaagctctcaaactcgccggtgatgaggcgcccgccatgaaaacagagcaaatcgcatcagcgtctagccaacgccgcgtaacagacaactacttccatattactactcttctaattagcccaaattaaatgagcctattgggcttcttgtcttagtcggtgtagagcccaattgttgttttattttttaataatgcaaaagtattaagcgataaataaataagcatcgcaatcgtcccaaaactgtgtgtatgcatcagacatgagcatatagagtaagcacgtgtccacactttttcacaaagttatctaaaaacaaaaaacaattaattagcattcgacgtgtacatatcactcgccacgtgtacaagagccttggcctttttgcttcttcttcttgtctattaatatcatctcctgattatactctcttttgaccaagctgcttcttctccatctatccaacatctcaaatctcagtaatcttgttccttcgattctgttttggacgtttgtaatggattctcaggacatcagataccgcggcggagacgacagagacgctgcaacgacggctatggccgagacagagaggaaaagcgctgacgacaacaaaggaaaacgcgatcaaaagagggcgatggcgaaacgtggtctcaagtctctgacggtagcggttgcggctcctgtgctcgtgacgctcttcgctacgtatttcctcggcacaagcgacggatacgggaatcgagctaagtcctcgtcgtggatcccacctctgtggctcctacacacaacgtgtctcgcttctagtggtctgatgggtttggctgcgtggcttgtatgggttgacggtggcttccacaagaagcccaatgctctgtatctttacttagctcagtttttgctctgtttggtttgggatccggttacgttccgcgtcgggtcgggagtagcggggcttgcggtgtggttgggtcaatcggctgcgttattcggatgctacaaggcctttaatgagataagtccggtcgctggtaatctggtaaagccgtgtttggcttgggctgcctttgtagccgctgttaatgtaaagcttgcagtcgcgtgagatctgtaaacgctatacgatgatgtttgtagagtctgagtcatatgagtgtttcttgttgtttttgttttttgtgatatataccataaaagatgtctttgcgatccaatggtctggtcattgtggagtaatagacatgaacatgatatacttgagaaataatgtgatattgtagaagttttaagcgttggtctgaaatcaaactgtgagattcttaaaaggcgatcgttttacttttatgtcgccgaaacggaacaaattcaaacggtaaagccaactatactttgatcagttttgggttgggccgttgacactgttttgtgggcttctcagtcagtggtaaacctaaaattaatataggaactcgaggattagggcccaatccattttaacacgtgatgatatcatgtaaggtttggagggaatatacaaaaagtggatgaatgatagcgaacgagaggtccttgtgcttttttgatttaccctcgagactcgtgccgacggagtggccgtggctttcgtgcaacagtctcgacccatacctcgacacgtgttgaaaacggtccattaagagtaagacatctgtcaataggacagctgtcctagaggtcactcgtctctcacaatccaatccctttcgcttaaattaaaactaaaatggagcatggcagcaacatgccacgtggctcaccagtttcaaatctgagccgtccggtgtgatataagtctttttaaagagagagagagcggttcgtttgtctgcaacggcaccaagtctttgacaatggctgaagatgaaatagtagtcgaagaagagcaatcacagccacaggagattactccagttccaccatcttcttcgtcttcgccttcgttagtggtggaagacgacgatgagatgaagctcaagcacttggaattcattcaagtcgcggcggtttacttcgccgcctgtttctcgaccctctacgagttggctaaagacaacgctggtccactcaaactcggcgtcgagaacattgaagattgcgttcgaaccgtgcttgctccattatacgaaaaattccacgacgttcctttcaagcttctccttttcgtcgatcgtaaggtaacaatcagaatgtaattcttaacttgaatatcgcttcggtttcatgagtgagaggcaaatgatttgcttggttttcaggtggacgatgtgttcttcgatgttgagacatatgttccgtcattggtgaagcaagcttctagccaagcgctcacggtggccacggaggtgcagcgcaccggcgttgtggacactaccaagagcattgcaagaagcgtccgggacaagtacgagccagcggcagagtattacgcagcgacgctgtggcgtttactgaatcaactgccgttgttccctgaagttgcgcatttagtgatccccacggcgttttactggtcagagaagtacaacgatgcggttcgttacgttggcgacagagactactttggggcagagtatctacccatgattcctattgagaagatctctgatattttggaacaagatcagtgtcgagctgattgactatttactcttctgaagccaaagattccttcttctatagagtatatatactgtatgtactctgtttttctttcctttctgcaatttgctatcccaagagatgtaatctttcttcaatatttcatttaaacaactttgccttttaataataacaagaacaagagacataaaggaaactgtcctcttcagtctcaacttttataaaagacacaagacccaaaaagtagtatctgtttactagtaaggagagtgtctgtttttcttgcggttccttggcggcttaacaaccaactcacttgaagtccaagaccggttaatctcggtagcatcctcatccgacttccagcaacatagtcgcccatcttcacccccagtccatccaaataaccctgcagctcctccatactcgcctggcatctgcagaacgctccttactacatctatgtgacctccaccaagaatagcttcagcggtaccgattgatccaggctgtttgtagttcaccggaaaataaccaacggttcctgcgcacgttccaccgatcacccataaatcttcacctcctggacaatgacaatcaacaaaataatcaacctgcaaaagagtaatgggaaagttcaactctgtaagtaaccattaggtttctggttagtgttaatgttttactagaagggaaagaatgagattgttacattatcttgagtccaactatctgatgcgagttcccgagctttctctaggttgacttcacagcttccgtcttcccaattccaaatactagaaaggagtaaagaaattaaaaacagcacaagtaacagactacagttggagaggagggcgtgaaagagtaccttagagtttctatatgagtgagacaccagagctttttatagccatctccgaggaaacctattttgccaattgaagttcccacgttgatgacctaaagagcgaccaaggcagaaatggttcagaactctcatctactatcttgatgcagcaagaaggctgataccttaaatctaaaacttacagattccagatgatcatcgtcattgatatcaccttcagtgttaaaaagacatatcaatccatccacggaagcggaaagaagcttgttgggcttgttaggaacaaagtgtacctataattaagaacagagttgacatctataaactaacaacaaactagttcctttcccgcttgagcagaaagaatgagagagcaacaaacctgagtgacgtcgtccatgtgggattcctctaaacaagcaacttgctttgagtttctccagtcccacaaaagaacctgcaccatcgcttcagattgtaacaagctgaaacatagaaaatgctcaaaactagccttttttctttctcaaagtgtactcctttttaaacatttagagaaacaaaaaaaaaaacacgattccacaggattgagatgcctaacctgctctttgcatccaccagccagaagattatctgcagcacctccataggagaagctgaaaatctcctgatcattcccagtatcaatacgcgaaacctgaaacacccatgatcaacttaaattcaatgagttccgaaaatggaatcacatttacgacagaatttatataaaaaaaaaaaaactcacctgttggaaacttcgagtgtcccaagatctaatggtaccatcggaggaacaagagtgcaaaacgtgaggagacgccgccgagtcggaggaaaacgcaatctgattgacggtatcggagtggcctttacattcgccgtagtactgaccagtcaccggcgagtaaagcttgacggtgttggttgataaggaaaccgcgattgctgtccaatcgattctgtcacaaaaccagagttgggttcactttcagtaaactaattagtatggttatcgaaaagagagaacagaaagcttttactttgggacaatctggaagacgtagtcagagccgaagttggtctgaatagagttcttgagcccaaatttcttcacgttttgagccggagaagaatccgaaagctgacgattttgaacctccacttccatctccgacgacacttcttccatttgccgtttcagcgaaattgataagggttttaacggtctagggtttgttcgttgatcaaaacgaaacgaggattagcacttacctctctaagtcatagagaaggttataactctataggtcaaaatttaggcctgttttaaccttttcggcccatttaacgcacggtccaatacgattattagcccaaggaaacaacaaccaactcgctcgctcaccgtgcgcttcttctaaacatgtccatagaaacataaacatactaaaatgtgaaaagattaaattaaaaaacggatagaaacatatagaaagccacgtgatggtagcaaacagatttagtggttacaaccagatatcatttgatattgagatttatgaaaatgtcctttttcaatggctccgatcggtcagtgatcggatctaatattataaaggtgtgttgacccataacataatattattactaatacaagtaacatgcggtaattaactctatgtcgatcttttttctctgcatatatatcttttagtcggttttttcgttcttgctaatcgttatattcctctacacatggcaatggaaaagaaacgagtaacaacaacaagtagcctgcaaataattaagtgcgataagacaactctgctctgattggaaactgatattccggcccgtcccccttttattacgtaggagtaataaaattgggaacgtcaacttatattaatcatgacgacgttttctcaagggagcaaattgtacgttacgtctcatattatcaccacttttttgcagcaacacagttttatttcacacaatacaacaacactttatattatatatgagagtgatagaattttatcattccatatttccatgatataaagggttccaataattggtccaatttttctaataagacttttcttattctcatagactcttcttattcatctttcttaatcaattcgaccaactcagtggaagacaaatctcacacgaccctttccactttttggtaactttattattaatttattagtatggtgtagttcctttctttcttctgctgatcttgtcaacaaaatactaaatttttcctaagcggctgtttatatattattaacaaaggtttccgcgtgtctcttgtttaactagtagactaaaaacaaatcgtaaactcgattttctcaaccaaatttagaagatactacggcatgtaattagctaatgataaaagattcgaattttcgttccaatggatttgtcttttcttttgcccaaaaccaagaatttgtcttctcttggcagtatttagctagacaacgcatatagctatatattttgtgtacactggtcaaggtcgtggatacgtcattaataatattatttccaataagtcctattaaaacattaaacaactttgagttttaaaacaaacttagtgtaaagaaaataaaaatagcagacagtttacgggtaagactagatgaccatatatgattgagtgcataaaacatcttttttctttctttttttgaaaaagcgaaactaaaagattattagttgttggaaatcagcttagcgtaatcttcgagaaaatgactctaatgctaaaatactgatttaatcaattttctaatggtttgacccaacagacttttttttttttctatcctctaataatatataatcatatagtagtaattatttagtagataatatgattaacacgtgaatagcaaagtttctatcatttttattcaaaaaaagattcataagtaataaaatgatagtcaacttttctttttctttttgtgtttggccttttgttgcagcgtcattgttgtacaccaccagtcacactattgtgggatgtgataatcggtaccttttaatgtcaggagcttctttcttacattttccacttcaaacaaaccgataattcagaggaattttctcttcctctctctctctcttttttatattttttcactgggaaaaatgtggttgctttcgtcttctccatggctctctgagctctcatgttcatattcggctgttgtagaacatacgtcttcagttccagtaccaatccaatggctcagatttgttttactctctccttgccctcaacgcgctctcttctccgccgttgattttatattcctcctctgcttcgctcttcacaagctcttttcttctccttcttcttcttccgaaatcaacggacacgctgagattaggaaacctcttattggtatccgtggaagaaccccaaccagaacaaccgcatggttcaaaacgacggtcgcagtcaccgttctattgtcgttttgctccgtcgtgctctgcgttttggccttcactggcaagcgacggactcagagaccatggaacctcatagacccgctcttttggcttattcacgccgttacacacctagtcatcgccgttctcgtcctccaccagaagagattcgctgctctaaatcatcccttatctctacgaatctactggatttccagtttcgtcctcacgtctctcttcgccgtcactgggattttccattttctctccgacgccgccacgagtctgagagcagaagacgtcgcttcattcttctccttccctttaaccgcctttcttctcatcgcctccgtcagaggaatcaccggcctcgtcacagcggagaccaacagtcctacgaaaccatccgacgccgtttcggtggagaaatccgataacgtctctctctacgcgtctgcttctgttttctcgaaaacgttctggttatggatgaatcctttactcagcaaaggctacaaatctccactgacgctcgaacaagtccccacgctttctccagagcacaaagcagagaggctcgcgcttctcttcgaatcgagttggcccaaaccgtcggagaattctagccaccctatccgtacgactctactccgatgtttctggaaggagatcctcttcaccgcgattctagccatcgtccgtctcggcgtcatgtacgttggtcccgttctcatccagagcttcgtcgatttcacctccggcaagagatcctccccgtggcaaggttattacctcgtcctcatcctccttgttgccaaattcgtcgaggtcttgacgacgcatcagttcaatttcgattcccagaagcttgggatgcttataaggtcaactctaatcactgcactctacaagaaaggtttaaagctcacaggctctgcgcgtcagaaccacggcgtaggacaaatcgtgaattacatggccgtagatgcacaacagctctctgacatgatgcttcagctccacgcaatctggctcatgcctttgcaagtcactgttgcactagtgcttctctacgggagcctaggcgcgtctgttataaccgcggttattgggctgactggagtgttcgtcttcatcctcctggggactcagagaaacaacggataccaattcagcttgatgggaaaccgagattctcggatgaaggccaccaacgagatgctcaattacatgcgagtcatcaagtttcaggcttgggagaatcattttaacaagaggatcctcaaattcagggacatggagtttggttggctatccaagtttctttactccattgctggcaatattattgtcctctggagcacgccagtgcttatctctgctctcaccttcgccaccgcccttgccttgggagtcaagcttgacgctgggactgtgttcaccaccacaaccattttcaagatcctgcaagaacccatcaggacgtttcctcagtctatgatttctctctcgcaggcaatgatctctcttgggagactggactcatacatgatgagcaaagagctgtcggaagatgctgtggagagagccctgggttgtgatggtaatactgccgtggaggtcagagatggaagctttagttgggatgatgaggacaacgaacctgctctcagtgatatcaacttcaaggttaagaaaggtgagctcactgcgatagttggaaccgttggttcagggaaatcttctctgttagcttcggttcttggtgaaatgcacagaatctcaggccaggtgcgaattttttttaatgtagtctaaagattcagagaactaacatttggaacatttgttgattcaaaacaagtttatttgtaggtgagagtttgtgggagcacaggttatgtagctcagacgtcgtggattgaaaacgggacggttcaagacaacatcttgtttggtcttccaatggttagagagaagtacaacaaagttctcaatgtctgttctcttgaaaaagacctacaaatgatggagtttggagataagactgagattggagaacgcggaatcaacctcagcggagggcagaagcaacgtatacagctcgcacgtgctgtctatcaggaatgcgatgtatacttgctcgacgatgtttttagcgcagtggatgctcataccggttcagatatattcaaggtagcaagggacagaaaaaaactcttgatgttagtattcccccctttaaaatgcaacagaagttgattcttgttattgtgatgtttttacagaaatgtgtaagaggagctctgaaaggcaagaccgtattactcgttacccatcaagtggatttcttgcacaacgtggattgcatcttggtatacaaatcattaatagatttatgttagtaaaataaaaaaactagaacttgttcttacgagatagaatattcaggtgatgcgggatggaaagattgttgaatcaggaaaatatgacgaattagtcagctccggattggattttggggaacttgtggctgcacatgagacgtcaatggagctggttgaagccggtgcagactctgcagcagtcgccacatccccaagaacaccaacgtctccccatgcaagctctccgagaacgtcaatggagtctcctcacttaagtgatctaaacgatgagcatatcaaatcatttctcggttctcacatcgtagaagatggctcgaagctcatcaaagaagaagaaagggaaaccggacaggttagcttaggagtttacaaacagtactgcactgaggcttatggctggtggggaattgtgcttgttctgttcttctctctgacgtggcagggatctctaatggccagcgattactggcttgcatacgaaacatcagccaaaaatgcaatatcatttgatgcttccgttttcattctcggatatgtaattattgcacttgtttccatcgttttggtgagcatccggtcatattacgtcacccacttgggactcaagacggctcagatctttttccgacagattcttaatagtatcttacacgctcccatgtcattctttgacaccacgccatcgggaagaattctcagtcgggtgagacaacttttctccttatcagttcgtttacatacaaattttagcagagatgttaaaaggaattttctctttcgaactttgcaggcatcgactgatcagaccaatgtcgatatccttattccgtttatgctcggacttgtggtctcaatgtacaccactctgctgagcattttcatagttacctgccagtacgcttggccaactgcattctttgtgattccccttggctggcttaacatctggtaccgggtaggcatctctttgatctcatgctctgatttttattttttttaaatgtatgatatgtatgatgttcctaacgtgactttgcttatgatcttcagaactattacctcgcttcttcccgtgaattaacacgcatggactcaatcactaaggctcccatcatccaccatttctctgaaagtatagctggagtgatgacaatccgatcattcaggaagcaggagttgtttagacaagagaatgtaaaacgtgtaaatgataatctcaggatggacttccacaacaatggctccaacgaatggctcgggtttcggctggagctggttgggagctgggtgctctgcatctcggctttgtttatggtattgttacccagcaacgttatcagaccaggtaaggatcactaaaccccctttcagtagttgatactaatgttcgttcccttgggacaataaatcatgcattttctttgggtctgatgcagagaatgtagggttgtccctgtcgtacggactgtccctgaactcggttctgttctttgccatatacatgagctgctttgtcgagaacaagatggtttcagttgaaaggatcaaacagttcactgatattccctcagaatccgagtgggagagaaaagaaacccttccaccttcgaattggcccttccatggcaatgtacatctcgaagacctcaaggtgagtcaaagaaaccaaaacagccttgtgttaaaactcacctttactgttcaaacttgtgaaggatgatgtgtgttgtaaacaacaggtgcgctacagaccgaacactccacttgtgctcaaggggatcactcttgacatcaaaggaggagagaaggttggtgtggttggacggacgggaagcgggaaatcgacattgatccaagtcttgttcaggcttgtagaaccatcaggagggaagataatcatagacgggattgatataagcactctagggctacatgatctcaggtcaagattcggaatcattccgcaagaacctgtcctctttgaaggaaccgtgagaagcaacatcgacccgacagagcaatactctgacgaagaaatctggaaggtgatgataaaacatgttttgcctcttgatcttctaaagctaaaaaccatttgttacatataacaacatctgtttttcgttttttctgtttatcagagcctggaacggtgtcaactcaaggatgttgtagctaccaagcctgagaagctcgattctttgggtgagtattgatctgtaacgatggagtttgatctatatatatatcgtagaaatctctgtatctatatatatgaagtattaatacttgattggaacagtggttgataatggggagaactggagcgtagggcagaggcagcttctatgcttaggcagggttatgttgaaacgcagcagacttctcttcctagacgaagcaactgcatccgttgattcccaaaccgacgccgtgattcagaagatcatcagagaagactttgcgtcgtgcaccatcatcagcatcgcccaccggattcctacagtgatggacggcgatcgagtccttgtcattgatgctggtaagacttaaaaaagaaacaaacttgtcatgttttcagttttacagaaatacagagttgatgaattatggaattttgaacagggaaagcgaaagagttcgatagcccggctcgcttgctggagaggccgtctctgtttgcggcgctggtgcaagagtacgctctccgatctgccggaatatgaatcttttacgccggcggggactgaaaatattttaaaaccttcttcaaatgagatttgtatcaaagaaaattcctataatctcacatgttttagattcaaaaacgacatcgtaattttagtgcagcaagcaacacagtaaatttttaattcgctcactatacttcaaacaactctctaataacaatccagtaatctaccaacacgtgaatttttctctattcgtttctatttgcaagatattttaaaatttatatgtttttaacatgaaaagcatcaattaattagttttttaaagttaactaataataaaagaatagtaaaaatacagcatatatttgaggcaagggaaataaaaaaattacatttcagttacactttttaaataacttcaaagaaaatgaaataaaaaataaataattataaacatcttatgaaaatagactaatagagtggagcagtgtattttattatattgaatattttgtatcaaatacattttttgatggatgcacatgatctatataacttcagaatttgcgtgaaacggtgatatgcgtgaaattggaatctttggtttcttcaaggtataagttagtcgtttttgagaattactatgtagcctatgattggtcgctcttcttcaaacctttttttgtagtacttactaagaaaacaattgctacattttataatattatagagaaaatttaacacagttaattgatgatcaacactagtgacacaactaattcaccgagattttcagcatgttttggttctcggttttttttataccagaaatcacttccaagaccttgcatatttggattaacacgacgtcactagacagtaatacactattgaactcctcactaaccagcttctcgctaacacacacgaaaacttgagatcaacaccatcgtgcggaatcatccactgcaaacaacatcaaaggagatgaaaaggaccaccagatacaaattcagcttcatgttgactcctctttggaggaatcatatatagccgcttttggttcattatgttcttttcatatgctatttttatatcttaattacagccctaattaacattcaattatgacctgtgtgtaaaagcctcattatgattaatatatatttatattctttaacaaaaagaatccgttgaaaacacattctctttctctatctcattagccaaaatatttggctccctctaaacagccagttaaatcttaaataacatgatttctttttatgcatcatagtcctgttttacaacgtcgatatataccacctctatgatttattataggccaacacattaacaacaatatttaaattaagatatatctctttttaaacttaagattctatctcaacttaacatttttttatttggtcaaacatatcaaccaatacataacatcttttgagaaggcgaaaatatttgcttgatatcaacagctgaaatggtattaacaaaaaaaaaaaaaaaagagtataatggtcaaattgaaatttggagtaaaaagtatacgttattagcgtgagtcagacatgtataactttctttatgtggaaggtccagggatcttgtgttagtaaataacatgtgagaactgatctggatttatggaccactcgctcttaactaatcaatttagcccatttttatttcttagtactatatactgtttagaaagtgaatcacgtcgaaaatagaattaatctatatcgacataaggtctaaatatcaattaggctttaaagaaaacaatatcgaagtagtaaattttatttttctatatgatgtgtacggaatagctagcattttagtgtggataaatgaatgcgaataatctatatgcaaatgccataatctaaaaatatatctaaatactgaaagtcgactaagtttcgctttttgtcgaaagaaatcaattgatttaactgaataagaattccacaaactacgaaattgcaaagttgatttcttatatatagagggttaagtagtctagatcagaggaaagggacatggtagtatatatcctcactgtcgaaattaatctacaaagttgatgatatattagttcatcttcatgattgacggttttaaaagttagatggtaaacagttaaaaaccggtttggttggttgtggcaggacttgtgttgttgtatgatgctcgatttaattttatttaattataccagtcgaaaattaattaaatctgaataaattgtttaaaaagcattaatgaagcaaccaaaagaaaatcccgaaaatggttcataatatacacatcgatcgatctccactccaatatatgtaaataaataaaaatatagaaaataacaaaatcagctggaagaattaacacagatttgttcagtacctcacaccacatacatgttatatcatcatatacataaaatttatttatatatgtagaacaatatatgagaagatagaaaaagatagctggtcctaaagaggaagatgatgacatggagattaatcaaggaaaatcaaaaagcgatggaagaattttaattatctggcgaggatttaggtcctcctttgccgtgatgattaggtttctcaccttcgagaactcggtaacgatgtaagtacttcttgagctgggcggcgtaatcatcaaaccctagattagccatagcccaacagatatcgtctccattaacggtctttcgcttctccttgtggcatttatcggatgcttctcccgtgacgaagctaatgaactcggacacacattcttgcatagtctctttggcttctttagagacctttgcgtttgctgggaggatgttcttcatgatccttcctacgtttgctatcggaagtagcctgtcttgttcttttaccatcatgctttcttcttgctgttgatcctccaccaccaccactaacccatcatgttcatgttgatgattagatgagctgctcccgaagttgtaattctggtatcgagggattggattttggaacgaatgataattccccgccatcagaatcttataattaaagcagaggatctataaatcttgtttggtgaggggttcgtttcagtatgattcacaacaacgaatgatgatatagaacgaagatatgtaatttgccaaactatatggcacacagaaaaaggagaggttttaacataaatgtgtttattatgtatacatctaaaaaaatattcgttttgacagagagatttgtgtagttaaattagctttatatataagtagaaaggcaagagagctaattaaggagtatctatctatgtttgtctggtcagagaatggtggtgacgtgtcatacaaaccaatgagagtggtctaggtcacaggggagacaatgtggcaggtctagctaatttctctctctctcaattttcttctaattattttctcctaaacccttttggttgagttaaaacaattaaaatgtaatcatagaataagatgtgttgcaaacaaaataatgttgaaatgtgttaagaatatataacacatatatcattcctttagtagtgaattatctcgcctttgggaatgaatatgatatgatatcctcaacgtacgtgaaggcgaaaatagtttggggttgatgacgtacttgatgttaccctaaaaaggaagttttggtcctcctgcttaagtcaataccgtctatctgtggattgactccacactccagttagtctggaaactctcctcaaccaaaaattattcaattattccacattcctccttaagagctagtcactttaataaacgataatatcgaactcgtggaccatataaaagcacgtcttgtggtctataattagtagtctgcttgccaaaattgaagaggctataaataatatttggttgaattatattttcaactacttattaataatgttgttttaaaaaaaaaatcgttttttaactaaaatattttatattttcgaactgaggaaatacataattttttgtttcaccacacttttgatatatatattttgtcaacacattaggtttttcttatccatctagaactcaatctcgatgatataacctactttaatcaaactaccatttaaattctatgaactttcaaatcaaaactagttggattaataatatatatatatatatatatatatatatttcctcttatatgtgattttatgtttttacttactttttaccagtatttaattattagacgaaatttagtttatatccgcaaaacagtgatttagttagttaactagctatttatattttaaactttaatttattttgattggctatacagcattatgtaaattctgcattatattgagacgaaaacatttacaagctttgtcgccttactatggatgagaataatatgagctgtttagcaaaacattcccatttattatttaaagaagtaatgtaaagatagatttataaattacatagaggattttacaagattttggagagcatggtgttctagaagtatgatatgttggctattattttatgttatttgttttcccgaaaaacctaagtcattagttaaatattacagctacatatacatatatgtaaaatcattaacaaagtgaggacaagtgtcgaccgatggtggatcggaccaccttgaaacggataaacaaatgttgaacgcctttagatattaattaattattgaacgatgcatgatgacgttcatagcatttctatattataaacagtaattattagtattacttgctcattaacttggttctctacctcctaatcaaaagatgaaattgactcgtcataaatggtttcaaacggtttaaggttgtaataatgaaactagctaggtcatatggttgcatatggaagtttatttttcgaatcctacaccaaaagtatgtttagtagaaaaactaatgatgcgccttacttagttacttagataagaattactactaatgaaaaactgtgtgtatataatatgtgtatttgctggaatttcagggagaaaacatataaagcattaattagttgttgaaaccatgagaacgtgaatatacaaatctatatagtacaaaatttaagatattaaatcctaaagttggtcgataaaataacacctttgtgaaatgtcctctcaagtatggcttgatagaaaaggaaacgactagtgattttttaaagttgttattaaggaatatattttcgattctccaatgtctaataaaataaatttaattaaattgaattaaatcgcaaacgcatatatttattcatatcgtcgaataaaaaagctggtatatatagtcatgcaattatagtaatctaattaactaagatcagcataagcaatatatatatatatatatatatatatatatatatatatatatatatatatatttgatggcatttttattgcccacttgtaaagatcgagtatagtgaatctattaagcgtgcgagtagctttgtgcgtggtccatgctgaattaaacattgtttcagtatgtttaatacaaattgttagtctgtctttaattagtcttgtcttttttcttttcttttctttttgttgttataagttttctctcgttattcgccaagaatccaaactatatatacacatttcaactggcgagattgtttatagttacttgtgaaaaatgttgacttgacccagacccgggaatgtatttggagtttgatcactgggctttcgcatatgggccagttgatcgccatggcctgtttccctcggtctccactacggttcattatccctaagtagcacaatatgcttggacaggaaaataaaaaagtaggagcattgtgatgctttttgtgaaacaattgggtcattatttgggctaagtgaagaagtattaattaattaattaaaaaaaaagtttgggctgtgttgtgtatatgacgcgaatgatgagaggcagcattgggtcattatttgacttcgagggtggtaattcgcttagcctcaattttgggcttgaaatgaaaataagcctttgaagttcaattattttattctaggtacccaaacaaacaaacaactatataaagaagattatttggcttgtacggagttgttagaccgtcgtctttatttttttactttttcttattttagacacttgtgttatttatatatatcatgacaccttaaataatagaagaaaaataaaagaaacagtaattatctaaaccagttttagagataaaagttcattcttgggtggtcaacgcaacatgcattggtttaaattgcgagtcaaaatttgacaaaaagtttttagagttagaatagttaaataaaattctcaagtattctaaaaattaacatgaaaaagaagataaaaattagtaagagaaagtataaataggaagtaattaaacacgtacggaggctaagtgaagaagaagtattaattaattaattaaaaaaaaagtttcagttgccacgaaagcgaaaacatagtaaaatgacggaaacagggtaaaggaagacgaagagacagttgtaaagacaaggttaattcagggattttccatttatcagagaggcccatctaatctatctatctcattctctctagtagagaagaacgcgtgttctcacgctcttattacatttttcatttcttttaaggaatttattaacccccaaaaaacaaaaaaaagcgtaagtaagatccatcgtattcatatgcagcaaaacacacacatttacatacatatatatatatatatgttgtgattctcatttttattttttatttttggggtcgctctttgttgagaaagtctgcgacagagagaggagaaagaatttggatgtgttgatgctaaagctgtgtgagttttacgagagcagaggtaaatctgaaagctctttcctttcgaccacgtcttcctcttcttcctcctcttcgtctccgtcttttaacgcgacttgtctttcttttttctttctttctttttatataatattgctttataagttgtaatttgttttgcgctatcggtctcggcgtttcttcttcttcttcttgttgttcgtatcgttacctcttccttcacacgcgaagttgacatctagattcaatacatagattggctctgctttttgattttattgctccacgttgaatgttccgacttcttctttcttcttcttctgtggaggtttgttgccaaagtcttcctatgtgactatgtcttgtcttgtatgcatactactactagcctcggctcttatgttcaacaattactcctttctttgttttcgtagccatacgaatcatgtatttttcatgaattggcgtgccttccctgggtttttgttgttttcttatgaattgggtcagtttctgtcttccctagcttttaaagctggtttcattatggtttctaataaagaaagaaaaacggcagctttaacttgggtttcggaatcgtttcattcaatgttggctctcttcttcttcgtgtcttgtgactttggaatttcatctgcattctctttcaatcttagggtttttctgtatttggggatgtcttttgactccttcaaccccaacttgtgtgtcgttagagaatgttgattttggatgtgtgtttggctcagaaacacttaacaagcttcccttttttccaatgctctagatttcttggtggtgacttactcagatggagcctattcattcagatgacatggaggaagcttttgtcgatgaatcctctatgctattgaattccccttatcttaatggtattcacggagaccctgatgtacttcctcgcgttggagatcagtaccaggctgatctacctgtgctactcactgagtctgatcgtctaaagctcattacttgctttcattcagagcctcccctgcagaaactccttacttttggcttgcctatccctcttatgtggacaagaagtgagaaattcagaggtttccgtgaagccgatattgataaagccagtccaccagtcgatgatcaatccttgcagaatgctgcttgcatgaaaccgaggagtattgtgcttgcattgccttgccaaaaaaacgccaagttcaagtttgactggctcgataagaccctctatccattccctgggactttgggtcaaccttgggaagatgctgagcaagagaggtttcttcttggcctctactgtcttggcaaaaaccttgtcttggtgcagagatttgttgggagcaagcacatgggagatatgctctcttactattacggcagcttttacaggtctactgaataccggagatgggtagatggacgcaagtccagaagcagacggtctgttcaaggccagaaattattatcaggctggaggcaacaagagttgctctctcggatctcgtctcatgtatccgaggaatgcaagattacgttgcttaaggtacataatatgcttctcgttagttagtggttgcggtgtattctgaatcaaaatgcagattcttgagatttccatgtgttgtttttgtaggtatctaaagcatttagggaagataagattgcactggaggattacgtcttcactttaaagaatactgtaggcattgatatgcttacacaagttattggtataggtaaagggaaaagagatctgaccaactgcgcgttagagccaaccaagttgaatcatggagcctctggtaactctcaagtacgaatacgcaatgatcttccgattgcggatatagtcaaattcctaacaggagaatataggatgagcaaaacacggtccagtgacctcttctgggaagctgtttggccacgtttgctggcaagagggtggcactctgagcagccgaaagatggtccaaagaattctctggtttttctcgttccggaagccaataagttttccaggaggaagatgtcaaaggggaatcactactttgactctctcactgatgtcttgaacaaagttgctttagatcccactcttcttgagcttgatgaggatctagagaggaaggggagcaaagaagaggttatcaagaatgaccctcccacaaatttagaggagtttgatgattcttcaccaaacagcaagaagaagaaaaagtacctacagccacgcagcaaaacaagaaaaattcaggaggtcatgttgtttacaattatcgataccagtgagacgaatagtatagaaggatgtacattgaaagagctcagatctctgcctgttgggaccggcagttcaatagctaactcctcaagttacttgagtgaatctgaagataacatgtcagaagaatctgaaaacaaggcagagacgacagctaaatcaatggcttcgagagtgtgtggtgggggcagcattagttctggtaagagcagctctgtaaacatggacaatgccacgagtccaagcaccatttctctcaatgagagacagcagaagaaccggaaaggcgggagaccaagaaatccaaaattgttacctgtctgcaccaaaaggagtagtttggcagattgtaccttgcgagaagcaggttgttttggtgaaacccagtccaggaagaagaaaccattgaagaaagggaaacatatgagaccaaacccattaaaagctgatctaaatgtagtattgacgagagaggagcgcatcaacgaagataaaactctgaaactgtcctcaaccagttcctttgcaagagatagctcttgtcgaagaaacatagaccgagaaatatcaccagaacgatctgaaagcagagaagattttgatttgaacgtttcacaaatctccctagaacgtgaagctgatggtactgatactgtcatggcagacgttgtacagaacagtgagagctcttgtgccgagcagtcctctgttcaagtggatgtggaaaagcagtgtaagcctcaggagttgcaagtaaccgcggatctccttcctgaacggaggcagagtacaaggacccgacccttgactacaaaggcactggaagcttttgcttttgggtaccttggtaactcgaataaggagagaaaggcttcagaggagtcgagaacaaagtctaataagaagagaaaggcttcagaggagtcaagaacaaagtctacaaagcgcatccatcgtcacttacctgtgtcctccaagttcagaaacggaactgtagaggatggttcaaacactgacgagactgaatagactagcttcgatctgaaattgacatttctgcaaatactgaccaagcgcaaaaattgggaggactttagcagctagagtcaatatagcaacatagttatagtaaatgttttgccttttgtttctgttaccctcatctcatcgtagcactgtcaaggttgaaaggagctatggaaagttgtgatgttattttgctttcatcgtatccaatgcagcagaatcagtgctcaacaattttacattcccaaaacttttctcagctttggaatcatcaagttgcaaattttcgagattaaattgctcatcagaaagaaacaacttcgatgagcagtgtaaagaaagccagaaatatcaacaaaatattgacaatcagtatgaacatagttagcgcactgtatttctttttttaaaaattatagttgttgcagccattgcagaggggtcttctcttgttatttccttcaaagttattcggagttaagactaagctgaatgctgacacgagccacatttggggctgccttcagaatctctttctctgcatgttcagcagctatcatgacgtccctacagagcagccaaatacttgtcagatggttacaagagagtggccaaaatggcctaaaggtacagacatgtaagagctttactgtatggacatggttgatggcatggcgactacgatttggagcaagatcttgctatgtaacaagtggggtgtaattcgtttgatcgtcaatttctgcacatatgcgaaagattccattgttcttgaaactaataaacaggaataactagaggttgggttaggtctggattatagaaagtgagtacctcagacaactgcgacgaaaaaatgtctgagacagtggcttcaacatgtttaatctcttggcagatgttactttccttcgttatactgtcatgatccttggtgctacaagaaaactgtaaaaaggctggatctgcaaggaaagtttgagatgatagctaagaccgagaagcagtgaataagttgattagacctccatgcagcatgctcaatacctatatgaataaaaacttcggacacttcaggatggttcaaattaatctgtctccgtacatattctcctacctcatgtgcgacactcacactggaaaaaggatctacctgtaaggaaaaggtgataatgatttattttattgagataattctttctactctgaggcagaaggaagcagcactcaccacaatgtgtacatcaagatacaacgatgaaccagctctcctaccccttagccgatgacatccctatggattaagattatcatgaaagtcttgatactcattcgcaaaattaataagaaaaaacatgaaagcatgctttctcattacagataactgattatagaaaagaacaccataatgttatatagcaattagcaaggtcgaatagtgaaatatactacaatctgtaccttcactccttcaacctgtaatatggtttgtcttattggctctaattgctgagctggtatagcagcatccacgagttccaagatactgaacaaagaaatgagatttcagcaatggacatggtgttggaaccaaaaagacatatttgtaaccattattccatgttcaagctattacaagtgttgtatggagaaaacaaatcgaaaaagcaacatatatagcgtgagtacctttggtgtcctgttttcagtccggcattgacaatcattgtcgagacaacaaggccagctagaggatctaaaaaattaactccgagaatagaacctcctgcacacaagtcatatttcacgatttatgagaacttcatgtctccctttatcagtagttccgtacaatagctggaccgatgagagagacttggtaaaagtaaataaatggaattcagagatctacattgtctccagttctttagtagtagccatatgcgtgaccaggtctgggatattgaaacaaaggatatagttgatttacatatgtactgattggaaagaaaagcttaccaactccaacaagtgcaactagagaagaaatagcatctgatcgatgatgccaagcatttgccatcatcaaaccactcccttgtttttcacctgctcgttttgtgatccaataaagcctgagaaacataagattcagggatgaaggatcaaaataagtgaagagaatagggatgaaggatcaaaagaaaaggggcggtaggttctgagaagcaagtctaactaaagtgaaaatttgcaattgtctagtaagaagcgacggtagagcaaaagctgtagacgtaaagcaatggggtatgataaacttgattggattgaaaagagtgataaataaagtgatgtttgtacccttctttgatagaaatggaagcaatagtaacagtcaaagcgagaatgggatgattcatatcaatgccgtgatgatgtccactatgaattacctcaggagctgcggacagtgcaatctgcaaatgagaaaggaagggagaagaactctgtaaattgaatttattatatcccaaataaaacaaacaatggaggatcgataaaagataaacatgaagtgcaatatattctcatacaatgaagcaaggttgtggaggtggagatgagtaattaaaaaagaaagagaaaggagagagtggtggtcatacagataaaaggtctaaagcatgccaggcaataccagagccagtagccaaaagcatggcagagatgccaagtgctccaagcgtttcaaatttaccatgacctgcccttgtatgcatggggaaattcagttcattgttattataatgtatttacatcaaaggaaagagaagagaaaaggtaaccataaggatgttctttgtccttgggaacatttgcagctctgtaagacactagagcaacaccacttagaacctgagatataatgatgatgatcatgtgagaaacaaaaccaaaggaaggatcatctctcgtcctcagcaaatgagaattttcattaccacatcggaaacggaatgagcagcatcggcgataatggcggtgctgccgcagagataaccggtgagagcttttgcgacagataaacctatatctgcggtgagacctagccggaatatcttctccccttcttctccaggcttttgatattgctggtgatgatcagggtgaccaaaatgccaccttctggagaaatcgaaactaggtttttgcgatgaagaagaagatactcggagtggtgatgatgatgatgatgatgatggcagataacggcaagacatataatatatagtagacctacaaatcctcgtcggattcaggatttgaaatctgataatacccattttgatttcagctgagaaaccctctctccctcttttctccgatcagtttcccaaattgacttctcattcattgcgcggtaagatagacggcgctcatttttttaccgtttacttagttaccttttcaccgacgattgtaaaattatactcagtcaatgatagcttcattaaaggccccccatactgttctttcatattgggccaaatcaaatgttgggagtataacaaaaaatattttttttaaaacggtaatggttaattaacaacactgattgatttggtctctcttataaaccagaaataaccgattctagaatcgaaaacccgaacactgagtgaggtagatattggccggaattagagttgtctaccggcggcatcagcgacaaatggaatgtatggagttttgccgagtaaggagctgacgactccatacacaaaacacataaagctgaagacgaaaacccccgtgtgcccccacatcatcgccttcattccaaacccgcctccttgacccggatccagtattcgggtcagcagcaccggaaccgccaggagcacatccagcgtcaccgcctgcatcgcgttgaacctcacgtacctactgaaactcgtgttcctcaccactcccaggtacagcccgaagaatgccacgaagctcgcgtacggcaccgatctgtacaggttcaggattgggaagattggctcgaacagcaatcccagccttgggtactgcgcgaacaggaaccgcccgtactgcagagaattgaagaacggcagcgcgtacgacgctatcgaaatcacgcgctcagtcgccggcgtcggggtgtaggaggcgcgggtcgtcaaggcggttgcgcgtctgctagaggggcggatcgagaaggttgaggatccggggaaggagaggctgagtggtctgcatctgggagccgacaggggattagttagggtttggtggagagaaaggcacagagacgccattcttttatttttttgtttgggattttcgctgtttagtcggcagtgtcgatttgttgacaagaagagcaaaaaaaagtaacagctcaaacgctgccgttttcgaatctaaaatttggcccgcgcacactaacaacataattgggccgacttagctatataaatgggcctatatatggtactagagggcttcgtgaacaacagaaggtttttgtggcgccgacaaatgggaagcggaaacgaagaaatgtgatggcattgattgaaggcgagtcgagtcgagtcagactcggtcagagcgagttgagagagcagttaagaaacagtagcaggtagaaatgacggatgtgtccccactttcggaccagaccactttactccccgagttagcaagtgaagtgagaaaactgtctgtgtgtcacatgttggccactcgcgcgctatccccgcccaaggaccttaccgtcattttggttggaaactagtaaaaattagtttatttattttttgtttgttgttttgtcaagtagtatatttcttggaaatatcttcccttttctgggatgcttttacttggcgacccaaggaccaagagagaaccaaaaataaatctcacaaaacaaattaatacaaactactactatatactattattatttaaaaaagaatatgagaaaaagaaattgaaagctaaaaaaagaaacagtagtgcagagggcagaccgtacggtattcctgaagagcgaaagaagagagagagagagagagagaccgaccaaagaagaagctcctctcaatcactgtcgaagcatctcttcttcttcttcttctttttttcttctctctcagagcttttctaatcggcttctccggtaaatctctgtcgatccaccgatgagcttttgacatttactctcttattagtttcttctagtttggtgagaggagtttttactagtatcttttttactgtacaccaaatccctaaatttaaggacatgtatgctcgcaatcctcccctcaatggctcacaatctgctcaagctcccgactggacccctgcagatgccgataccggactccaaggtctcgcatgcgctttgattctcagcaactgtacggtctctttagggtttccgctaaatggccctgactgtgctcaattttgtgatttgcagaatcgatgtggcgattagggttgggtagcgactcgtaccctgagagaccaggtgctcctgactgtgcctactacatgcgaactggtgtctgtggctacggtaatagatgtcgttacaatcaccctcgcgatcgtgcctcggtaatttcttcctctcattcattcttctttcttattattgttctgaaaccatccatactaggaggacacaatcaaatgcttctctctgttttttccgcaatgtgggtgatcactggccttatagagtctctctaaactggggaaattgttaagctttactggtttcagttgttgtgctttacgtcacgtttttttttgtcttatgcattgactctacccggtgtttccctgtatttactgatacctttgtatgctcttgtaaaagcttatcattttgtcatcttagcttggccacagtttactattttctcatgttgattcatgtataggttgaagcaactgttagagctaccgggcagtatcctgaacgttttggtgaacccccatgccaggtaacccaccccgaccagtcattttatatgttccaagtgatgaaacaaggttttttgtgatattattgatctctgctttcctggcagttttacttgaaaactggaacttgtaaatttggggcgtcatgcaaattccaccatccaaagaatgcaggtggatccatgagccacgttccactaaatatatatggataccctgtacgagaggtaagctttgtttccactcatgtcaaataaaaggctagtctcgagtttgcatgatcttttataaactctttgtagggtgataacgaatgctcctactatttgaaaacggggcaatgcaaatttggtataacctgtaaatttcatcatcctcagcctgctggtactactgtcccaccaccaccagcatctgcacctcagttttatccatcggtgcagtcacttatgcctgaccagtatggaggtccatcttctagcttgagagttgcaagaactcttcttcctggttcttatatgcaaggcgcctatggtccaatgctattaacccccggggtcgttcctattccaggctggagtccttactcggtgacctttttttttattgatgtatcatcaatacatttgttattcaccacagtctcttactgtctcacttttgcttttgcttcaggcacctgtgagccctgctctatctcctggtgcgcagcacgctgttggggcaacttctttatatggagttacacagctcacttccaccactccttcgcttcccggggtttatccatctctgtcctctcctacaggtgttatacagaaagaacaggcctttccagagagacctggtgaaccagagtgccaatactatttgaaaacaggagattgtaagtttggaacatcttgtaagtttcatcatcctcgagatcgggttccaccaagagcgaattgcgtcctcagccccattggtcttcctctacgcccggtatgctctgtgttaatatgtcataaaggttgttgatcatagttataacatttctgtctctaaatccgttgtttatcttgggttgaaaacagggtgtgcaacggtgcactttctacgtacaaaacggcttctgtaagtttggatcaacatgtaagtttgatcatccaatgggaacgatcagatacaatccttctgcgtcctctctagctgatgcaccggtggctccttacccagtgagctctctcttgggtgctctggcagctgccccttcttcttcatcgacagagctcatagcaggcggtgcaaaagatgcttacatgaccggtgtgcctacatcaagaagcacatcaaacatctcggcaggtttgattttctcccagagcggtgggtcaattccattctcagagctgcaactctcgagccagagctctcttcctctaacaggtagcagaatcacaagacaagggcgtgaaattcgtcgatccttttgaatagatcacctcagaaaagggtacgcatacgcaggtcctctggatcaccttttagcaattcttaatctatatgactattattatatagaagcatgtgatgtgaatttatatatataatcttcgtaccttgagaagaagaaaaagcctatttgagtagaagacctgagtgagaatcacatatatctgagaggaaatctatatgtgcatataccaaaaaagataacaagaaaaggcttcttctttttttttttggaatttgtgtataatgtttgtatagagacagacaaggtttctttgtcttgtccgtacttctacttcagacccattccggctgagacacaaaaacaaaaaaaaaaaaactgagacaaagaactcaattctcctcttcttttagtctgccaattggtgtacttctcgtgtgttaaggtttgttcttattgtagatgaatgatgtgtgttgttaattttgttatgttactgcttcacacattacatgtgttatggtgatgaaacaacctacatttcaagactagttttgaaggttggcaccattatcttgaatatatttatttccttaaaaaaaatggttttgaaatgaagttgagcggaagcacactaatcctagaatcgatcaatagcatcgggaaagtggtacaaaaaaagagacgagagaaatgatggcctagaaacaagttttaaaacaatatggagaaggaagtaatctttagagaaaaccctacctgagaaaagaaactatcatgctcaatttaatatgcttcgccatcatttgctcttatttgccttccccacttgtctctctctctctacactcttacttttctttttgtcaaaagcccaaggaagaagatgaaatcaactaaacttggacatccggctttggatttggattttgtagagtgggaaattgtagtttgttgtgaaatctaacaacaaaatatttaccaaaatatagatttgcttaagtgagatatgtagtattttaatgaattgcgtattaataggttaggagtagtaaactttttgtttttcttgttaactcgtttgagctacttccggaattgaaaagaaaaagaagagagacatagaggtatgattacaacccccaaaagtaatgcaaccattcacatttcctgcagtatagttttcttttaaaaaaaatataaataacctggtgtaaaataaacaaagagaagacacgataagagacctttttaacttttcaccgaaaagcataagtaataaacagcacacttaattgactttttacgcatatatgcatacatatattgcttttcaattacaaaaatagaaaagtacagaacatttagcaaactacctctgtatatatattgatatcctgtaagaaaaatctaaatattattaatatcacctttgaaacaaaccaaaaaaagaaagaaagaaagaaagacatttgtatcacctgacgtgtgtgtggactgtgggctgagatcatgtactcatacaagcattctcagactacctatagcaagcgagattagtgtcctaattcccggagaataaagttatatatatatattcacctaattttttattagtatatgatatgcacataaagaactgtttatttttatgaagaaagtcataattccactttaatcctgcatgaattcatgtgtgtttttaactctcactccatggcacaatctttcatatttgaaaagcagacagagagagagagcatttgcagccgacagtaaggaacatttttgggagaaacacaaaaacatatttgcagtaacacaaaaagaggtttacaactttatttggggagaagagatagataataataagatccaatgggtgttgttactgttcctgagtctaataagcaaagtgttgctgctaaaagagcgtttcgtccaagttccagtatcagacacactcctcaatggtactctttcactaactcatctcttctttcctcaaaatgttgctgatctctctgttgttccaggcctgtctcggacgttacgagtgacttaaccattgaagtcggctctgcgaccttttcccttcacaaggtaaccaaattcaataaactcagaagaaaaaagagaaactgctttacacaaactcgttctcttttgcagtttcctctcgtctctcggagtggaagaatccggaaacttgttctggaatcaaaagacacgaacctgaacctagccgctgttccaggcggctcagaatcgttcgagcttgctgcaaagttctgctacggcgttggcgtccaatataactcgtccaacattgcggcgctgcgatgcgtggctcattacctggagatgacagaagacttgtcagagaagaacctcgaggcgagaacagaggcctacctgaaagactccattttcaatgacatatcgaattcgatcactgttcttcactcctgcgagaggctactgcctgtagctgaagagatcaacctcgtcgggaggctggtcaacgcaatcgctgtaaacgcctgcaaagaacagctagcctctggtttgctcaagcttgatcagagtttcagctgcggcgtcccggagactgcgaaaccttgtgactggtggggtcgctctcttcccatcctcaagcttgatttcttccagagagttctctccgccatgaaatccaaaggtctcaatcacgacattatcagtgacatccttatgagctacgctcgcaaatcactgcagatcatcagagaaccgaatctcgtcaaatcagattccgatcttcagaggaaacagcgaatcgtccttgaagcggtcgtcgggctcctcccaacgcaagcgaacaaaagctcgattccgatctcgttcctctctagcttgttgaagaccgctataggatctggcacctccgtctcttgcagatccgatctggagagacggatcagccacctgctcgaccaggccatccttgaagacatccttattccggcgaacatcggcgccatgtacgacaccgactcggtgcagaggattttctcaatgttcttgaaccttgacgagtgcgagtacagagatgatgatgacgacgaggaggacgcggtggacgagagcgagatggccatgtacgatttcgagggggctgagtcaccgaaacagagctccatcttcaaggtgtcgaagctgatggatagttatctcgctgaggtggctctggactcgagccttcctccctccaagtttatagcactcgcagagcttctccctgaccatgctcgcgtcgtctgcgatggcctctaccgagccgttgatatcttcctcaaggtataaaagagtctgcttttgagaatgagtgttgtatgattttgattgctgtgttacggttttgtattaggttcacccccacatgaaagattcggaacgttaccgtctctgcaagacagtcagctgtaagaaactgtcgcaggacgcaagcagccacgcggcgcaaaacgagagacttccggttcagattgcggttcaagtcctgttctacgaacagacacggctcaagaacgccatgaccagcggcggtggcacaggcggttcgaaccaaagccagttcttcttgttcccaaaccgctcgggaagcgggatggcaagcggagccatctcgccgagggacaactatgcatcagtgagaagagagaacagagagctgagactagaggtggccaggatgaggatgaggctaacggacctggagaaagatcatgtatcgatgaagagagacttcgtgaagccgcagagcaggaggaggcgttatggaatgttgaggaagctctcgagaggtctgaacaagttgaacgcaatcgttttgagatttaggagcagccaaagtgttgccagtagcggtaaaaagcatacggaggagaaaacgaattcggaaagacgattcatgtttcagaagagaagatgtcactctgtttcttgacttgcttgcttcttcttcttctactcttttgtaatatttctttaacaaagaaaagacgagagtgaatttgagtgtgtaaatttgtaatttacagattctagagttgcataatacattcccaagtgtgtaaagcttgtcttgtatatactgttcgttgatgatgatatattgatatggatcaagaagacccttaacggaaaacattttgttctagttttgtttccagctcaatggggcaagaattaagtcttgatccctttgtcacttttctaggccttttctagtaggcctatatattatatctcattgcgctcaacggcccactacaaatcttccggagtatattagacgtgaaaaaaactgtgagattttttttactcacgggcctaatctttgctttataggtacagagaatttgcactatgtcaagtgtcaacgccttgtgatgacaggaaaaaaaaaaacagaatataatctacgacctacatagaagaactatggacgtcgagatttgaactaaaagaatctaattaacatgactggtccttgcgtttgccacgtcgttggatcccctcgacaaggtaatatatctaccttacctgtgagatattttgtaagggaatatatacattaatgacaaatatcttgaaaaaagagaggatgaaatcaagtcttggtttggaatttgggttggtgattccacaactcaattgctgtgaccacactagaaaagtattttggctccctctctaacaggttggccaaaacgtacctagatgtaatgaaaataactatataattactactttattaatctgtaacaaaaacaaaaagcctatgttttttttttattagatgacatttttaaacaccacaccagtcaacaccagatttttgcttttgacctttgtatattattatcattttaaattatacgtttgaataactaacttacaaaaaaaaaaacaataaatttcagctttttgtccataaatttattccaaagaaaaactactatatattgtgatgtataaacaaatgtcaagggtatgtgatgctgctgcctgtcgcagaccgaaagcgacacaacttaccttttttgataacataccaaactatataattgatcgcgttcattttccgaaaatatatgccgaatgcggcggggctataaataatagtttgatcgatcggcttgtttatcatccatactcaaggcctcgaattaacacttctttgtcacatcgtcgatggaacgagtaagagatttggcatcggagaaggcggctgtgatattcacgaagagctcgtgttgcatgtgtcatagcatcaagactctcttctacgaactcggggcgagtcctgccatccatgagcttgacaaggacccgcaaggccctgacatggaacgggccctcttccgggtattcgggtctaaccctgctgtccctgcggttttcgtaggaggaaggtacgtcggctcagctaaagacgtcatctccttccacgtggatggctccctcaagcagatgttaaaggcctctaacgccatatggttgtgactacatatcatcacgcttcttactatcatttattctacacacactagttcatattatgtcatctcgtgaataatacatacatatatttatctaagcttgcatgaatattgaattatacttttagtaaccatatatatagaagattatgcatgctccgatgctcgtggagattaattatcagttgatacggagaaactagactgtaatcaatcatcacgtaaagatttctgttaatatcggaatatcatctggatttagcataatatcttccgattatagaaaaaaatgtacgtagtataatacctaaccgatatacaaatgaatatcgaacgtaactatgctataactagtatatatatgatcgtttttgaatcaaacataaaagagaatctcgctcatgaaaagattactacacccacaaaacaatcgaaaagtaagccaagaatgacgcagcagagttaacatatgcgtgtgattcacgcgtgcgtccggcaagaaagacatttcgagagaagtgaatcaaacattagtgtaagtgtgaaagaagaatatataaaaaagaaagatggaataattttctttggcaagttggtgttggcggaatcaccatgtacgatgcatattgttgatacatatatatacatgtttatcaccgaaaggtccaatctttttcatttatcctcactttgcgcaatgactcaatcaaaggagatatgttgagagaatccgttagattataaattgacaagcctcttttctttttctaggggtattaatcatgctatatttcttgtcacattgatttgaatatcagcagtttaagaaaatcgcttagccaaaagttattaagaaatcgtctgatttctatcattgttgtaatcaatttgataagctagcttcaactttcatatctatgttagtgtttcaaaattactatcatatgcattccgttcatacttatttcatcaattagtccatgcatgcatgtgcttattatttagattaattatatttatgtcactggcaatgcgtatactattattaacccacaaaaaggtgaaactgattacaatttttcgaatcgtattcgtaaattactaatcaacatgttatgacgatcaaaacaactgcagcgttaccgtagaaataaaaataaattgaataacttagaagtgagagtaatgtttgcaacttgtgcagtcaaacagaatataaataagaagaaaaattctcaaataggcatctgatattttatctttcctttttgatattttcttagaaataaactacattttaaatggtcttttctttctaattagcaagaaaaaaacacactcgaaagactcactcccttcctataaataggcgagcaaatgtcaagctttttacatactcaaaacaaaacaaaacatacatcaaaacgctaaagtttaaacccctagccatcatcagatcttcagacttctgaggatcatggacaaagtgatgagaatgtcttcagagaaaggagtggtgatcttcacgaagagctcatgttgtctctgctacgccgttcaaatcctgttccgtgaccttagggttcaaccaaccatccacgagatcgacaacgacccggactgccgtgagatcgagaaggctcttctccggctcggctgttccacggcggttccagctgtctttgtcggaggcaagcttgttggctccaccaatgaagtcatgtcccttcaccttagtggctctcttgtcccattgatcaaaccctatcagtccatcctttactagcaaaattaaaccaactcaatatataatatctaattattagctagtgagaataaacacagttacagctagagtgtgagctagctagatattcagtgaggacttcgtctgaattaatgtttatcgtttgtatgttctattgtttagcttctctcgtgtttcagtttagttaatcaactggtgtatgttgatgtatgactctctgtttatgctaatgaaaatagtattgaaacttttacattttttcccacacaattagtaacgatctcttgtgtatgttgagtaatttagggctttccatataataaggcaagaaaccgtttatacttgtctgtttttaacatggtatcagaaggaggctacacacaaaccattttcttatttagaaatattcacatacactgacagtagctagaataaaaatgtgaatggccaacacatgcatgaactcgtcttctaattatcaagatgtaatgtataagttggcttcatcattattagttagacctattgatagttaacattatatcgggcgatatacagatttagcctttgtgatgttgtgtttagagcgtacttttgaatcaaggataaatcagtgcccattagagtatatataaatcgaatgtgaaaaatattagatcagaatagacttaattagtctccaccatacaaatttggtaagaagaaaaacaatgataagataccagtggcctaatgcaactaaagcagtttgaggaagaggatggaagatctttcgcggtccaagtatatcatggctacacaaaatcactgctctttttgcgttcctttattcttgagtatcttcacgtttaatttactattattttctaatgaaaaattgtacacctttttatatatatgaactctttgttttttcgttagttgctcgtgtagtaaattaaacatatatgctcataatcaataaaaacatacaatgttagaagaaaaaaatacaattttttttactaacgaatcatatgaatagttgttttatatacggtacattaacgatcctctcatcagctttatagataacgaagcatattattctccttagttccgctttttatcacttgagattaaactctactcacaggtttaagcacgtaaattagttactaaataatggatttgacatttacgctttgcatgcttatatatgttacccataattatttccctttagttacttaaagttaccaaaatcaactacttcaagattctccaatcaaaagaagcgtgtaaaagcctctatagttatatagtagtatatagaccttgaagatttctttttgaagaaaatatgattatactgagttcaaaaggtcgaaaagaaataataaaggtagaatccctttacatgatgtgtggaacaacttttcttgacctccaacttcttgggatcgtgggaaatatataggagaatctaatcggaagttgtacagaacgtgtaagaactaagaaccatattcactttgttgtcattgttataagattcaagattctttgaccggcgcgtgaaaaaagcatccacctataggctcaagattcgtgtccaagaaaatatcgagaaccgatgattacttggaaagtggaccattttttaaaaaatcaaaaattaaaaaaggaacgtagctcatgcgaatagtttagtccaccaaagtgaaatggtagaacatttggtttcagtttagttgtgtgtatttttattaaaggcttcagaatcaatttcgatttttgaaaaatgagtttttatagccatgttagtatgttacgaggatggaaaagcaacctagctagattatcttgtgatatgtgttattgttcaagagaagtaggggcagtagttgtcgagatcatgttattagtgtcgctggaatgttagatattgcccatcctgtctctttttccccatcgtgccctaaaagtcaaactatgcatggtattagctaatcttgaataggtttaattcagtacggaaactctaattgaaaactaccttcatggagtaatagttatcgaggaacgatgatgaggtattagtggagataagcagatttggactcaatatcaaaaattaatggtgggatccatttccgtttcacctaatatacatagtggcaaacaaaaaacaaatataagaagaaaagattcagtatcgagcattctagctatgtcggtaacgtgacaaagtcctttttttcgtttgtctgtttctttaaagttaatcaaatcggccaacgctgcctcaacaacgagcttcctttttctaacgtccctaatttgccacgtccattttctggactagtcccggtttaaaaaatcttcagagatgtattcgtggtcaacttcattaactctttctcttgagcccttcattagttatgatcttatttactttttaaaaatctaaccaagtactgtatattatatatgtggtagccaaaatattatgttaaattctaggctaatccgatatatcaagaaaaatcaatatataaaaatggagagctatttttcacgagttaagtgagagagatgagtaaagaaaggcacgggaaggtgaagagagtgtaggtttccagcttcttccccaagaaataaaatgtatttgactttgtctaagcaaatatgtcgtcactttaacgtcattcattacctagaatgcaattaagatatggcttttacataagccaccaaatttggttttgttgccccaaaatatcccaagaaaagatcaacttcttcttcttaccaaaactgtcggcgtcgtctcctctaagctcctcccatggaagcagaagaaggtcatcagcgtgaccgcctctgcgactattgcgactcctccgtggctcttgtctactgcaaagctgactccgccaagctctgcctcgcctgcgacaagcaagtccacgtcgccaaccaactcttcgccaaacacttcaggtcacttctctgcgactcctgcaacgaatctccctcttcccttttctgcgagactgaaaggtctgttctttgccagaactgcgactggcaacaccacaccgcctcttcctcccttcatagccgcagaccctttgaaggatttaccggctgtccctccgtgcctgagttgctggccatcgttggcctcgatgacctcactctcgattccggattgctttgggagtcacctgagatcgttagcctcaacgaccttattgtttcgggcgggtcgggtactcataacttccgggccacggatgttcctcctctgcctaaggtataacttgctctgttttttttctcgagccaattgctcggtttttatatttctctgaaatgttttgaaatgctccagaatcgtcacgccacctgcgggaaatacaaagatgagatgatccgacagctccgtggactatccagatctgagcctggttgtctgaaatttgaaaccccagatgctgagatcgatgccgggttccaattcctagcgccggatttgttttctacatgcgagctggtaatagagactgctattggttgtgttttcttgtgcttgtcaaatgattttccagcttataaatctctcttgtcaatatgaaggagagtggactgaaatggttcgatcagcaagatcatgaggactttccatattgctctctgctaaagaacttgtcggagtcagatgagaaacctgagaatgtagaccgagagtcatcggtgatggttcccgtttccggctgcttaaaccgatgtgaggaagagactgtgatggttccggttatcactagtacaaggtcgatgacacatgagatcaacagtcttgagaggaactctgctctctctcgctacaaagaaaagaagaagtctcgaaggtaaacaagctaatttaaaaagtgagacaccaccaataggattgggatttgaatcatgtgttgatgaaacaggtacgagaaacacatcaggtatgaatcacgcaaggttcgtgcagaaagcaggacaagaatcaggggacgtttcgccaaggcagcagatccatgaatgatgatgaggttactttgataatcaaaaatcttttgtattaatcgaatcatatagtgtgtatgatcagataagtttttgtattctaagcttaggagttatcactgtatatcgaccacactctcaaaattgtcacttaagaatagttttttttttgttttgcctccgattcctaatttgccaaagggcaagcatggacgagcacagaacaaaacatggttcacagttatatacaatctcaagacaagcaagcagcaaaagaacttgttgtaatgttagaaagtgagattggacccattaaagatccatggagcaagaagggcttgatgtaattgatattatgggctcaagttgtaacatagtaaacccaatataggttggcatgtttgggccattttcttttaaagcccaaatataaaagcgtctcttcccgatggccggcgaaacagaaattccgctgccgtcgcagctttcactcttgtttttttattcagatgaaattggatggccgatgaagacaaacatccaaaggcatgggctcgcggcaacaactatttgcaatctaccaatatataataatctgaggcagtataaaaatacaaaaaaaaatgacaacactttttggcagatcattcctgctacgatgaatctgtcccaatgataatctgagaagtaaagtaagttttggttgaacaaggaatctggagtgggttttacttgttgagcaatcagtaagcactaaatcatgtatcagagttgtggttatattctctatgttcttcttagaattcaaatatgaatctgacttggagttctttattttaatgatggttaattttactgttaatatttttggatttgaacatttggtgaagagtggttgcagcttgaagcaattttgcatctctcactcttcgtttactgtttgttgacgttgaagattaggccccaacaaacttgtatataagagcccttctctgtttattctcctgtcttaagagcgctaaatcccttggagacatcttcaccacactgttcagagatctgtcatgggccccggaggaccaggaggacccggaggaccagggttcttgccaccgggaggaccaggcttcttcccacccattggtggtttcttttctgggttctccgacatgatatgttcctggtaaagacattctctgttttgctatgtgttttgtaaagagttaagtggttagtctgactgtggaatcttgcagtctatcttgtctgtgctgctgctggctgctacgagattgctttggcggcccaccgccacaaggaccgccacttctgccaccctattattgaccacatctgactccattggtcactcgaataatattaaagctatctctgtataggatattgcagatgtttgtcaaattcaatcttaaatataataattcaaatgtctcaatttctgctctgtgtggatatatattacccaaaaaacgatcaaattaattatcagagaaatgaaatcatagtctggaactacaatcactagcaacacaatgcaacaacaacaacaacaaacacaatctactgtcttcgattcttgactcttctcttgtatggacttgccaagacttttgaaactatgtacacacacttctaagacgaggccaaaccagtcttctctttcaacatgatacaactaaataaacacggagtcacagggtttgatggaattaatcattcacatgctatcttggtgtcgaaactgctgaggcaaatggtgaaggcctggaaggcagagatagggtactgataatccattgtgaacacatcttttccgacttttccaaactggagaatcacgttttcgtgctcaggtcctgcaggtccattctcaggagcagctaccagctgaaagtttttgacggaagcaactgtgactctcccattgaagttgaggcaccagcactggagctgttcgtgccatctgggcgctttgtttttcaggacaagcagtccttccttctgagcagcagatgatggaccagaagggagactctctgcacgaattgatttcgacctgaagaaggagaatgaggggaaactatcaagattgctatggacaagttccgtctgagttggagctgttcctccaggttctacagctgatgcagggatggcatccatgacacactgcatcctcctcggtcctctggtatgatacgacaatgttcacaattagcaaaagccatattaagcaactaccgttttatctcacaatgtatctgtaagcaaggagataaatcacctggaacccaagacgttaagctcatatgagatatgtgctacaggatagttgccagatggaattctcgggctcacttgtttcaaactgagaagtctgcttgaacgggttctggtaacctgagttccaggattcgtcggctgagcgtcatagacagtgaacttggtccccagaaagttagatctgaaagaaagttaagataagagaaaggttatggcaaatatatgaaaaaaccatggggtcaatctgtagctaagtacctaagctttccgatataggtattgcttcctcgagagacatcatcgcagtttaaggagatgatgtagtcagtgcaagttggcctccgaaacctcttggcagcaagaaggaactttccatcatcatttgaagctgctgctggaccagaaaaagtaaacctttgagtgttattcagaaagagattaggtatgcaaagagaaaagaagaagcatctgttagtttcaccttggtttaacccgaggtatagatagtaggtttgattgctgcggtttctcataatatagcattgaacaagtgatcctctaggacccggctaaaaggaagtagggaaaaacgattagcctggataagcacacaagtcatttataaagtaaagagagaatgtgatgggatactcaacctgtttgagggagataggaaaagtgagtttgctagaaagctcaggaactctgacgatctctttgacgatttctcgccagttcctgcagacaccagcgcaagaaacaacatttttcctagacggccaagtgtcttcggattgctcaatcctcataagaacatctctcaggagctccggaggcatactagcccagcagctctgcttgaaagcatcaacaggaacagaagtatcctgaacaacacgttgagacctggatctaccatacccgaatctgacatcgaatccctttctggatatactcccaagctctcctctcatgtcctgaatgagactcttgaaggacatggctctgaattctaactaataacgaactagaagcagtctctatatatttcttggtaatgcacctaattcaaagttgcagactttttcaagaaccctaataaacccacattcggaacgaacgagatctcaacgaactaaaacacaagctcctccaaattattaaaaaaaaaaaacacgcttcttattacattcagatcaagagtactaacccaataggtacaagatccgattatagatagagatccggatacagagaataaatacctaagaaatcccaagcgaaattaaaaaggccgcatcgattcacaagttatacgagcttcacatcaataagaatccaggtggagcttgggaacagtacccaggtcccagattggggcatcgaaatcgacaaccaacactcgaaagcgaatgccttttacaacccacagaagaagaagcggtcagaggaaatagattttagggtttgacgggggagtgaatatgtatgtctgtctctgtgttatccaatcgcttccttccttgtctcatttttaattgttgtcagtcagtcattttattattttatcattattttcttcaaactaaatttggtaacaaagttttacatttcattctaattgaccgtattcttaccgatttatcttctgcctttttaattaagggatatatataaagaaagcttttcaattatagaaataaattaagctgccacatgataacgaaattaaagtgtgctttctatgtatttctctttctcgttgttatcttttgttttggtaatgtttctagaaatgttggaacttcaccgaaataaacatggtaactgactagattctaaaaaatcttgttcaaaattcatcatataaaatagacatctgaagataagaagacttacaaatagaatactttggtttaatggaaactttctttccgtttttcctctttttacgcaattgtatttgacaaaacaaaactaagcagagtaagctttttgttgccgtgatcacagcactttcgccgctttaatgggccaaaaggtgttttaacgttttactttatataattaagatgaaatcttccttctttggatataaataatgatttggacaactactgatttggtcaaaacgtaaacaaaaacaaacaaacaaaggaaaacgtcaaaaaaaaaaaaaggtgttatgagttataaaaaataacattattgggccgtaagaatcctttttttcgtctatatgggccgaattgaagtctaaatgggtctcgatcttaactatgcctacacagcataaagaagttaatcactacaacaaaatcatcatttggccttataatagatattcattctcaggcactctaagacactgtgaagtggatcttttgacgcttatgttcatcttactagattgcataggtgagctttttctctcaaatcatattatctttgccactgctatggtagagaccttggggacttatctttgccaaggaatgttccattgcatagctatttaaactttaaagtgagcagaattctcagtctttgagctacttacttacaaagcctctattgtgcaactcctttgacccggtacgaccttggaagacaaagaaggcctcactgcttgcaaggggcaatggcgaagaagaagatcagagacggtcaagcttgcagatgctcctgaaacacctcaccaacagtgaaggagattcgacaatgcctacatctacatgagaccgaggaggctgacttgagttgaaaacattccacattaaagaagagagctcttcatttttctgaacgattgaagaaatgcattctgcttaacatttgaaacctttacgacagacagcaaaatatatgtatttgtgcggtgaaggaaaaaaggataaaatggaaagaaatgaagaaaaggccaaaagaagaggataaaaagaagactaagacacaaagagagatagcgtctgtgaatggcaacaaaggcagttcttctcccgtggcttatcccatcgccgagacacgtatcgctgttcccagtggttcaattgccggcgttggagaccgccgggtggtgtgtaagaaagaggagggcagaagacgtagcagtctccgtcgccttcaatccttctggcaatttcgacatctctgccttcgagaatgaccaaggttcgtacttgctcaattgattcagaatgataaataaaaaaaggctgctactaattaattatgtgaaaggcgtagcagattcagataaagtggaacctccgatgcctccaacgaccggccggtacgaagtagtgatcgacaacgactcaattgggcggcttgacctatccccgtttcagagagccatcggcataacctcgcctgatgattttggtgtagctgaaccaaaacggtatttggatcgaaccatcggattcaccatcaattacaagagagaagaccccggggatccgcgggagctgtcagagtacccggacgtaagactatggttcgtgaggctcgacgcgatgtacccttggctgcctctgctgctggactggcgagctggagaacttgctcgatacgcagccatgttagtgccgcaccagatgagcttgagaatgggtgtcgttttcaatccggaggcgttggagcttttcgtaatgaacaaagtgtttgtggtttatccgtggctgaaacggcacggcgtcccaaagcccaggttgaagacgagcgacatggccaggatgctcggattcggtatcggcgatgagctcttcgacttgatcgatcacaatgaatgaaaaacgatgtgttctatcttcaaattacatacgtgggcctaattgtgggcttacaatgaaaaaggcctggggatggtaattaagaggatttttttgggtatttgatacacacgtggcgaatattcattggataagttgtattaatagccgtaaaatctgggaaaataaattcaaaatctcgaatatctgaagagaagagagagcccattcaaaatttgaaaaacaaatcaacaattggtttattcgtatctttctcatttctctctagtctatatcgctctcagaatacaattggaaaaaagaacaaggtatttaggaatctctcattcttgagtagctaagcattgaggtctcctttgcgtttatagattattttttttggttgaaattgtttggttctgttgggatatgttgttgtgttagggaagagaacacaaaaagaaatggttagagaagaggagaaatcgagatggtggtggttcgagagccacaagagctccaaacattctcaatggcttcaatcaacactcgctggttggttctttttctcactcagttcttctctatgttttgtggtttttgccaactttttggtgtgaaacgtttgtggtgcagagattgatgcaaagacaaaggcaatgttgaagttgttagacggaaacgcagactctttcgctcagcgtgctgagacttactacaagaaacgtcctgagcttatcagctttgtcgaagacttttatcgagctcaccgttccttagccgtgaacttcgaccacctcaagtcttccgaccactatggatctcgctccgctaaggttccccaacaatccatggagtccgtttgtgacagcaattctcactttgaagatgccgattctgagattgaagacccccttcaagatgatgcctccgcagctgattgcaaagaagatgagacttggcaattggaacaagaaaggttgaagctgatcgaagagactgatgctctgaggaaacagctcttagacaaggacgaagagaagagagaggtcatcagacagctttctctaacccttgagaccctcaaagacgagaacttgagcctcaagagacgccttgcccaccattctctcaagcaacgcaccgttttggagttcaagccactaaacaagttctttgggaagctgttttacattatgtgcgatggcaacaaggtcctttaggttggctcatctacctcatgagcttagcttcgatattttctgtggttcatttcactgtttatcaagatatatcctgtcctttccgtgctgtattataaccggtaattatcctacttaataatgcatgctgttctgatttgttcaatcacaagaacccagtttcagacaaggacatgtgatgagtgatacataattggatgatcaatcaattttgactttgaggcacaaaaaacacacactatcactgctaccaagtacaacaactgcgcactagcccaaactgcagagtgctttatgagcaaatctcacacgaacgaacactagaagaagctatattaatattacatgaaaaaaattcagaagaagcagagagtaagaaagaatacatttgtgaatatttggtttctgctgatgatattgtgtagagtgctgcttactcgctgtttctatatgattactagaagaaactgcagaaagctagtagcaacatgagtaggacaagaagcagagatgagagttgtgatgagaccaaacaaacagaggaagaagctggaagaggagatccaactggagaaacttcgagcagaggatcaggagtgacagcatctgggtttggtggactaaggcttgaggggattgtcggcatgatagacgattccgacggggaaggagacatttcgcttgaacctggagtagggaacaggggagaggtatctggagacatggccggggtagaagctgagaaactcgatggagcttcaggcaagaacgaaggtgcagctgatatggtggacagctgaaactcagatgttgaagtgtgtaaacagagtgagagaacggtgaaggcagtgaacagagagacggacatggttactgtgaatgtctctcctgcttctctgagaatgtttctgagagaccttaagaaactgaagaagaaaaaggtatacagctatagaggaggtaaaagacaagattggtgggtttggttgtggacctctggcttagggcagagcacatgaaatatggatttgtcgggttttgatttgtgtcggagtgtttgtatgttttgattttgtgaataaaaagttattaaaaaagcaaagtagagtcccgtgaagctcttccctcaaatatagaaatgagtgccagcttttaacttgctatgctttttcctgatctgcaacaatcttaggtttattgtcagttgatgaagacaatagaattggtaaaaaggaagcaccgattcactgatatatatatatatatatatatatatatatatatatatattacagtcacagaagacattgctgcatttcattttctcatagaaaatcagacactgaataatttgttgacttttgtcgagattctggcaatgcttttagcagtatacattcatctgaacacaatggccgagcattctcatggccaactttctattaaactcaatccatagaggtttgaataaagaagaaagaattcactaaactttgagtttgagcagcacaagaccttatgaatgaggatgaagctgaaagctttcccatatgttcggggaagctgtatgagctttcagtggtttccatctgcggacgccttttcgaatattttatgcccacaccagtccatcaaagccgatttccagatttgacacagggctgtctccaataccttggtcaagcgcttgggtgtcatctattggatcaacatatggctcgagcagatcagcggatctttccgagggaattccataatctttgaggatgcacaaggaagcagaatttgaagcttccctctccaacacagcaacatagttgtcttcgaactcaaaaactagatacttatctttgcacatatcaatgagatgtgccaagtgatggatgtttcttattggaattccattgaacttcaggacctgctggttattcatgtcctcatagccgatgtttacttcatttgccaatacctatagatatgctcgtcgagtgagttagttattaaattattgttgcactcaccaaaatgcacattgaattaagaactcattatcctccgagggattacctgtgataggatgacgatttgttctcctctgaaccttgccacagagtagcgtgcctttgttaacaatttcaactgcaaatcggaaggaaaaactaaactgttatagtggattcacaaattaaactaagagacagtttagtagagtgagcttacgcctatggtatcctcacactcctccctggttatacatttaaaaaaaggaggaaacagttaggcatttgggaaataatgaagaaggtttcggtttacttttgcatcttagcaagccgagaagaacatactctatcaggggttctgagagcggagtaaacaccaaaccagcaactataatgtatgatggctgacctccatcaatatggtacggtacctatttaaaagcaacaaagtattggtaattagcttacaaggcatgatgcgcaaaaggcttaaaatggtacatgcagagagttgtaccaggtgcactcgtggccttagaactacttgaactttcttatgttctcctgctctaatgataccaatctcagcgatatcacctgcaaatctactcagtgaaataaaagccaagtatgagaataggcagaggaagttaatacatctgtggactagaagaggtatttacttttgactgatgagataacggaatgcaatgcgttcactagatcggaagggtacagttccttcacatcccacatgtagatcatcaaaacttacaatcacatctccctgatttaacaatcagtactcgtcaggtataccagaaatcaaggacgtgaagattttgcattgtagaagtttggtagagcaacaatcctatgatccacactctttacctctttcaggactttacttgcatcagatgtaggttcaactcttcgcaccagaaccccctacaaattatatcacttgagtatactcaaactgctaacaaggaagactcaatatcctccaccgctatgttggtaaaatcttaatccgacaagagacagacgaactaacaaagcaaacctacctcatttgtaggaactttgaggcactcccgcagagctggattttctaatttctgcagcaatactccaaggcaagggtaacctgcaagagaaatatcttttaagtattaacaaaagaaaggctcaactagaagagaaagtcagaatggtcttgcattggaacatatgaacgtcaagagaaaactattaccagtgtactttccgttcctctcataatcagtcaaaaagtgagaaacaacggttgttggaatcacatatccaatattttcagtttcttcggatctgtaaacctagaggaagtctcttgtgagacatacgtttggaatgagaattagaaaaaggtattatattcctgaaaatcccaaagcaaatacctggaatgctactccaatacattccccctggtcgttgaatgcagggccaccactattccctacaatctaacaagtataagaagtggtatcacaataatactaatgaaggttctcagaagcaattttaaagaaaagtacgctacagaaaagaacaagtcatatgcaagttttagaataaagggcaagatacttggatcaaatgggaaatagtttataagaaaggatccactgacctggatttatagcagcgtcgatttgaattccaagcaagtcggatgatccatgagcgtaagatgttacctgcattcccaaacgagaaaaagttcttaaaatcaagacaacaatatcagcataaaagcaaagccaaagatatcgggaaacctctatacgtgatacaaccccttttgtaacagagattgtatctcctccaagaggatatcccacgacagtaactgaatcctgcatatcaaagccaacatggcaactctataaagaagagctatattcagatagataattagaaataaagaaacagagaagaacatcttaagccttttacttattaatgcaggaaagaaaaaagatctgtttttttgtttttggtattgttcatgcttcgcttagaccgtcaaatgtgttctttaaatatttgaagaggactgaacttgaaaaaaaaactgaaaagactaagaaatacatcattatctgatgagatgatggaacctgaaggcggggtaaatggcccagccgtagtggttcagctcctttccagaaatcctcgctttctacggaaagcaaagcaatgtcacagtccacacccctaactaaaacctgtgcaggataaatgagagggaagttatcttcaattgtatagcgacaggtacatgtttaattgaacttaagagagaaataaacaaattctattgtaggaactataatgagcatattgatgaatacatgcacatatttgctactaattgaaagcagaagtaataatcacaggtgaaaaacaaaccttagccacatactttcgatcatctccccttctcttaactttaacctgatgaagagatatgtgatcaaaagttaacaaaatgagaagagaaaaacagataataagaaaatgaagtccgagaaggaaagtaaacctgtgtatcgtgttcgacacaatgggcattggtcaagagcttgccatctccaatcataaaagcactgcagttgaagaagatgtgatggagtcatgaaacaacctaaaagcgagaaaaagtggaacatgtgattaaaaaaaaaaaagcttgccttccagtactagtaaattgcctttgcttctgccatgggagggagtaatcaggagcagtatgagtgcaataaacctggaaagaagcacgggtgggttcaaaagcaagcagagtgaattttaaggaagaaagcgaatttgatttcgaaaccttgacaacagcgttgagaaaggatgcatcgtgaatcttggcaggatcagtctgcacaaggaaatggcattagaccacaggaaatacaaatgcccgactaggagaaggaagcaaacctgttggtctcgactaaaatcagaaagagactcttttttctcctttttgggtgacccaaaagccttgaaagccattttttgaggaggattggaactttcatctcgaactctacctgggtaattcttctgcaacgaataattccaaccatgtaagaagaagaaaaaacgaagggggaattgattgaagagtttatgaggtggggaatgtacctctgggtttaatataggagatggtgaatcagacctcgacgatttcctcttaatattggaggaagctcggggagtcaacgacgatgcggacacgaaacaccacggtgaggagatggacgaagattgaattttaacggaggcattgaggacggagaagcagcagtttgctacggaggcggccatatcggccggcgagagagacacactaactacagagagaagtgagaagaaagagagaaaaagagaatcctttttttgattttcttatccactctcgcttctttggcgcctccatcttcacttgaccctgcttcttccccatattttcataattaccactgggtcctaatgggcccccttttaacattaatgggcctattttgtttttattctatggagctgcccatttcacaaccattggggccaccagatgaggtacaccaatatctctattactttcaaatatttttagacaaggttgaatatacattttagaaatctttttcacgtataaacaaattaggtatgataactgataagtaatcctttttgtatctgcacttatgatcgttctcgttccaaaaaccttaatgattacttatatctctctctctttgtgtttctttggataaatgattatatcccgttatttaattcttttaatcaaagcatgatttaatgtaaaattatactactgtatgactacttttcttaaaaatataacctaggcaacttgttcatgtgggtctactcgttaggtgcttcattttgaatgatcatgtttaattgcgtaacgagataagtaaactggttaattgcttgtgtgacaaaagatacatatcaaatttaattaatcattaactttgattaaagaagtaggcggcatccccaaagtcaacaaataaaatcaaaggtttctggtttaatccacgcgttgccccatccatattccctttatttctaaacgaaagcgaccgccatttccgtattttgtctccctagcaccaaaattacatgaccatttatttacttacgtggttctttttttctttgcagcagaattatataaatatgcaacactggttagtctaacgctatagatatggatgatattttagatatctatatatacatttttgcagccattttgtaaaataaatcctagagttagaatttatttacagtggctgccactgacatttaataattgtttttgataattaaaaagaaaatctttgaattaaatatttgacaatcttcccaaaatctctccacattaattacacgattagttactaaaataaaacttcccaaaatatttaatcttatttaattactacaaaattatcatttttgatattgtttttctacatgactataataattcgattataatcatcaaaccgcagagatatttgatagcatttaattattacaaaattaaaaaatatttagacaatgattcataaacatatcataaataaaatcagtgagttttttttacaggacggattgacgggacgagtttgacaggacgttacttaataacaatcgtaaactataaaataaaaatattttatagataaatataatttgcaaacttttatatatagtaactttaaaaaataaattgtcttcgcggtataccgcgggttaaaatctagtaagacctaatagagtaccaaggctagaacaattaatacgagtatcgcgtatgaaaaagaatatacatgtattctgataactatataaagtagtagatgaaatgattttgattcatgaatctctatgttgagtgagaaaatgaatagcctgagacaacacaagtgtaatagctttcacgcttggacttgtgtctgaattttggaactgatgatgtttgctgctctttctagaagacctgttgaaaaaagcataaatacgctctgttttcaaatttggcaattgatatttgtttttgtacgtgtctatttaatttttggtaaagaacgcacgttgtttatacttacacaccgcccttctagaagaacaggctctcacgtcatttgcatacaacttccatcttctggaaccaatggatccctgttacaaaagttgctcttaaaacataaacaaaaacaaaagaaaagaaaacatttttatatttgtcgtcaataataatggccactttctgcttacatgtatatgaatgtatatattactataatacgtagctgctcgtgtttcttgtctaagttctctgttatagttaggagacaaataaagagaattagagaacagaagaccagaaaaataaagatgaacacaaccaacaacgtgtttgatgtgtcaccgttcttgcttttagaagcatctgcagattccgaagctggccacgacagcgttgacgatgataaatgcgttaaggattacgatcttggtcatgagtcttctagtgccagttcttgcgagacgtcttgcgtgagtcagagaacgagtttgttaggttttgacctgcaggacgatacggtgaatcatgaagaaagagacgccggagatgaagaagacgaagacggagaaggagaagtgaatagctacataagatgtgggagaagccaacgtgaaaatctggctgtggattctgctgcggtggtgagtgagatggatcaaaatcgaatgttctgggaagcttgtctcgcatcttgatctgtctttattaattaatgtcatctcatcatcaacagagaaaacaaaatagtatatatctagcttagcgtagtgttcttgtctgtgtttcccctttggcttttaatgcacaactaatcgatatgatatctacccattaaccttaattagtcccctttagcgtagtgtaaatttgttttgattcgtcaagagaaaaaaagtggtctaagggactgactagttggagaagaatccgtataaaatctgttaaaaggagaaacaatatactatactagtcttttctcgtagaggaggatgttatactaacattactaatttatgctcacccagtttaaataaaataaaatcaatacttttttggtttgtactaattaacatatatatatatatatattcccaaaattaaagattccatggctaacagacctaaagaagaagaagaacaaacacaataagagattggtgtagttttacttttactatattcatctttgtctttattgaccaataaagtaatttctcccctttatctatttgatagtggtatactttaagttgctttttaattgctggtgtacaattatattggactcaccaacaagaatctgtgtgcagtcagtgtgcttgttactattgttttatctcattaattgatgatcactttttcaccttcatacatgagagctgaattcatcactttgttagttatataagttgggctattctattattaacagtttgatttttgacagtaaatttgtctgccagaataacttatacacattaccacccaaaaaaaaaaaaaagaagaaccatttttggacattacgtggttttgggtttgtctagcgaccttttatgggccaatgatatgaggcccagtaaggaaacaaagaacggcccattataatgtaaacatatttagtacaaggaaaaggggtaaaaaaggaacaaggggaaagaaatgagcgcgacgcagacgcagacgcatggaccgcactcgctggccttcagggtgatgcgactctgcaaaccgtctttccacgtcgatcctcccctccgcattgaccctttcgatcttctcgccggcgaggatttctccgacgatccctcttccgcctccttgttccgccgccacgtatcttctgccgacgctgtcgactccgatctcagctaccgaaatagattcctcctcaaccatcctaccgatccaatcggtctctctggtcttctgcttcttcctcagtccttcgggttctctctctctctctttcgtttctcctgcagatttttgtactatatatatatatatatatatatatatatatatatatatattgctgtctgattctgattgtttatttggttgcgcagagcgatctatctcggagaaacattctgtagctatatcagcgtcaacaatagttccacttcagaagttcgggatgttaccattaaggttcctcacctgcttccaacattttgttttccctgaaatctgaaatctatctactaatcgattgattatcactaagattcgtcacctgcgtacttcatatatatgtatatatctttcgttttttctttgggtcttgctcttatttcactcgttcacttcaatctctgctgtggaatacttctaagaagtttttgttgtctgcttcgtcttggaccttgaattgcaaacgtcagaaccaaaacgatgctaagctatgtatctcccatgtattattattgtaggcagaaattcagacagagaggcagaggattctacttctggatacatccaagtcacctgttgaatcgatacggacaggtggacgctatgatttcatagttgaacacgatgtgaaagagcttggagctcacacgtgggttttctctgactctcttccttcttcttgtccttttaaattgctccatggccatgaccctcattcttctcttaggttggtttgctctgcattgtacaatgacgctgatggtgagcgtaaatatcttccccagtttttcaagtttgtcgttgcaaacccactctcagtgaggaccaaggtgattatactagtcaattacgtatcagcatttttatttgtcatttgttttcagtcctctctttatgcttgtctaattgttgctatttctgatatgcaggttcgagttgtaaaggtaggttcgagaatctccacttcactctgtgagtgcttctttagaagctttagtttttttccttgtacctcttaatttggtgttttgcatggatcatagatgggaggtttttctaaatatcatgattggcagttataccgccatgtcattagaattggatctcttttcttgacttattattcgtcaatgatcccctggaaaattgattacttctgttctggtcctcactaagtaatcttataatcctcgtccacaatatcttgaacaagtggttttgtgacactaagcaggattcactgttccgcccttttctgctgtctgtgtagtttaacctgtatttatttgtttgtattggttgtaaaatcaaaatacaagctcatgtgctgttgatgtctgggacaccaggagacgacatttttagaggcttgcattgagaaccatacaaaagcaaacctctttatggaccaagttgattttgaacctgctaagcaatggagtgctgtaagattacagaatgaagactcaacagaagatcctccaaccaggtctgtcagattttcccagaatcgttatgtgcatcataagccactcattctatcaaatcgtcctaatttgctgttccactcactctctgtgtctcagtggtcttagtggactgatacctaaaccgccagttataatccgatctggcgggggtatccacaactatctctacaagttaaacccatctgcagatgtttccgggcaaacaaaattccagggaagtaatatcctgggtaaatttcaaataacatggcgcacaaatttgggtgaacctggtcgcttacaaacacaacaaattctcggcgctgtaagtttacgctttctactctgtgacaacatgacatgaatttgtgcctatttgttgattgtttgctgttaggattttgttctaagtctgaatgtatttggtttccttagggctttgagatattgcttcctggggaagccaatgcagggtatcagttagattaggtggcagttagaacaactaggaaaactcaggttgcaccaatatcttcatttagcagtcttatactcactaccttgcattatagacctgacaaaggtttacttaatttaaaattttctgtatctccttttatgcttcatatgagatgctcatctcatcgtctaacaaacttccctctaatttttttttttttttcagccagtaagccgtaaagagattaatatgcgagttgtagaggttccagctgttatacacttaaatagaccctttcgggtaagacaactgtttttttctctctaatgtttggatacccaaagatttaattgaacttacacgggcttcacactgagtgtaaactgttttccataggcatacttgaatctcacaaaccaaactgataggcaactgggacccttcgaggtctcactgtcacaagatgaaacacaattggagaagccggttggtattaatggtctccagactctggtaacatatctgaactttctgttttcctaaaccatgtagttagaactttgccgtacacggtgacagaattgtgaatcacgtcttggctatgcaatgtgtatggaccaaaactttgcaatggctagtcgaagctgattcatcactaaaccgtttttattatacaaggaactgacaccatcgaaactcttgcagatgttacccaggattgaagcatttggctccaatgatttccaattggtatgacaaactgaccacctcctaagagctctcatccttcttagaatgtaaaatctgatatatatctatttgcagaatcttattgcctccaagctgggagtccagaaaatcgctgggatcacggccttggacacaagagagaaaaaaacctacgaacttgttccagatatggaggtcagtgtactaaccttttttgtatatcttctgggttctaggtccctctctttagtgaaaacaggaaattggttcaccataatcgatattgttgttggcattatactgcagatatttgtagagacagactaagttataagacagcctccccgagtggtgttcttcctcgacaggttttgttattgcacctcctctgtgttgttaattgtttttgtttcttagtagaaaataatttggctcctttgtagaagaagaaaaaaactaaacggctttaacatatggactacgccgtttgtatcttgttgttacaaaccattaaacgttactgtttgatcaatatgttaattcagaactgtttggtttaaagcataagtattgaagtcgtcaaatgaacaacttgcaatcttttgctttgtatgagatacaaataaaatcgtggtccgtttataaaatagctttctccaaacaatttcaattcccttttaactaacacaacaaacgacccggcccgtcaaaagaagaccaacagacgatgaaataaaaggaaaaactcaattttctaaactatttttgggggtcgtaaataagtgaaaagcctgccgacgaaaaaagaagaagtgaaaaaagaagtgaaaagcccttgtcttatttgtcttttactatttttctgatttaaaataaagaaacaaacatttacagtatttgtttataacgggggctaagtagagaatcatgagaagattaaaatccctaaaagttttgggggaaagaagaaagaaggaagacgatgatgatgctcagaatccgaagcagagatggactggagagagtcacagcggagggagctcatatcactgtttcccagctcaaaaccttgatcgcggatcagcttcagatccctctccataagcagaccttatccaccaatcgtgatctcctcctcgccaaaactcccgctgatctactcgccttcaccgacctcacggacccaaacctccccctctcctctctcaacctcggccatggctctatgctctacctcgcctacgatggcgagcgctccattcctggagctcctcccgttactcctgccggatccttcgggaggaagatgaccgtcgatgacttgatcgcccgccagatgcgcgtcactcgtcaggagacgtctcactgcgactccgtctccttcgatcgcgatgccgccaacgctttccagcactacgtcaatgagtctctagcttttgccgtcaagcgcggcggctttatgtacggcaccgtcaccgaggaaggacaggtggaagttgatttcatttacgagccgccccagcaaggcacggaggctaatcttattctgatgagagatgctgatgaagagaagcgcgtggacgcaatcgccatgggcttggggatgaggagggtcggtttcatttttaaccagaccgtggtgcaggacaagactgaatacactctgtccaacgccgaggtgctacaggcggcggagcttcacgccgagagcgagctgaaggagtgggtcacggcggtggtgaagcttgaggtgaatgaggatggtggcgccgatgtccatttcgaggcgtttcaaatgagtgatatgtgcatcaggctgttcaaggaagagtggttcgagacggagattatgccggacgatgatccaaagctctctaagatgaagaaggaggtggttgttggtgtgaaggatcttaaggaggtagataacgatttcttcctcgttctcgtcaggatcttggatcaccaggttcgtgtttttctctctacccttcctttgcatcaatcatcattgttctttgtactaatgctctgcttgggcaaataaagtaattgaatctggagcttttaagtcttaggttaatgaagcttgtcagtgtttgctttccatgagataattgaaaattagcatttcgtcaatggtccctgtgttttaacattaggctgctgtgatcaggggcctctgtcatcaacattcccaatagagaaccggagcagtcgagcaacgatgcgggctctaaaaacacatctggaccgggcaaagagcttgccgttggtgaagaagatgtcagattttcatctgcttctctttgtggctcagtttctggacgtgtcatcggacgtccctgctttagccgagtgtgtgcgtctgcagtcgcctgtcccagagggctatgcgttgctcatcgaatcaatggccaacacttgttaatttttgtgtcattgttttttggttcttgatacagtatatcatgttcgttttatggtccagaaaatcttttttactagttgacaaatgaaaaatctctagtgtactcgtgatgtatttgattcaagtttgggggttaatttaagttatcaacaacttgtagaaacaaagttaattcacagagtaataaatcattctaataggtatgctcaggggcaaattggcaaaacataaaaataaaaagagagctactaaagttttcgagcgaaagcgaaaatgaaaattttataattcgagcgaaatgttaaaaagctgaaaattgggggaagaagagagaagagtttcatcgtcactggaatcaatagagtcaattggcgggagaggttagtctcgaaaagaagtggaagccctagggggaaactttctcgctcactcgctcgtctgcaaacaccatggaagacagtcctcaaggccttgtgagtctctctttgcttgtttgattttgtttgggaattttggattactcttaagtttttctgctgggcgtgtagaaaaggagtagagatccggatcaggatcaggatgacgacagcggcgaggctggcaaggccgacggaagcggcggagagaatcaggagcgcagcagcgaccagattgagctcgatgacgacgatttccaggaaacccgtcccaagcccaagcgtagtcgcacccatcctcctcaacagaatctcattggtacaattcatattcctaaatcgctccaagctttgtgccaattgattgtttcctaaattgattgattgtttttcttagagagcttcatcttgtttgtttgggtagatctttcagctttcatattttttttgctaacagaggttgtcaaaggcaacggggatcttatttctaaagccgtcaagatttgggttgaaagatatgaagactctcccagccttgctaccactgagctcttgtcaatgctctttcaggtactccttacttataagtctctctggataccaaggttgctagatccgggcatctcttgttgctgattcaaccacaccattcccttctcaatagcttttgtgtcttgtaggcttgcggtgctaaatactccatcaaggatgatctgcttgatgagactgatgtcgatgatgttgtcgtttcccttgttaatcttgctagagccgtaattcgttgctctcttttcattctttttcaattacattttgtttcttaagaaaattttcacaactttcttttcattgtggttggcctatagggggaactcgaagattatcagagttccagaaagaaggaactcaagaacttcaaagaaaatcttgtttccttctggaataatctcattatcgagtgccaaaacggaccattgtttgatagagtcttgttcgacaagtgcatggactacattatcgcactgtcatggtttgtgttcaaacttatgtggttttatgcctcatagaattttcttttcatgtttgtcttttctttttgcagtactccacccagagtttaccgtcaaactgccacgctaatgggcctccaactagtcacatctttcatttctgttgcaaacacactcggttcacagcgagaaaccacccaaagacaattgaatgctgaaagcaagaagagagctgacggccctcgtgtggactccctcaacaaaaggttgtctgttactcatgaacagataactacactggaggacatgatgcgcaaaattttcactgggtaagattggataacgattatactgtcagctaagtattactcccactaaaaaagaaaacaaagagtagaaaggaaatgggtagtttacttatgcgagtgttactgactgaaatcattattacaatcttattttgaaggttgtttgtacaccgatatcgagatattgataacgatattcggatgtcatgcattcagtctctgggcatttggattttgtcttatccttctcttttcttacaagatctgtatttaaaatatcttggatggacgcttaatgacaaagtaagctccttttctctctctcttctatactatcatatatatgttcgtaatagtcactgatcttgtctgcgtattgaaatatctgaagaatgctggagtgaggaaagcttctctattggcattgcaaaaactttatgaaatggatgaaaacgtccccactcttggtcttttcactcagagattttccaatcgaatgatcgagatggctgatgatgttgatatgtctgcagctgtatgtgctatagggcttgtaaagcaactgctaaggtattccccctcaagatcattttctcaaccaaagcgtcaccgcaaatatgttgaactgccatgagttaaaacctgagctcttttttgttttgcagacaccagctgatacctgatgatgacctaggccctttgtacgatttgcttattgatcaacctcaagaaatcagacgtgcgataggagagttagtgtatgaccacttgatcgcacagaagtttaacagttctccgtccagtcttacaggttttcctctgatagatagtccatgtcctgggtaccagagtttttactcttagaacttagttcagagttattacatcctctttcaggtcatgatgattcttcctctgagatccatatcttcagaatgttacaaatattacgggagttctccacagatccgattttatgtgtatatgtaattgatgatgtttgggagtacatgaaggccatgaaggtagagtctaagagaaattacttttcactgttgcacgttcattatatagctgtgacgtgtaccttctgcagtttttataccatcgtcatgatgctgcttttcttacaggactggaagtgtatcatctctatgcttttggatcagaatcctcgaactgggtctactactgacgaggactcgacaaacttgatcagacttctgtttgtgtcaatcagaaaggctgtcggggagaagataattccttcaacggataatcgaaagcagtatcacagtaaagctcagcgagtaagattgtctttgctctttttgagaaaatctcatgttgttactatgatataacgttgcagaagcatgaagacatacatcagttttttccttttttcttgagcgaaactaggaaggacaaaatacatttaaatgatcttataaggcactttactccatttatacctttttgtactctcgtttccctttcagttttgaatataatgactttgatgtttttttgctgtgcataacaggaaatatttgaaaacaacaggaaagacataactgtggccatgatgaagaattatccacagcttctacgtaaattcatggctgacaaagcaaaagtgtcatctttggtcgagattattatatttatgaaacttgagctctattctcttaaaagacaggagcaggtagctaaaatcattttgtttctcttaaaggatgccttttttcttgttatttacctttctcagtgaaagttacattttgtcccccgtgtcagagttttaaagctgccgtccgactcataaaggatgcttttttcaaacacggggagaaggaagcactaagatcttgcgtcaaggctataacattttgtgcgtcagaaagtaaaggggagcttcaagatttttcacgtgggaagcttaaagatcttgaagatgagcttttagataagatcacttctgcaattagagaagtcaaggtacactttacttcctttgccatctatcttcatactcatcttatggatgaaacgttacatctgttttctgtgcaggatggaaatgatgaatactccctcctagtaaatctgaaaaggttgtatgagcttcaattgtcaaagcctgtgcttgttgagagcatgttcgatgagattgctttgacgctccataatttcagaaatttggacgaagaggtgctaaaggaattagtttaaagcacttactatcttttttgtgtctctcacattttaatggaacagttgttcatggttgcttaggttatctgtttcctgcttctgaatatgcacatgtatttggcgtggtatctgcactccatcataaattgtgaagctatctctgaagcttccttatcttcccttatatcaaagcgtgataccctgtttgaggagctttcgtacttcctgaatggaattgaggaatcgaagaaatatggtaatcagctatcgaacagggtaaagactatttgacattccaatttaacttacacatttcattccgtatatgtgcttgttttatcaagcaatgagtcatgattatcctaaaaagtgaattctccaatgcttacagatctgtgctatactcgccgaaacatggtgtttgtttagaaagtcaaattatgactcgggtaaacttgaaagattaggatactgtcccgacagtgtctttcttgagaaattttggaaactctgtgcagaaatgtttaacacttcaggtgactctttgttttgcttttccacaaacccctgtcatttcttgattttccaaattacgtattatttatttctgccggactttgacacagatgagaccgatgaggaggatgaaaataaggaatacattgaagagacaaacagagatgtttcagtcattgctgcctgcaagttggttgctagtgatgtggttccaaaggtacttaccaagtgcattttacattgctgctattattatcttagtaatgttctgacacctatatagattgatgctcacatatcaatttgcttatatggattcttttctgttgcaggattatctaggaccagagatcatatcgcatcttggtatgcatggacctggtgtaacaggcatcataaagaatcttattacattcttaaggaaaaaagaagatgacatctctaatatctatctcgaatccttgaaacgggtaagcaagattttcagaagatgcaaagtttcgtagtccaagaaaattgctgacactatgtaattgggcaggcctatcaccggtattcaagtgaactttctagtggccgtgaagaatccagagtagataaatgtcttgaagagtggcgggagcttgcaggtgggctctcaggaatgtatatcggggctgcgcgcaacaaatacagattggagatattgagtgtggtgaaggaaggtgttgagtttgcttttagggacgccccaaagcaactgttgtttctggaagttgctatccttccatttgcaaccagactctcagtgtctgacatcattgacatgtaagactgatgactctctgagcaagtaggaagctctctgctaataaataactttatatatgctcttgtttgcttgctgaacagtaagaaggacgttcaggggcgtatagtgcatgttaatacagacgaagatcccagtggatggcgtccttgcttcaccttcttggaaaccttggaggagaaatgcttgaaaaacgaggatttacaaggtatgttatgtgcactcgcacaacatctgatttggtttaatcaaagccggtagatgagtatgatatgtctgcatgctttaagtcttgacttgtgatgatgcgtctgtcacagacgacaaggaagcagcaaatgtaagacgcaggggacggccaagaaaacgtccggaaacagagcgaaagagactgtttgatgagcaaagtggaagcgatgaggatgagtctattagtggcgggtcagacagagaagataagctcgacgaggacgctcctctaatcgagacaattagatcggctgccagacggaaagcgctcaagggtgaacggtccaagggacactgacgacgggtaaaacatttatcaatcgacataatttatgtgtttaaaagtttgtttctagttgatacagtcaaggaaaccaacaaaactgctctttgttatagaaatccatcatttcaagtttagacattaccatgaaatatctatcattagcagaacaaaattgaaggcatataatgaaaaaaagaaacaaacaaaacttgtgatattgattagatcaacttctacccgcaattctcatcaaaggagcaataacaccctgaatctctagaagagactgttgtatcctaatctcctgattaacctccctcttcaagttcctgagaagccctttaaactcgtttttacccttgatgtcttcagctctcgtctccaaaaccttcttcgtcaatcccatcaacaatcctgaatacctctgcacagtgcagtacctttgtaagaagcctagcagcattcccaactcgccttcctccatattcgacacgcacttcatcagcttcctcctcgccactaattcttccatcactgccacaacattggccggtttcttctcctccaacaccgagaccagagcttccttatgcctgaacttcttcaagagcttatcgtgtctcgtcagcttcaatcctttcttctccttgaccaagtaatcatctttggatggcttctcgctctgccctctctggaagtacctgaaatacgtaggcctcagtgcccttctcctactctcatccacatcgcttatcagactccagagattcaaacttttcttctgtcctccaacaacatctctcaccttcttcttaccggcaaacaccatgccattagaccctccgattacccgagtggaaccatcgggggaaaggccaagagacatgagaggagcaggaaacctcatagagtaagtcacctttgctctcccgtaatcgaagactttcatgtatccgtccaaagcaacgctcacaagtcgactctcagccgattccattctcgcaacgcggagagacgtgacggtcttgttgtgactctccatggagcaaaccatcttcccgcctccgatcaaatcccataccttgacgctgttgccaccagcggttgcgatcaatccaccggaaggcaggtatacgacgtcctccactgggagtccgtggttgatctcggcaatccaattggacgtgtggactctggcgtcccacaccttcaccgtgtgatcgtaagagcctgttaccaacattgaatcgttgacgggcgagcaatcaccgcagcggacataatccttgtggcctagcagatctgagatgactgttgctccggcgacatcccagtacttgacgactccatcgtcgcctccggagaccaagtggagcttgtcctgaactggatacttgacgaatcgagcgggggcgctgtgggagcggagagtacggagagccattcgttccttgatgtcgaagacctggaccacaccggagagatcgcatgccgcgaaaagagctccgtcggaacggaaacagacggaggagacaacatcgcggaaggagaaacggcgggaggaggaaagcgactgcgaggaaaagagggagacggtggcggagtgagcgacggccaaggagtgagggtggaccggagagaaagccaaagcggctacggaggagacgagattaggtgtggaatgatttttgaaggaggaccagtacctcgattccggagtctccgattcggaaacaggtttcgccgttgatttgggcttcacagggaaaacctttgacacttgatggtcattcagccgaacacgaagctcttcctccattattctagagtacaagcagagagctagcttgaagaagaacgcagctaacagagagagagaaggaggctggtttagggtttaagcagagaatggcgaagaagacatttgataagtaagtatccaaatgaagtttttgggcctcgtttattatgttattgggcctaccaatttgttggcatctgaagcccttacttaaccttcgtatttaacttggacaaactaaacgaatttatctcttctctcctttcctttcttcttctgatttttttagtttctcaatccttatttctctgaaaagaaaaaccgaattc

SEQ ID NO: 390 - DNA, 81565 bp, Arabidopsis thaliana
aagctttgtttccactcatgtcaaataaaaggctagtctcgagtttgcatgatcttttataaactctttgtagggtgataacgaatgctcctactatttgaaaacggggcaatgcaaatttggtataacctgtaaatttcatcatcctcagcctgctggtactactgtcccaccaccaccagcatctgcacctcagttttatccatcggtgcagtcacttatgcctgaccagtatggaggtccatcttctagcttgagagttgcaagaactcttcttcctggttcttatatgcaaggcgcctatggtccaatgctattaacccccggggtcgttcctattccaggctggagtccttactcggtgacctttttttttattgatgtatcatcaatacatttgttattcaccacagtctcttactgtctcacttttgcttttgcttcaggcacctgtgagccctgctctatctcctggtgcgcagcacgctgttggggcaacttctttatatggagttacacagctcacttccaccactccttcgcttcccggggtttatccatctctgtcctctcctacaggtgttatacagaaagaacaggcctttccagagagacctggtgaaccagagtgccaatactatttgaaaacaggagattgtaagtttggaacatcttgtaagtttcatcatcctcgagatcgggttccaccaagagcgaattgcgtcctcagccccattggtcttcctctacgcccggtatgctctgtgttaatatgtcataaaggttgttgatcatagttataacatttctgtctctaaatccgttgtttatcttgggttgaaaacagggtgtgcaacggtgcactttctacgtacaaaacggcttctgtaagtttggatcaacatgtaagtttgatcatccaatgggaacgatcagatacaatccttctgcgtcctctctagctgatgcaccggtggctccttacccagtgagctctctcttgggtgctctggcagctgccccttcttcttcatcgacagagctcatagcaggcggtgcaaaagatgcttacatgaccggtgtgcctacatcaagaagcacatcaaacatctcggcaggtttgattttctcccagagcggtgggtcaattccattctcagagctgcaactctcgagccagagctctcttcctctaacaggtagcagaatcacaagacaagggcgtgaaattcgtcgatccttttgaatagatcacctcagaaaagggtacgcatacgcaggtcctctggatcaccttttagcaattcttaatctatatgactattattatatagaagcatgtgatgtgaatttatatatataatcttcgtaccttgagaagaagaaaaagcctatttgagtagaagacctgagtgagaatcacatatatctgagaggaaatctatatgtgcatataccaaaaaagataacaagaaaaggcttcttctttttttttttggaatttgtgtataatgtttgtatagagacagacaaggtttctttgtcttgtccgtacttctacttcagacccattccggctgagacacaaaaacaaaaaaaaaaaaactgagacaaagaactcaattctcctcttcttttagtctgccaattggtgtacttctcgtgtgttaaggtttgttcttattgtagatgaatgatgtgtgttgttaattttgttatgttactgcttcacacattacatgtgttatggtgatgaaacaacctacatttcaagactagttttgaaggttggcaccattatcttgaatatatttatttccttaaaaaaaatggttttgaaatgaagttgagcggaagcacactaatcctagaatcgatcaatagcatcgggaaagtggtacaaaaaaagagacgagagaaatgatggcctagaaacaagttttaaaacaatatggagaaggaagtaatctttagagaaaaccctacctgagaaaagaaactatcatgctcaatttaatatgcttcgccatcatttgctcttatttgccttccccacttgtctctctctctctacactcttacttttctttttgtcaaaagcccaaggaagaagatgaaatcaactaaacttggacatccggctttggatttggattttgtagagtgggaaattgtagtttgttgtgaaatctaacaacaaaatatttaccaaaatatagatttgcttaagtgagatatgtagtattttaatgaattgcgtattaataggttaggagtagtaaactttttgtttttcttgttaactcgtttgagctacttccggaattgaaaagaaaaagaagagagacatagaggtatgattacaacccccaaaagtaatgcaaccattcacatttcctgcagtatagttttcttttaaaaaaaatataaataacctggtgtaaaataaacaaagagaagacacgataagagacctttttaacttttcaccgaaaagcataagtaataaacagcacacttaattgactttttacgcatatatgcatacatatattgcttttcaattacaaaaatagaaaagtacagaacatttagcaaactacctctgtatatatattgatatcctgtaagaaaaatctaaatattattaatatcacctttgaaacaaaccaaaaaaagaaagaaagaaagaaagacatttgtatcacctgacgtgtgtgtggactgtgggctgagatcatgtactcatacaagcattctcagactacctatagcaagcgagattagtgtcctaattcccggagaataaagttatatatatatattcacctaattttttattagtatatgatatgcacataaagaactgtttatttttatgaagaaagtcataattccactttaatcctgcatgaattcatgtgtgtttttaactctcactccatggcacaatctttcatatttgaaaagcagacagagagagagagcatttgcagccgacagtaaggaacatttttgggagaaacacaaaaacatatttgcagtaacacaaaaagaggtttacaactttatttggggagaagagatagataataataagatccaatgggtgttgttactgttcctgagtctaataagcaaagtgttgctgctaaaagagcgtttcgtccaagttccagtatcagacacactcctcaatggtactctttcactaactcatctcttctttcctcaaaatgttgctgatctctctgttgttccaggcctgtctcggacgttacgagtgacttaaccattgaagtcggctctgcgaccttttcccttcacaaggtaaccaaattcaataaactcagaagaaaaaagagaaactgctttacacaaactcgttctcttttgcagtttcctctcgtctctcggagtggaagaatccggaaacttgttctggaatcaaaagacacgaacctgaacctagccgctgttccaggcggctcagaatcgttcgagcttgctgcaaagttctgctacggcgttggcgtccaatataactcgtccaacattgcggcgctgcgatgcgtggctcattacctggagatgacagaagacttgtcagagaagaacctcgaggcgagaacagaggcctacctgaaagactccattttcaatgacatatcgaattcgatcactgttcttcactcctgcgagaggctactgcctgtagctgaagagatcaacctcgtcgggaggctggtcaacgcaatcgctgtaaacgcctgcaaagaacagctagcctctggtttgctcaagcttgatcagagtttcagctgcggcgtcccggagactgcgaaaccttgtgactggtggggtcgctctcttcccatcctcaagcttgatttcttccagagagttctctccgccatgaaatccaaaggtctcaatcacgacattatcagtgacatccttatgagctacgctcgcaaatcactgcagatcatcagagaaccgaatctcgtcaaatcagattccgatcttcagaggaaacagcgaatcgtccttgaagcggtcgtcgggctcctcccaacgcaagcgaacaaaagctcgattccgatctcgttcctctctagcttgttgaagaccgctataggatctggcacctccgtctcttgcagatccgatctggagagacggatcagccacctgctcgaccaggccatccttgaagacatccttattccggcgaacatcggcgccatgtacgacaccgactcggtgcagaggattttctcaatgttcttgaaccttgacgagtgcgagtacagagatgatgatgacgacgaggaggacgcggtggacgagagcgagatggccatgtacgatttcgagggggctgagtcaccgaaacagagctccatcttcaaggtgtcgaagctgatggatagttatctcgctgaggtggctctggactcgagccttcctccctccaagtttatagcactcgcagagcttctccctgaccatgctcgcgtcgtctgcgatggcctctaccgagccgttgatatcttcctcaaggtataaaagagtctgcttttgagaatgagtgttgtatgattttgattgctgtgttacggttttgtattaggttcacccccacatgaaagattcggaacgttaccgtctctgcaagacagtcagctgtaagaaactgtcgcaggacgcaagcagccacgcggcgcaaaacgagagacttccggttcagattgcggttcaagtcctgttctacgaacagacacggctcaagaacgccatgaccagcggcggtggcacaggcggttcgaaccaaagccagttcttcttgttcccaaaccgctcgggaagcgggatggcaagcggagccatctcgccgagggacaactatgcatcagtgagaagagagaacagagagctgagactagaggtggccaggatgaggatgaggctaacggacctggagaaagatcatgtatcgatgaagagagacttcgtgaagccgcagagcaggaggaggcgttatggaatgttgaggaagctctcgagaggtctgaacaagttgaacgcaatcgttttgagatttaggagcagccaaagtgttgccagtagcggtaaaaagcatacggaggagaaaacgaattcggaaagacgattcatgtttcagaagagaagatgtcactctgtttcttgacttgcttgcttcttcttcttctactcttttgtaatatttctttaacaaagaaaagacgagagtgaatttgagtgtgtaaatttgtaatttacagattctagagttgcataatacattcccaagtgtgtaaagcttgtcttgtatatactgttcgttgatgatgatatattgatatggatcaagaagacccttaacggaaaacattttgttctagttttgtttccagctcaatggggcaagaattaagtcttgatccctttgtcacttttctaggccttttctagtaggcctatatattatatctcattgcgctcaacggcccactacaaatcttccggagtatattagacgtgaaaaaaactgtgagattttttttactcacgggcctaatctttgctttataggtacagagaatttgcactatgtcaagtgtcaacgccttgtgatgacaggaaaaaaaaaaacagaatataatctacgacctacatagaagaactatggacgtcgagatttgaactaaaagaatctaattaacatgactggtccttgcgtttgccacgtcgttggatcccctcgacaaggtaatatatctaccttacctgtgagatattttgtaagggaatatatacattaatgacaaatatcttgaaaaaagagaggatgaaatcaagtcttggtttggaatttgggttggtgattccacaactcaattgctgtgaccacactagaaaagtattttggctccctctctaacaggttggccaaaacgtacctagatgtaatgaaaataactatataattactactttattaatctgtaacaaaaacaaaaagcctatgttttttttttattagatgacatttttaaacaccacaccagtcaacaccagatttttgcttttgacctttgtatattattatcattttaaattatacgtttgaataactaacttacaaaaaaaaaaacaataaatttcagctttttgtccataaatttattccaaagaaaaactactatatattgtgatgtataaacaaatgtcaagggtatgtgatgctgctgcctgtcgcagaccgaaagcgacacaacttaccttttttgataacataccaaactatataattgatcgcgttcattttccgaaaatatatgccgaatgcggcggggctataaataatagtttgatcgatcggcttgtttatcatccatactcaaggcctcgaattaacacttctttgtcacatcgtcgatggaacgagtaagagatttggcatcggagaaggcggctgtgatattcacgaagagctcgtgttgcatgtgtcatagcatcaagactctcttctacgaactcggggcgagtcctgccatccatgagcttgacaaggacccgcaaggccctgacatggaacgggccctcttccgggtattcgggtctaaccctgctgtccctgcggttttcgtaggaggaaggtacgtcggctcagctaaagacgtcatctccttccacgtggatggctccctcaagcagatgttaaaggcctctaacgccatatggttgtgactacatatcatcacgcttcttactatcatttattctacacacactagttcatattatgtcatctcgtgaataatacatacatatatttatctaagcttgcatgaatattgaattatacttttagtaaccatatatatagaagattatgcatgctccgatgctcgtggagattaattatcagttgatacggagaaactagactgtaatcaatcatcacgtaaagatttctgttaatatcggaatatcatctggatttagcataatatcttccgattatagaaaaaaatgtacgtagtataatacctaaccgatatacaaatgaatatcgaacgtaactatgctataactagtatatatatgatcgtttttgaatcaaacataaaagagaatctcgctcatgaaaagattactacacccacaaaacaatcgaaaagtaagccaagaatgacgcagcagagttaacatatgcgtgtgattcacgcgtgcgtccggcaagaaagacatttcgagagaagtgaatcaaacattagtgtaagtgtgaaagaagaatatataaaaaagaaagatggaataattttctttggcaagttggtgttggcggaatcaccatgtacgatgcatattgttgatacatatatatacatgtttatcaccgaaaggtccaatctttttcatttatcctcactttgcgcaatgactcaatcaaaggagatatgttgagagaatccgttagattataaattgacaagcctcttttctttttctaggggtattaatcatgctatatttcttgtcacattgatttgaatatcagcagtttaagaaaatcgcttagccaaaagttattaagaaatcgtctgatttctatcattgttgtaatcaatttgataagctagcttcaactttcatatctatgttagtgtttcaaaattactatcatatgcattccgttcatacttatttcatcaattagtccatgcatgcatgtgcttattatttagattaattatatttatgtcactggcaatgcgtatactattattaacccacaaaaaggtgaaactgattacaatttttcgaatcgtattcgtaaattactaatcaacatgttatgacgatcaaaacaactgcagcgttaccgtagaaataaaaataaattgaataacttagaagtgagagtaatgtttgcaacttgtgcagtcaaacagaatataaataagaagaaaaattctcaaataggcatctgatattttatctttcctttttgatattttcttagaaataaactacattttaaatggtcttttctttctaattagcaagaaaaaaacacactcgaaagactcactcccttcctataaataggcgagcaaatgtcaagctttttacatactcaaaacaaaacaaaacatacatcaaaacgctaaagtttaaacccctagccatcatcagatcttcagacttctgaggatcatggacaaagtgatgagaatgtcttcagagaaaggagtggtgatcttcacgaagagctcatgttgtctctgctacgccgttcaaatcctgttccgtgaccttagggttcaaccaaccatccacgagatcgacaacgacccggactgccgtgagatcgagaaggctcttctccggctcggctgttccacggcggttccagctgtctttgtcggaggcaagcttgttggctccaccaatgaagtcatgtcccttcaccttagtggctctcttgtcccattgatcaaaccctatcagtccatcctttactagcaaaattaaaccaactcaatatataatatctaattattagctagtgagaataaacacagttacagctagagtgtgagctagctagatattcagtgaggacttcgtctgaattaatgtttatcgtttgtatgttctattgtttagcttctctcgtgtttcagtttagttaatcaactggtgtatgttgatgtatgactctctgtttatgctaatgaaaatagtattgaaacttttacattttttcccacacaattagtaacgatctcttgtgtatgttgagtaatttagggctttccatataataaggcaagaaaccgtttatacttgtctgtttttaacatggtatcagaaggaggctacacacaaaccattttcttatttagaaatattcacatacactgacagtagctagaataaaaatgtgaatggccaacacatgcatgaactcgtcttctaattatcaagatgtaatgtataagttggcttcatcattattagttagacctattgatagttaacattatatcgggcgatatacagatttagcctttgtgatgttgtgtttagagcgtacttttgaatcaaggataaatcagtgcccattagagtatatataaatcgaatgtgaaaaatattagatcagaatagacttaattagtctccaccatacaaatttggtaagaagaaaaacaatgataagataccagtggcctaatgcaactaaagcagtttgaggaagaggatggaagatctttcgcggtccaagtatatcatggctacacaaaatcactgctctttttgcgttcctttattcttgagtatcttcacgtttaatttactattattttctaatgaaaaattgtacacctttttatatatatgaactctttgttttttcgttagttgctcgtgtagtaaattaaacatatatgctcataatcaataaaaacatacaatgttagaagaaaaaaatacaattttttttactaacgaatcatatgaatagttgttttatatacggtacattaacgatcctctcatcagctttatagataacgaagcatattattctccttagttccgctttttatcacttgagattaaactctactcacaggtttaagcacgtaaattagttactaaataatggatttgacatttacgctttgcatgcttatatatgttacccataattatttccctttagttacttaaagttaccaaaatcaactacttcaagattctccaatcaaaagaagcgtgtaaaagcctctatagttatatagtagtatatagaccttgaagatttctttttgaagaaaatatgattatactgagttcaaaaggtcgaaaagaaataataaaggtagaatccctttacatgatgtgtggaacaacttttcttgacctccaacttcttgggatcgtgggaaatatataggagaatctaatcggaagttgtacagaacgtgtaagaactaagaaccatattcactttgttgtcattgttataagattcaagattctttgaccggcgcgtgaaaaaagcatccacctataggctcaagattcgtgtccaagaaaatatcgagaaccgatgattacttggaaagtggaccattttttaaaaaatcaaaaattaaaaaaggaacgtagctcatgcgaatagtttagtccaccaaagtgaaatggtagaacatttggtttcagtttagttgtgtgtatttttattaaaggcttcagaatcaatttcgatttttgaaaaatgagtttttatagccatgttagtatgttacgaggatggaaaagcaacctagctagattatcttgtgatatgtgttattgttcaagagaagtaggggcagtagttgtcgagatcatgttattagtgtcgctggaatgttagatattgcccatcctgtctctttttccccatcgtgccctaaaagtcaaactatgcatggtattagctaatcttgaataggtttaattcagtacggaaactctaattgaaaactaccttcatggagtaatagttatcgaggaacgatgatgaggtattagtggagataagcagatttggactcaatatcaaaaattaatggtgggatccatttccgtttcacctaatatacatagtggcaaacaaaaaacaaatataagaagaaaagattcagtatcgagcattctagctatgtcggtaacgtgacaaagtcctttttttcgtttgtctgtttctttaaagttaatcaaatcggccaacgctgcctcaacaacgagcttcctttttctaacgtccctaatttgccacgtccattttctggactagtcccggtttaaaaaatcttcagagatgtattcgtggtcaacttcattaactctttctcttgagcccttcattagttatgatcttatttactttttaaaaatctaaccaagtactgtatattatatatgtggtagccaaaatattatgttaaattctaggctaatccgatatatcaagaaaaatcaatatataaaaatggagagctatttttcacgagttaagtgagagagatgagtaaagaaaggcacgggaaggtgaagagagtgtaggtttccagcttcttccccaagaaataaaatgtatttgactttgtctaagcaaatatgtcgtcactttaacgtcattcattacctagaatgcaattaagatatggcttttacataagccaccaaatttggttttgttgccccaaaatatcccaagaaaagatcaacttcttcttcttaccaaaactgtcggcgtcgtctcctctaagctcctcccatggaagcagaagaaggtcatcagcgtgaccgcctctgcgactattgcgactcctccgtggctcttgtctactgcaaagctgactccgccaagctctgcctcgcctgcgacaagcaagtccacgtcgccaaccaactcttcgccaaacacttcaggtcacttctctgcgactcctgcaacgaatctccctcttcccttttctgcgagactgaaaggtctgttctttgccagaactgcgactggcaacaccacaccgcctcttcctcccttcatagccgcagaccctttgaaggatttaccggctgtccctccgtgcctgagttgctggccatcgttggcctcgatgacctcactctcgattccggattgctttgggagtcacctgagatcgttagcctcaacgaccttattgtttcgggcgggtcgggtactcataacttccgggccacggatgttcctcctctgcctaaggtataacttgctctgttttttttctcgagccaattgctcggtttttatatttctctgaaatgttttgaaatgctccagaatcgtcacgccacctgcgggaaatacaaagatgagatgatccgacagctccgtggactatccagatctgagcctggttgtctgaaatttgaaaccccagatgctgagatcgatgccgggttccaattcctagcgccggatttgttttctacatgcgagctggtaatagagactgctattggttgtgttttcttgtgcttgtcaaatgattttccagcttataaatctctcttgtcaatatgaaggagagtggactgaaatggttcgatcagcaagatcatgaggactttccatattgctctctgctaaagaacttgtcggagtcagatgagaaacctgagaatgtagaccgagagtcatcggtgatggttcccgtttccggctgcttaaaccgatgtgaggaagagactgtgatggttccggttatcactagtacaaggtcgatgacacatgagatcaacagtcttgagaggaactctgctctctctcgctacaaagaaaagaagaagtctcgaaggtaaacaagctaatttaaaaagtgagacaccaccaataggattgggatttgaatcatgtgttgatgaaacaggtacgagaaacacatcaggtatgaatcacgcaaggttcgtgcagaaagcaggacaagaatcaggggacgtttcgccaaggcagcagatccatgaatgatgatgaggttactttgataatcaaaaatcttttgtattaatcgaatcatatagtgtgtatgatcagataagtttttgtattctaagcttaggagttatcactgtatatcgaccacactctcaaaattgtcacttaagaatagttttttttttgttttgcctccgattcctaatttgccaaagggcaagcatggacgagcacagaacaaaacatggttcacagttatatacaatctcaagacaagcaagcagcaaaagaacttgttgtaatgttagaaagtgagattggacccattaaagatccatggagcaagaagggcttgatgtaattgatattatgggctcaagttgtaacatagtaaacccaatataggttggcatgtttgggccattttcttttaaagcccaaatataaaagcgtctcttcccgatggccggcgaaacagaaattccgctgccgtcgcagctttcactcttgtttttttattcagatgaaattggatggccgatgaagacaaacatccaaaggcatgggctcgcggcaacaactatttgcaatctaccaatatataataatctgaggcagtataaaaatacaaaaaaaaatgacaacactttttggcagatcattcctgctacgatgaatctgtcccaatgataatctgagaagtaaagtaagttttggttgaacaaggaatctggagtgggttttacttgttgagcaatcagtaagcactaaatcatgtatcagagttgtggttatattctctatgttcttcttagaattcaaatatgaatctgacttggagttctttattttaatgatggttaattttactgttaatatttttggatttgaacatttggtgaagagtggttgcagcttgaagcaattttgcatctctcactcttcgtttactgtttgttgacgttgaagattaggccccaacaaacttgtatataagagcccttctctgtttattctcctgtcttaagagcgctaaatcccttggagacatcttcaccacactgttcagagatctgtcatgggccccggaggaccaggaggacccggaggaccagggttcttgccaccgggaggaccaggcttcttcccacccattggtggtttcttttctgggttctccgacatgatatgttcctggtaaagacattctctgttttgctatgtgttttgtaaagagttaagtggttagtctgactgtggaatcttgcagtctatcttgtctgtgctgctgctggctgctacgagattgctttggcggcccaccgccacaaggaccgccacttctgccaccctattattgaccacatctgactccattggtcactcgaataatattaaagctatctctgtataggatattgcagatgtttgtcaaattcaatcttaaatataataattcaaatgtctcaatttctgctctgtgtggatatatattacccaaaaaacgatcaaattaattatcagagaaatgaaatcatagtctggaactacaatcactagcaacacaatgcaacaacaacaacaacaaacacaatctactgtcttcgattcttgactcttctcttgtatggacttgccaagacttttgaaactatgtacacacacttctaagacgaggccaaaccagtcttctctttcaacatgatacaactaaataaacacggagtcacagggtttgatggaattaatcattcacatgctatcttggtgtcgaaactgctgaggcaaatggtgaaggcctggaaggcagagatagggtactgataatccattgtgaacacatcttttccgacttttccaaactggagaatcacgttttcgtgctcaggtcctgcaggtccattctcaggagcagctaccagctgaaagtttttgacggaagcaactgtgactctcccattgaagttgaggcaccagcactggagctgttcgtgccatctgggcgctttgtttttcaggacaagcagtccttccttctgagcagcagatgatggaccagaagggagactctctgcacgaattgatttcgacctgaagaaggagaatgaggggaaactatcaagattgctatggacaagttccgtctgagttggagctgttcctccaggttctacagctgatgcagggatggcatccatgacacactgcatcctcctcggtcctctggtatgatacgacaatgttcacaattagcaaaagccatattaagcaactaccgttttatctcacaatgtatctgtaagcaaggagataaatcacctggaacccaagacgttaagctcatatgagatatgtgctacaggatagttgccagatggaattctcgggctcacttgtttcaaactgagaagtctgcttgaacgggttctggtaacctgagttccaggattcgtcggctgagcgtcatagacagtgaacttggtccccagaaagttagatctgaaagaaagttaagataagagaaaggttatggcaaatatatgaaaaaaccatggggtcaatctgtagctaagtacctaagctttccgatataggtattgcttcctcgagagacatcatcgcagtttaaggagatgatgtagtcagtgcaagttggcctccgaaacctcttggcagcaagaaggaactttccatcatcatttgaagctgctgctggaccagaaaaagtaaacctttgagtgttattcagaaagagattaggtatgcaaagagaaaagaagaagcatctgttagtttcaccttggtttaacccgaggtatagatagtaggtttgattgctgcggtttctcataatatagcattgaacaagtgatcctctaggacccggctaaaaggaagtagggaaaaacgattagcctggataagcacacaagtcatttataaagtaaagagagaatgtgatgggatactcaacctgtttgagggagataggaaaagtgagtttgctagaaagctcaggaactctgacgatctctttgacgatttctcgccagttcctgcagacaccagcgcaagaaacaacatttttcctagacggccaagtgtcttcggattgctcaatcctcataagaacatctctcaggagctccggaggcatactagcccagcagctctgcttgaaagcatcaacaggaacagaagtatcctgaacaacacgttgagacctggatctaccatacccgaatctgacatcgaatccctttctggatatactcccaagctctcctctcatgtcctgaatgagactcttgaaggacatggctctgaattctaactaataacgaactagaagcagtctctatatatttcttggtaatgcacctaattcaaagttgcagactttttcaagaaccctaataaacccacattcggaacgaacgagatctcaacgaactaaaacacaagctcctccaaattattaaaaaaaaaaaacacgcttcttattacattcagatcaagagtactaacccaataggtacaagatccgattatagatagagatccggatacagagaataaatacctaagaaatcccaagcgaaattaaaaaggccgcatcgattcacaagttatacgagcttcacatcaataagaatccaggtggagcttgggaacagtacccaggtcccagattggggcatcgaaatcgacaaccaacactcgaaagcgaatgccttttacaacccacagaagaagaagcggtcagaggaaatagattttagggtttgacgggggagtgaatatgtatgtctgtctctgtgttatccaatcgcttccttccttgtctcatttttaattgttgtcagtcagtcattttattattttatcattattttcttcaaactaaatttggtaacaaagttttacatttcattctaattgaccgtattcttaccgatttatcttctgcctttttaattaagggatatatataaagaaagcttttcaattatagaaataaattaagctgccacatgataacgaaattaaagtgtgctttctatgtatttctctttctcgttgttatcttttgttttggtaatgtttctagaaatgttggaacttcaccgaaataaacatggtaactgactagattctaaaaaatcttgttcaaaattcatcatataaaatagacatctgaagataagaagacttacaaatagaatactttggtttaatggaaactttctttccgtttttcctctttttacgcaattgtatttgacaaaacaaaactaagcagagtaagctttttgttgccgtgatcacagcactttcgccgctttaatgggccaaaaggtgttttaacgttttactttatataattaagatgaaatcttccttctttggatataaataatgatttggacaactactgatttggtcaaaacgtaaacaaaaacaaacaaacaaaggaaaacgtcaaaaaaaaaaaaaggtgttatgagttataaaaaataacattattgggccgtaagaatcctttttttcgtctatatgggccgaattgaagtctaaatgggtctcgatcttaactatgcctacacagcataaagaagttaatcactacaacaaaatcatcatttggccttataatagatattcattctcaggcactctaagacactgtgaagtggatcttttgacgcttatgttcatcttactagattgcataggtgagctttttctctcaaatcatattatctttgccactgctatggtagagaccttggggacttatctttgccaaggaatgttccattgcatagctatttaaactttaaagtgagcagaattctcagtctttgagctacttacttacaaagcctctattgtgcaactcctttgacccggtacgaccttggaagacaaagaaggcctcactgcttgcaaggggcaatggcgaagaagaagatcagagacggtcaagcttgcagatgctcctgaaacacctcaccaacagtgaaggagattcgacaatgcctacatctacatgagaccgaggaggctgacttgagttgaaaacattccacattaaagaagagagctcttcatttttctgaacgattgaagaaatgcattctgcttaacatttgaaacctttacgacagacagcaaaatatatgtatttgtgcggtgaaggaaaaaaggataaaatggaaagaaatgaagaaaaggccaaaagaagaggataaaaagaagactaagacacaaagagagatagcgtctgtgaatggcaacaaaggcagttcttctcccgtggcttatcccatcgccgagacacgtatcgctgttcccagtggttcaattgccggcgttggagaccgccgggtggtgtgtaagaaagaggagggcagaagacgtagcagtctccgtcgccttcaatccttctggcaatttcgacatctctgccttcgagaatgaccaaggttcgtacttgctcaattgattcagaatgataaataaaaaaaggctgctactaattaattatgtgaaaggcgtagcagattcagataaagtggaacctccgatgcctccaacgaccggccggtacgaagtagtgatcgacaacgactcaattgggcggcttgacctatccccgtttcagagagccatcggcataacctcgcctgatgattttggtgtagctgaaccaaaacggtatttggatcgaaccatcggattcaccatcaattacaagagagaagaccccggggatccgcgggagctgtcagagtacccggacgtaagactatggttcgtgaggctcgacgcgatgtacccttggctgcctctgctgctggactggcgagctggagaacttgctcgatacgcagccatgttagtgccgcaccagatgagcttgagaatgggtgtcgttttcaatccggaggcgttggagcttttcgtaatgaacaaagtgtttgtggtttatccgtggctgaaacggcacggcgtcccaaagcccaggttgaagacgagcgacatggccaggatgctcggattcggtatcggcgatgagctcttcgacttgatcgatcacaatgaatgaaaaacgatgtgttctatcttcaaattacatacgtgggcctaattgtgggcttacaatgaaaaaggcctggggatggtaattaagaggatttttttgggtatttgatacacacgtggcgaatattcattggataagttgtattaatagccgtaaaatctgggaaaataaattcaaaatctcgaatatctgaagagaagagagagcccattcaaaatttgaaaaacaaatcaacaattggtttattcgtatctttctcatttctctctagtctatatcgctctcagaatacaattggaaaaaagaacaaggtatttaggaatctctcattcttgagtagctaagcattgaggtctcctttgcgtttatagattattttttttggttgaaattgtttggttctgttgggatatgttgttgtgttagggaagagaacacaaaaagaaatggttagagaagaggagaaatcgagatggtggtggttcgagagccacaagagctccaaacattctcaatggcttcaatcaacactcgctggttggttctttttctcactcagttcttctctatgttttgtggtttttgccaactttttggtgtgaaacgtttgtggtgcagagattgatgcaaagacaaaggcaatgttgaagttgttagacggaaacgcagactctttcgctcagcgtgctgagacttactacaagaaacgtcctgagcttatcagctttgtcgaagacttttatcgagctcaccgttccttagccgtgaacttcgaccacctcaagtcttccgaccactatggatctcgctccgctaaggttccccaacaatccatggagtccgtttgtgacagcaattctcactttgaagatgccgattctgagattgaagacccccttcaagatgatgcctccgcagctgattgcaaagaagatgagacttggcaattggaacaagaaaggttgaagctgatcgaagagactgatgctctgaggaaacagctcttagacaaggacgaagagaagagagaggtcatcagacagctttctctaacccttgagaccctcaaagacgagaacttgagcctcaagagacgccttgcccaccattctctcaagcaacgcaccgttttggagttcaagccactaaacaagttctttgggaagctgttttacattatgtgcgatggcaacaaggtcctttaggttggctcatctacctcatgagcttagcttcgatattttctgtggttcatttcactgtttatcaagatatatcctgtcctttccgtgctgtattataaccggtaattatcctacttaataatgcatgctgttctgatttgttcaatcacaagaacccagtttcagacaaggacatgtgatgagtgatacataattggatgatcaatcaattttgactttgaggcacaaaaaacacacactatcactgctaccaagtacaacaactgcgcactagcccaaactgcagagtgctttatgagcaaatctcacacgaacgaacactagaagaagctatattaatattacatgaaaaaaattcagaagaagcagagagtaagaaagaatacatttgtgaatatttggtttctgctgatgatattgtgtagagtgctgcttactcgctgtttctatatgattactagaagaaactgcagaaagctagtagcaacatgagtaggacaagaagcagagatgagagttgtgatgagaccaaacaaacagaggaagaagctggaagaggagatccaactggagaaacttcgagcagaggatcaggagtgacagcatctgggtttggtggactaaggcttgaggggattgtcggcatgatagacgattccgacggggaaggagacatttcgcttgaacctggagtagggaacaggggagaggtatctggagacatggccggggtagaagctgagaaactcgatggagcttcaggcaagaacgaaggtgcagctgatatggtggacagctgaaactcagatgttgaagtgtgtaaacagagtgagagaacggtgaaggcagtgaacagagagacggacatggttactgtgaatgtctctcctgcttctctgagaatgtttctgagagaccttaagaaactgaagaagaaaaaggtatacagctatagaggaggtaaaagacaagattggtgggtttggttgtggacctctggcttagggcagagcacatgaaatatggatttgtcgggttttgatttgtgtcggagtgtttgtatgttttgattttgtgaataaaaagttattaaaaaagcaaagtagagtcccgtgaagctcttccctcaaatatagaaatgagtgccagcttttaacttgctatgctttttcctgatctgcaacaatcttaggtttattgtcagttgatgaagacaatagaattggtaaaaaggaagcaccgattcactgatatatatatatatatatatatatatatatatatatattacagtcacagaagacattgctgcatttcattttctcatagaaaatcagacactgaataatttgttgacttttgtcgagattctggcaatgcttttagcagtatacattcatctgaacacaatggccgagcattctcatggccaactttctattaaactcaatccatagaggtttgaataaagaagaaagaattcactaaactttgagtttgagcagcacaagaccttatgaatgaggatgaagctgaaagctttcccatatgttcggggaagctgtatgagctttcagtggtttccatctgcggacgccttttcgaatattttatgcccacaccagtccatcaaagccgatttccagatttgacacagggctgtctccaataccttggtcaagcgcttgggtgtcatctattggatcaacatatggctcgagcagatcagcggatctttccgagggaattccataatctttgaggatgcacaaggaagcagaatttgaagcttccctctccaacacagcaacatagttgtcttcgaactcaaaaactagatacttatctttgcacatatcaatgagatgtgccaagtgatggatgtttcttattggaattccattgaacttcaggacctgctggttattcatgtcctcatagccgatgtttacttcatttgccaatacctatagatatgctcgtcgagtgagttagttattaaattattgttgcactcaccaaaatgcacattgaattaagaactcattatcctccgagggattacctgtgataggatgacgatttgttctcctctgaaccttgccacagagtagcgtgcctttgttaacaatttcaactgcaaatcggaaggaaaaactaaactgttatagtggattcacaaattaaactaagagacagtttagtagagtgagcttacgcctatggtatcctcacactcctccctggttatacatttaaaaaaaggaggaaacagttaggcatttgggaaataatgaagaaggtttcggtttacttttgcatcttagcaagccgagaagaacatactctatcaggggttctgagagcggagtaaacaccaaaccagcaactataatgtatgatggctgacctccatcaatatggtacggtacctatttaaaagcaacaaagtattggtaattagcttacaaggcatgatgcgcaaaaggcttaaaatggtacatgcagagagttgtaccaggtgcactcgtggccttagaactacttgaactttcttatgttctcctgctctaatgataccaatctcagcgatatcacctgcaaatctactcagtgaaataaaagccaagtatgagaataggcagaggaagttaatacatctgtggactagaagaggtatttacttttgactgatgagataacggaatgcaatgcgttcactagatcggaagggtacagttccttcacatcccacatgtagatcatcaaaacttacaatcacatctccctgatttaacaatcagtactcgtcaggtataccagaaatcaaggacgtgaagattttgcattgtagaagtttggtagagcaacaatcctatgatccacactctttacctctttcaggactttacttgcatcagatgtaggttcaactcttcgcaccagaaccccctacaaattatatcacttgagtatactcaaactgctaacaaggaagactcaatatcctccaccgctatgttggtaaaatcttaatccgacaagagacagacgaactaacaaagcaaacctacctcatttgtaggaactttgaggcactcccgcagagctggattttctaatttctgcagcaatactccaaggcaagggtaacctgcaagagaaatatcttttaagtattaacaaaagaaaggctcaactagaagagaaagtcagaatggtcttgcattggaacatatgaacgtcaagagaaaactattaccagtgtactttccgttcctctcataatcagtcaaaaagtgagaaacaacggttgttggaatcacatatccaatattttcagtttcttcggatctgtaaacctagaggaagtctcttgtgagacatacgtttggaatgagaattagaaaaaggtattatattcctgaaaatcccaaagcaaatacctggaatgctactccaatacattccccctggtcgttgaatgcagggccaccactattccctacaatctaacaagtataagaagtggtatcacaataatactaatgaaggttctcagaagcaattttaaagaaaagtacgctacagaaaagaacaagtcatatgcaagttttagaataaagggcaagatacttggatcaaatgggaaatagtttataagaaaggatccactgacctggatttatagcagcgtcgatttgaattccaagcaagtcggatgatccatgagcgtaagatgttacctgcattcccaaacgagaaaaagttcttaaaatcaagacaacaatatcagcataaaagcaaagccaaagatatcgggaaacctctatacgtgatacaaccccttttgtaacagagattgtatctcctccaagaggatatcccacgacagtaactgaatcctgcatatcaaagccaacatggcaactctataaagaagagctatattcagatagataattagaaataaagaaacagagaagaacatcttaagccttttacttattaatgcaggaaagaaaaaagatctgtttttttgtttttggtattgttcatgcttcgcttagaccgtcaaatgtgttctttaaatatttgaagaggactgaacttgaaaaaaaaactgaaaagactaagaaatacatcattatctgatgagatgatggaacctgaaggcggggtaaatggcccagccgtagtggttcagctcctttccagaaatcctcgctttctacggaaagcaaagcaatgtcacagtccacacccctaactaaaacctgtgcaggataaatgagagggaagttatcttcaattgtatagcgacaggtacatgtttaattgaacttaagagagaaataaacaaattctattgtaggaactataatgagcatattgatgaatacatgcacatatttgctactaattgaaagcagaagtaataatcacaggtgaaaaacaaaccttagccacatactttcgatcatctccccttctcttaactttaacctgatgaagagatatgtgatcaaaagttaacaaaatgagaagagaaaaacagataataagaaaatgaagtccgagaaggaaagtaaacctgtgtatcgtgttcgacacaatgggcattggtcaagagcttgccatctccaatcataaaagcactgcagttgaagaagatgtgatggagtcatgaaacaacctaaaagcgagaaaaagtggaacatgtgattaaaaaaaaaaaagcttgccttccagtactagtaaattgcctttgcttctgccatgggagggagtaatcaggagcagtatgagtgcaataaacctggaaagaagcacgggtgggttcaaaagcaagcagagtgaattttaaggaagaaagcgaatttgatttcgaaaccttgacaacagcgttgagaaaggatgcatcgtgaatcttggcaggatcagtctgcacaaggaaatggcattagaccacaggaaatacaaatgcccgactaggagaaggaagcaaacctgttggtctcgactaaaatcagaaagagactcttttttctcctttttgggtgacccaaaagccttgaaagccattttttgaggaggattggaactttcatctcgaactctacctgggtaattcttctgcaacgaataattccaaccatgtaagaagaagaaaaaacgaagggggaattgattgaagagtttatgaggtggggaatgtacctctgggtttaatataggagatggtgaatcagacctcgacgatttcctcttaatattggaggaagctcggggagtcaacgacgatgcggacacgaaacaccacggtgaggagatggacgaagattgaattttaacggaggcattgaggacggagaagcagcagtttgctacggaggcggccatatcggccggcgagagagacacactaactacagagagaagtgagaagaaagagagaaaaagagaatcctttttttgattttcttatccactctcgcttctttggcgcctccatcttcacttgaccctgcttcttccccatattttcataattaccactgggtcctaatgggcccccttttaacattaatgggcctattttgtttttattctatggagctgcccatttcacaaccattggggccaccagatgaggtacaccaatatctctattactttcaaatatttttagacaaggttgaatatacattttagaaatctttttcacgtataaacaaattaggtatgataactgataagtaatcctttttgtatctgcacttatgatcgttctcgttccaaaaaccttaatgattacttatatctctctctctttgtgtttctttggataaatgattatatcccgttatttaattcttttaatcaaagcatgatttaatgtaaaattatactactgtatgactacttttcttaaaaatataacctaggcaacttgttcatgtgggtctactcgttaggtgcttcattttgaatgatcatgtttaattgcgtaacgagataagtaaactggttaattgcttgtgtgacaaaagatacatatcaaatttaattaatcattaactttgattaaagaagtaggcggcatccccaaagtcaacaaataaaatcaaaggtttctggtttaatccacgcgttgccccatccatattccctttatttctaaacgaaagcgaccgccatttccgtattttgtctccctagcaccaaaattacatgaccatttatttacttacgtggttctttttttctttgcagcagaattatataaatatgcaacactggttagtctaacgctatagatatggatgatattttagatatctatatatacatttttgcagccattttgtaaaataaatcctagagttagaatttatttacagtggctgccactgacatttaataattgtttttgataattaaaaagaaaatctttgaattaaatatttgacaatcttcccaaaatctctccacattaattacacgattagttactaaaataaaacttcccaaaatatttaatcttatttaattactacaaaattatcatttttgatattgtttttctacatgactataataattcgattataatcatcaaaccgcagagatatttgatagcatttaattattacaaaattaaaaaatatttagacaatgattcataaacatatcataaataaaatcagtgagttttttttacaggacggattgacgggacgagtttgacaggacgttacttaataacaatcgtaaactataaaataaaaatattttatagataaatataatttgcaaacttttatatatagtaactttaaaaaataaattgtcttcgcggtataccgcgggttaaaatctagtaagacctaatagagtaccaaggctagaacaattaatacgagtatcgcgtatgaaaaagaatatacatgtattctgataactatataaagtagtagatgaaatgattttgattcatgaatctctatgttgagtgagaaaatgaatagcctgagacaacacaagtgtaatagctttcacgcttggacttgtgtctgaattttggaactgatgatgtttgctgctctttctagaagacctgttgaaaaaagcataaatacgctctgttttcaaatttggcaattgatatttgtttttgtacgtgtctatttaatttttggtaaagaacgcacgttgtttatacttacacaccgcccttctagaagaacaggctctcacgtcatttgcatacaacttccatcttctggaaccaatggatccctgttacaaaagttgctcttaaaacataaacaaaaacaaaagaaaagaaaacatttttatatttgtcgtcaataataatggccactttctgcttacatgtatatgaatgtatatattactataatacgtagctgctcgtgtttcttgtctaagttctctgttatagttaggagacaaataaagagaattagagaacagaagaccagaaaaataaagatgaacacaaccaacaacgtgtttgatgtgtcaccgttcttgcttttagaagcatctgcagattccgaagctggccacgacagcgttgacgatgataaatgcgttaaggattacgatcttggtcatgagtcttctagtgccagttcttgcgagacgtcttgcgtgagtcagagaacgagtttgttaggttttgacctgcaggacgatacggtgaatcatgaagaaagagacgccggagatgaagaagacgaagacggagaaggagaagtgaatagctacataagatgtgggagaagccaacgtgaaaatctggctgtggattctgctgcggtggtgagtgagatggatcaaaatcgaatgttctgggaagcttgtctcgcatcttgatctgtctttattaattaatgtcatctcatcatcaacagagaaaacaaaatagtatatatctagcttagcgtagtgttcttgtctgtgtttcccctttggcttttaatgcacaactaatcgatatgatatctacccattaaccttaattagtcccctttagcgtagtgtaaatttgttttgattcgtcaagagaaaaaaagtggtctaagggactgactagttggagaagaatccgtataaaatctgttaaaaggagaaacaatatactatactagtcttttctcgtagaggaggatgttatactaacattactaatttatgctcacccagtttaaataaaataaaatcaatacttttttggtttgtactaattaacatatatatatatatatattcccaaaattaaagattccatggctaacagacctaaagaagaagaagaacaaacacaataagagattggtgtagttttacttttactatattcatctttgtctttattgaccaataaagtaatttctcccctttatctatttgatagtggtatactttaagttgctttttaattgctggtgtacaattatattggactcaccaacaagaatctgtgtgcagtcagtgtgcttgttactattgttttatctcattaattgatgatcactttttcaccttcatacatgagagctgaattcatcactttgttagttatataagttgggctattctattattaacagtttgatttttgacagtaaatttgtctgccagaataacttatacacattaccacccaaaaaaaaaaaaaagaagaaccatttttggacattacgtggttttgggtttgtctagcgaccttttatgggccaatgatatgaggcccagtaaggaaacaaagaacggcccattataatgtaaacatatttagtacaaggaaaaggggtaaaaaaggaacaaggggaaagaaatgagcgcgacgcagacgcagacgcatggaccgcactcgctggccttcagggtgatgcgactctgcaaaccgtctttccacgtcgatcctcccctccgcattgaccctttcgatcttctcgccggcgaggatttctccgacgatccctcttccgcctccttgttccgccgccacgtatcttctgccgacgctgtcgactccgatctcagctaccgaaatagattcctcctcaaccatcctaccgatccaatcggtctctctggtcttctgcttcttcctcagtccttcgggttctctctctctctctttcgtttctcctgcagatttttgtactatatatatatatatatatatatatatatatatatattgctgtctgattctgattgtttatttggttgcgcagagcgatctatctcggagaaacattctgtagctatatcagcgtcaacaatagttccacttcagaagttcgggatgttaccattaaggttcctcacctgcttccaacattttgttttccctgaaatctgaaatctatctactaatcgattgattatcactaagattcgtcacctgcgtacttcatatatatgtatatatctttcgttttttctttgggtcttgctcttatttcactcgttcacttcaatctctgctgtggaatacttctaagaagtttttgttgtctgcttcgtcttggaccttgaattgcaaacgtcagaaccaaaacgatgctaagctatgtatctcccatgtattattattgtaggcagaaattcagacagagaggcagaggattctacttctggatacatccaagtcacctgttgaatcgatacggacaggtggacgctatgatttcatagttgaacacgatgtgaaagagcttggagctcacacgtgggttttctctgactctcttccttcttcttgtccttttaaattgctccatggccatgaccctcattcttctcttaggttggtttgctctgcattgtacaatgacgctgatggtgagcgtaaatatcttccccagtttttcaagtttgtcgttgcaaacccactctcagtgaggaccaaggtgattatactagtcaattacgtatcagcatttttatttgtcatttgttttcagtcctctctttatgcttgtctaattgttgctatttctgatatgcaggttcgagttgtaaaggtaggttcgagaatctccacttcactctgtgagtgcttctttagaagctttagtttttttccttgtacctcttaatttggtgttttgcatggatcatagatgggaggtttttctaaatatcatgattggcagttataccgccatgtcattagaattggatctcttttcttgacttattattcgtcaatgatcccctggaaaattgattacttctgttctggtcctcactaagtaatcttataatcctcgtccacaatatcttgaacaagtggttttgtgacactaagcaggattcactgttccgcccttttctgctgtctgtgtagtttaacctgtatttatttgtttgtattggttgtaaaatcaaaatacaagctcatgtgctgttgatgtctgggacaccaggagacgacatttttagaggcttgcattgagaaccatacaaaagcaaacctctttatggaccaagttgattttgaacctgctaagcaatggagtgctgtaagattacagaatgaagactcaacagaagatcctccaaccaggtctgtcagattttcccagaatcgttatgtgcatcataagccactcattctatcaaatcgtcctaatttgctgttccactcactctctgtgtctcagtggtcttagtggactgatacctaaaccgccagttataatccgatctggcgggggtatccacaactatctctacaagttaaacccatctgcagatgtttccgggcaaacaaaattccagggaagtaatatcctgggtaaatttcaaataacatggcgcacaaatttgggtgaacctggtcgcttacaaacacaacaaattctcggcgctgtaagtttacgctttctactctgtgacaacatgacatgaatttgtgcctatttgttgattgtttgctgttaggattttgttctaagtctgaatgtatttggtttccttagggctttgagatattgcttcctggggaagccaatgcagggtatcagttagattaggtggcagttagaacaactaggaaaactcaggttgcaccaatatcttcatttagcagtcttatactcactaccttgcattatagacctgacaaaggtttacttaatttaaaattttctgtatctccttttatgcttcatatgagatgctcatctcatcgtctaacaaacttccctctaatttttttttttttttcagccagtaagccgtaaagagattaatatgcgagttgtagaggttccagctgttatacacttaaatagaccctttcgggtaagacaactgtttttttctctctaatgtttggatacccaaagatttaattgaacttacacgggcttcacactgagtgtaaactgttttccataggcatacttgaatctcacaaaccaaactgataggcaactgggacccttcgaggtctcactgtcacaagatgaaacacaattggagaagccggttggtattaatggtctccagactctggtaacatatctgaactttctgttttcctaaaccatgtagttagaactttgccgtacacggtgacagaattgtgaatcacgtcttggctatgcaatgtgtatggaccaaaactttgcaatggctagtcgaagctgattcatcactaaaccgtttttattatacaaggaactgacaccatcgaaactcttgcagatgttacccaggattgaagcatttggctccaatgatttccaattggtatgacaaactgaccacctcctaagagctctcatccttcttagaatgtaaaatctgatatatatctatttgcagaatcttattgcctccaagctgggagtccagaaaatcgctgggatcacggccttggacacaagagagaaaaaaacctacgaacttgttccagatatggaggtcagtgtactaaccttttttgtatatcttctgggttctaggtccctctctttagtgaaaacaggaaattggttcaccataatcgatattgttgttggcattatactgcagatatttgtagagacagactaagttataagacagcctccccgagtggtgttcttcctcgacaggttttgttattgcacctcctctgtgttgttaattgtttttgtttcttagtagaaaataatttggctcctttgtagaagaagaaaaaaactaaacggctttaacatatggactacgccgtttgtatcttgttgttacaaaccattaaacgttactgtttgatcaatatgttaattcagaactgtttggtttaaagcataagtattgaagtcgtcaaatgaacaacttgcaatcttttgctttgtatgagatacaaataaaatcgtggtccgtttataaaatagctttctccaaacaatttcaattcccttttaactaacacaacaaacgacccggcccgtcaaaagaagaccaacagacgatgaaataaaaggaaaaactcaattttctaaactatttttgggggtcgtaaataagtgaaaagcctgccgacgaaaaaagaagaagtgaaaaaagaagtgaaaagcccttgtcttatttgtcttttactatttttctgatttaaaataaagaaacaaacatttacagtatttgtttataacgggggctaagtagagaatcatgagaagattaaaatccctaaaagttttgggggaaagaagaaagaaggaagacgatgatgatgctcagaatccgaagcagagatggactggagagagtcacagcggagggagctcatatcactgtttcccagctcaaaaccttgatcgcggatcagcttcagatccctctccataagcagaccttatccaccaatcgtgatctcctcctcgccaaaactcccgctgatctactcgccttcaccgacctcacggacccaaacctccccctctcctctctcaacctcggccatggctctatgctctacctcgcctacgatggcgagcgctccattcctggagctcctcccgttactcctgccggatccttcgggaggaagatgaccgtcgatgacttgatcgcccgccagatgcgcgtcactcgtcaggagacgtctcactgcgactccgtctccttcgatcgcgatgccgccaacgctttccagcactacgtcaatgagtctctagcttttgccgtcaagcgcggcggctttatgtacggcaccgtcaccgaggaaggacaggtggaagttgatttcatttacgagccgccccagcaaggcacggaggctaatcttattctgatgagagatgctgatgaagagaagcgcgtggacgcaatcgccatgggcttggggatgaggagggtcggtttcatttttaaccagaccgtggtgcaggacaagactgaatacactctgtccaacgccgaggtgctacaggcggcggagcttcacgccgagagcgagctgaaggagtgggtcacggcggtggtgaagcttgaggtgaatgaggatggtggcgccgatgtccatttcgaggcgtttcaaatgagtgatatgtgcatcaggctgttcaaggaagagtggttcgagacggagattatgccggacgatgatccaaagctctctaagatgaagaaggaggtggttgttggtgtgaaggatcttaaggaggtagataacgatttcttcctcgttctcgtcaggatcttggatcaccaggttcgtgtttttctctctacccttcctttgcatcaatcatcattgttctttgtactaatgctctgcttgggcaaataaagtaattgaatctggagcttttaagtcttaggttaatgaagcttgtcagtgtttgctttccatgagataattgaaaattagcatttcgtcaatggtccctgtgttttaacattaggctgctgtgatcaggggcctctgtcatcaacattcccaatagagaaccggagcagtcgagcaacgatgcgggctctaaaaacacatctggaccgggcaaagagcttgccgttggtgaagaagatgtcagattttcatctgcttctctttgtggctcagtttctggacgtgtcatcggacgtccctgctttagccgagtgtgtgcgtctgcagtcgcctgtcccagagggctatgcgttgctcatcgaatcaatggccaacacttgttaatttttgtgtcattgttttttggttcttgatacagtatatcatgttcgttttatggtccagaaaatcttttttactagttgacaaatgaaaaatctctagtgtactcgtgatgtatttgattcaagtttgggggttaatttaagttatcaacaacttgtagaaacaaagttaattcacagagtaataaatcattctaataggtatgctcaggggcaaattggcaaaacataaaaataaaaagagagctactaaagttttcgagcgaaagcgaaaatgaaaattttataattcgagcgaaatgttaaaaagctgaaaattgggggaagaagagagaagagtttcatcgtcactggaatcaatagagtcaattggcgggagaggttagtctcgaaaagaagtggaagccctagggggaaactttctcgctcactcgctcgtctgcaaacaccatggaagacagtcctcaaggccttgtgagtctctctttgcttgtttgattttgtttgggaattttggattactcttaagtttttctgctgggcgtgtagaaaaggagtagagatccggatcaggatcaggatgacgacagcggcgaggctggcaaggccgacggaagcggcggagagaatcaggagcgcagcagcgaccagattgagctcgatgacgacgatttccaggaaacccgtcccaagcccaagcgtagtcgcacccatcctcctcaacagaatctcattggtacaattcatattcctaaatcgctccaagctttgtgccaattgattgtttcctaaattgattgattgtttttcttagagagcttcatcttgtttgtttgggtagatctttcagctttcatattttttttgctaacagaggttgtcaaaggcaacggggatcttatttctaaagccgtcaagatttgggttgaaagatatgaagactctcccagccttgctaccactgagctcttgtcaatgctctttcaggtactccttacttataagtctctctggataccaaggttgctagatccgggcatctcttgttgctgattcaaccacaccattcccttctcaatagcttttgtgtcttgtaggcttgcggtgctaaatactccatcaaggatgatctgcttgatgagactgatgtcgatgatgttgtcgtttcccttgttaatcttgctagagccgtaattcgttgctctcttttcattctttttcaattacattttgtttcttaagaaaattttcacaactttcttttcattgtggttggcctatagggggaactcgaagattatcagagttccagaaagaaggaactcaagaacttcaaagaaaatcttgtttccttctggaataatctcattatcgagtgccaaaacggaccattgtttgatagagtcttgttcgacaagtgcatggactacattatcgcactgtcatggtttgtgttcaaacttatgtggttttatgcctcatagaattttcttttcatgtttgtcttttctttttgcagtactccacccagagtttaccgtcaaactgccacgctaatgggcctccaactagtcacatctttcatttctgttgcaaacacactcggttcacagcgagaaaccacccaaagacaattgaatgctgaaagcaagaagagagctgacggccctcgtgtggactccctcaacaaaaggttgtctgttactcatgaacagataactacactggaggacatgatgcgcaaaattttcactgggtaagattggataacgattatactgtcagctaagtattactcccactaaaaaagaaaacaaagagtagaaaggaaatgggtagtttacttatgcgagtgttactgactgaaatcattattacaatcttattttgaaggttgtttgtacaccgatatcgagatattgataacgatattcggatgtcatgcattcagtctctgggcatttggattttgtcttatccttctcttttcttacaagatctgtatttaaaatatcttggatggacgcttaatgacaaagtaagctccttttctctctctcttctatactatcatatatatgttcgtaatagtcactgatcttgtctgcgtattgaaatatctgaagaatgctggagtgaggaaagcttctctattggcattgcaaaaactttatgaaatggatgaaaacgtccccactcttggtcttttcactcagagattttccaatcgaatgatcgagatggctgatgatgttgatatgtctgcagctgtatgtgctatagggcttgtaaagcaactgctaaggtattccccctcaagatcattttctcaaccaaagcgtcaccgcaaatatgttgaactgccatgagttaaaacctgagctcttttttgttttgcagacaccagctgatacctgatgatgacctaggccctttgtacgatttgcttattgatcaacctcaagaaatcagacgtgcgataggagagttagtgtatgaccacttgatcgcacagaagtttaacagttctccgtccagtcttacaggttttcctctgatagatagtccatgtcctgggtaccagagtttttactcttagaacttagttcagagttattacatcctctttcaggtcatgatgattcttcctctgagatccatatcttcagaatgttacaaatattacgggagttctccacagatccgattttatgtgtatatgtaattgatgatgtttgggagtacatgaaggccatgaaggtagagtctaagagaaattacttttcactgttgcacgttcattatatagctgtgacgtgtaccttctgcagtttttataccatcgtcatgatgctgcttttcttacaggactggaagtgtatcatctctatgcttttggatcagaatcctcgaactgggtctactactgacgaggactcgacaaacttgatcagacttctgtttgtgtcaatcagaaaggctgtcggggagaagataattccttcaacggataatcgaaagcagtatcacagtaaagctcagcgagtaagattgtctttgctctttttgagaaaatctcatgttgttactatgatataacgttgcagaagcatgaagacatacatcagttttttccttttttcttgagcgaaactaggaaggacaaaatacatttaaatgatcttataaggcactttactccatttatacctttttgtactctcgtttccctttcagttttgaatataatgactttgatgtttttttgctgtgcataacaggaaatatttgaaaacaacaggaaagacataactgtggccatgatgaagaattatccacagcttctacgtaaattcatggctgacaaagcaaaagtgtcatctttggtcgagattattatatttatgaaacttgagctctattctcttaaaagacaggagcaggtagctaaaatcattttgtttctcttaaaggatgccttttttcttgttatttacctttctcagtgaaagttacattttgtcccccgtgtcagagttttaaagctgccgtccgactcataaaggatgcttttttcaaacacggggagaaggaagcactaagatcttgcgtcaaggctataacattttgtgcgtcagaaagtaaaggggagcttcaagatttttcacgtgggaagcttaaagatcttgaagatgagcttttagataagatcacttctgcaattagagaagtcaaggtacactttacttcctttgccatctatcttcatactcatcttatggatgaaacgttacatctgttttctgtgcaggatggaaatgatgaatactccctcctagtaaatctgaaaaggttgtatgagcttcaattgtcaaagcctgtgcttgttgagagcatgttcgatgagattgctttgacgctccataatttcagaaatttggacgaagaggtgctaaaggaattagtttaaagcacttactatcttttttgtgtctctcacattttaatggaacagttgttcatggttgcttaggttatctgtttcctgcttctgaatatgcacatgtatttggcgtggtatctgcactccatcataaattgtgaagctatctctgaagcttccttatcttcccttatatcaaagcgtgataccctgtttgaggagctttcgtacttcctgaatggaattgaggaatcgaagaaatatggtaatcagctatcgaacagggtaaagactatttgacattccaatttaacttacacatttcattccgtatatgtgcttgttttatcaagcaatgagtcatgattatcctaaaaagtgaattctccaatgcttacagatctgtgctatactcgccgaaacatggtgtttgtttagaaagtcaaattatgactcgggtaaacttgaaagattaggatactgtcccgacagtgtctttcttgagaaattttggaaactctgtgcagaaatgtttaacacttcaggtgactctttgttttgcttttccacaaacccctgtcatttcttgattttccaaattacgtattatttatttctgccggactttgacacagatgagaccgatgaggaggatgaaaataaggaatacattgaagagacaaacagagatgtttcagtcattgctgcctgcaagttggttgctagtgatgtggttccaaaggtacttaccaagtgcattttacattgctgctattattatcttagtaatgttctgacacctatatagattgatgctcacatatcaatttgcttatatggattcttttctgttgcaggattatctaggaccagagatcatatcgcatcttggtatgcatggacctggtgtaacaggcatcataaagaatcttattacattcttaaggaaaaaagaagatgacatctctaatatctatctcgaatccttgaaacgggtaagcaagattttcagaagatgcaaagtttcgtagtccaagaaaattgctgacactatgtaattgggcaggcctatcaccggtattcaagtgaactttctagtggccgtgaagaatccagagtagataaatgtcttgaagagtggcgggagcttgcaggtgggctctcaggaatgtatatcggggctgcgcgcaacaaatacagattggagatattgagtgtggtgaaggaaggtgttgagtttgcttttagggacgccccaaagcaactgttgtttctggaagttgctatccttccatttgcaaccagactctcagtgtctgacatcattgacatgtaagactgatgactctctgagcaagtaggaagctctctgctaataaataactttatatatgctcttgtttgcttgctgaacagtaagaaggacgttcaggggcgtatagtgcatgttaatacagacgaagatcccagtggatggcgtccttgcttcaccttcttggaaaccttggaggagaaatgcttgaaaaacgaggatttacaaggtatgttatgtgcactcgcacaacatctgatttggtttaatcaaagccggtagatgagtatgatatgtctgcatgctttaagtcttgacttgtgatgatgcgtctgtcacagacgacaaggaagcagcaaatgtaagacgcaggggacggccaagaaaacgtccggaaacagagcgaaagagactgtttgatgagcaaagtggaagcgatgaggatgagtctattagtggcgggtcagacagagaagataagctcgacgaggacgctcctctaatcgagacaattagatcggctgccagacggaaagcgctcaagggtgaacggtccaagggacactgacgacgggtaaaacatttatcaatcgacataatttatgtgtttaaaagtttgtttctagttgatacagtcaaggaaaccaacaaaactgctctttgttatagaaatccatcatttcaagtttagacattaccatgaaatatctatcattagcagaacaaaattgaaggcatataatgaaaaaaagaaacaaacaaaacttgtgatattgattagatcaacttctacccgcaattctcatcaaaggagcaataacaccctgaatctctagaagagactgttgtatcctaatctcctgattaacctccctcttcaagttcctgagaagccctttaaactcgtttttacccttgatgtcttcagctctcgtctccaaaaccttcttcgtcaatcccatcaacaatcctgaatacctctgcacagtgcagtacctttgtaagaagcctagcagcattcccaactcgccttcctccatattcgacacgcacttcatcagcttcctcctcgccactaattcttccatcactgccacaacattggccggtttcttctcctccaacaccgagaccagagcttccttatgcctgaacttcttcaagagcttatcgtgtctcgtcagcttcaatcctttcttctccttgaccaagtaatcatctttggatggcttctcgctctgccctctctggaagtacctgaaatacgtaggcctcagtgcccttctcctactctcatccacatcgcttatcagactccagagattcaaacttttcttctgtcctccaacaacatctctcaccttcttcttaccggcaaacaccatgccattagaccctccgattacccgagtggaaccatcgggggaaaggccaagagacatgagaggagcaggaaacctcatagagtaagtcacctttgctctcccgtaatcgaagactttcatgtatccgtccaaagcaacgctcacaagtcgactctcagccgattccattctcgcaacgcggagagacgtgacggtcttgttgtgactctccatggagcaaaccatcttcccgcctccgatcaaatcccataccttgacgctgttgccaccagcggttgcgatcaatccaccggaaggcaggtatacgacgtcctccactgggagtccgtggttgatctcggcaatccaattggacgtgtggactctggcgtcccacaccttcaccgtgtgatcgtaagagcctgttaccaacattgaatcgttgacgggcgagcaatcaccgcagcggacataatccttgtggcctagcagatctgagatgactgttgctccggcgacatcccagtacttgacgactccatcgtcgcctccggagaccaagtggagcttgtcctgaactggatacttgacgaatcgagcgggggcgctgtgggagcggagagtacggagagccattcgttccttgatgtcgaagacctggaccacaccggagagatcgcatgccgcgaaaagagctccgtcggaacggaaacagacggaggagacaacatcgcggaaggagaaacggcgggaggaggaaagcgactgcgaggaaaagagggagacggtggcggagtgagcgacggccaaggagtgagggtggaccggagagaaagccaaagcggctacggaggagacgagattaggtgtggaatgatttttgaaggaggaccagtacctcgattccggagtctccgattcggaaacaggtttcgccgttgatttgggcttcacagggaaaacctttgacacttgatggtcattcagccgaacacgaagctcttcctccattattctagagtacaagcagagagctagcttgaagaagaacgcagctaacagagagagagaaggaggctggtttagggtttaagcagagaatggcgaagaagacatttgataagtaagtatccaaatgaagtttttgggcctcgtttattatgttattgggcctaccaatttgttggcatctgaagcccttacttaaccttcgtatttaacttggacaaactaaacgaatttatctcttctctcctttcctttcttcttctgatttttttagtttctcaatccttatttctctgaaaagaaaaaccgaattcctcgattcatccacaaggaaaggtgattcatcaatcttgtgcttaacacataatgcatgtggattgatttatatcaggcaaattggagaatgatcaagtaaggaagaagttttgtatactgaaagaaccacagagtacgaaactattcatcatgtatatccagaagtaatgcgcaaaagagcaacttacaatgttacaatcaaagacacatggatgctatacgccaacggagacatttctgcttcaatggtttgattccttgatgctatagggttcaaatcgaatccctggatgcatacaatccttcccaacaaaatatgctgcttgtatttattcatatctctctctctagtatcctattttcccataactcttttactcgcttcaggtcgttggaaatcatgtccatgctttaacatcattcctgcgacttgattaaccttatgctcctgtccatgcgttgctgcgtatactctaagcagaatacaaagcgtcttcttggaccggcttattttaaagctttccatttcagagaggacgttttccatctctttaaaacgcttttgagatccatacatgatcattaagccatggaacatagacctgctcattttccatccagcagagtttgcacgctgcacgaatttggcaagcttatcaaccgcattgcacctgaagtaactagccactattgatctcataataccatctgtctctatctggagtccttttgtaatagcctggtctatgaaattctccatggcatgtagattatcatccttagcatagacctgcatcaagagcaaatacaaccaaggcttgtaacttttcttggggataagtttggataaagtcttgatttttctgatcctatccttgtgacaactcctgtagtatgcgcaaatcatggactcgattaacttaatctcattcctgtcaacgtgacgcttgacggcttgatacatgtcctccatccgtagcagatttcccgagtttgcataccctctgagcatcagcaaataggtggcaagcgtaggcttaacaaggccgttcttcatggagtggaaagttgcttccatcttatcccaatcccaagcatagatgtacccagcaatcaagttgttgtaggtgctggaatcgggaaggatattgagttgttgaagctgtaggaatactgattccatccgctcaaccataatcaaacggccataaagagaaatgaggatgttgtaagtagagacagatggagtagaagaggagggtccgtcttgttgagaattgaagtcaaggaagagctgctcgcaatgatgagacaaaccgttgcagaggtaagcacccatcaaagcattgtagacggaggtggtcttgtttgcagactcgtgaaacaaggaaagggccaaatcgacattcttcagtctaccagaaatggtaatgcccttagcgtattcatcagcagtcataggcaacccatcgcatagtgccttgtttcttctccagtcgaacacctgcaaagcaacaacatcaaacatgacggaaaaaaggctttttcttttgtggttgtgaaattcgaagacaaaaaagatgtatgtataccagttgggacaaaacgggccatggacgtaactgcctaaggagctcaacaaacgcagctccttggattttgttcctctccaaaacggaggcaactttaccggaatcattacggaagcgcaacaattggtttttcaatcccgaagcatcatcatcgcccccggattggtggaagggagacctggagagggtaaagcagaatggggtcagagtcttcaaggttgaagaagagccacgggaaaggcagagcagatcagatatctgggaaatcagtgagattctccacatgcgcttcttcatggagactaggaggagcaattgagatgctctctctcaaagtcaagggtgatgattcggccctttcggttctatttgggccttttcgtcatttctcggcccatttgaaatgtccatttatttttgttggtttgaagtcaaacggtggaatatagaatttcttagaatacacacttaacacagattcttttcttcgcatgttccggcggccatcacgtgtagattagtaattgtgagcagcagagctatgataagactaagacacgtttggatttattagataatgcaattaggcttgttattaaatacgaaacagaaacatgagtaggtaagacctcttcaggatccaatcaagaattttaaatattatcatctctcaccagattaccactattgattgaatagtatgaaaatgaaacaaaaagtgaaaggaaagttctcgtgcaacttcgtggatgagactcaattaggttcatgacatgttttgaccgtttcaagtaaatcaagtaaataacacaatcaataatacacttaagagtatatatatatttaactaatgaccaaaatattactagtgggtcaatgagtgtaagaaacaaagagagagagagagagagtgttatgttatgtctttattgtcaattagtaattttcttcgaattagatgttgtttctccgtcgaatcgccgtcgtcttctttgtcttcacctctttctccgccgctcagaactccacgtgtcctctggacttttccgtccttgaaccgttccggcgtccgaaacccgatggcgccaccacctgccagtacctcctccaagggctacgcctcctctactctcaccatctccgtcagacgggttcctttctcccgccacctgagtctgctgcttcttgctgggctgctctccagtcttccgtcgccggtttcctccctcgctttgacgtccgatccacctgcggtttccagacgccgtggatttcgcaggggtgcatggacatcaccaccaggtctcaattcgaatcccttatccctaactcctccctcgccaccaccgccatgcgctgtaacacctctctcgagagcaataccccttgcgcctcctgcactcagagcctctccgcgtttcagccctatctctccggtccatccctcggtaatgtctccgactgtgcttcttttccctctatctacgccgctgctttcgccaattccttgggccccaccgacaaaggcaccgccaaatgcttgtttcagctcgatttggcttctcccactagctccggtgctaacaaagtcaaagttctagtttcttctttctctgttttgctcgtcgcctctgttctggttatcaccgcttggttctggtactgccggaggaagaaaagcaagcttctcaagcctcgggatactagtttagaagctggcacgcagtctagacttgattccatgagcgagagcaccactcttgtcaaattcagcttcgacgagatcaagaaagccaccaacaatttctcacgccacaacatcattggccggggaggttacgggaacgtcttcaagggcgccctgcccgacggcacccaggttgccttcaagaggttcaagaactgttctgctggaggggacgccaacttcgctcatgaggtcgaggtcatcgccagcatccgccacgtcaatctccttgccctcagaggctactgtactgcaaccacgccctatgaaggtcaccagaggatcattgtctgtgatcttgtcagtaacggtagccttcatgaccatctctttggcgacttggaggctcagcttgcctggcctcttaggcagaggatcgcccttggcatggccagaggactggcttatctacactacggcgcacaaccctccatcatccacagggatatcaaggccagcaacattctcttggacgagaggtttgaggccaaggttgcggatttcgggctggccaagttcaaccccgaaggaatgactcatatgagcacgcgggtcgcaggcactatgggatacgttgctccagagtacgcactgtacgggcaactgactgagaaaagcgacgtgtacagctttggggtggtgcttctagagcttctgagcaggagaaaggcgattgtgacagacgaggaggggcagcctgtgtcggtggcagactgggcgtggtcgctggtaagagaaggccagacattggatgtggtggaagacgggatgccagagaagggacccccagaggttctggagaagtatgtgctgatagcagtgctgtgctctcaccctcagctccacgcaaggccaacaatggatcaagtggtgaaaatgctggagagcaatgagttcactgttatagccatacctcaacggccaatccctctggtggcttgtagggaagagattgaccgctctgttagtagcagcagtggctcagggaagctcactagccccacgggatatcaggccttctcattcggaggtgatggcccctcagggaacacgaataccacttagatgagatatgtatgttgtagatattaatttagtgtgcattcatttcattctttgatgcttcttctgtcacttatgtaagtacagttgctttttccaataaactcatcttgttgtaacagctttggatgcaatattatacaggcttagaaatatatatatacacacatttcacattggtatcaaatgtcagaccacgacaaaagcttttgttggaaaaagacacgaaagatgcggaggtccatgaagatatccatgtgtgagtgtgcaacactttgattgatccgctccggtgatttctctgctaacgtcattaatcaactttgcaatgacattttggtgggtgggttatcttacattcttttcttttctttttactcaaatttttataaacaaaatctttctgaaagaagaaggaacgatcgagttacataagcaagatcgctgtatcaacagtcacgtcttttaatgttaacaagaaagataaaaaagacagatctgattcaaatggatctgcgtgagttttctgtttttcttggatgattaatgaatgattcacaagaatttcagaaaaaaaaactgagatcaaggttttgacaagaggccaaagacatcacgtgtctgtctctgtccaatccacgccagccactagcatgtgtgtgcgtattcagttttacttgtacatctttcttcttttttttttttaaatgtgaatttgcttagtgtatcttttagtatacacatagtggataagtagtttataaactcatttttgtttgaactcccccgagtgggctcaacgttgtcattagctatattctagtttaatggttatcatcagaaaatctgaaatcaaatttttggattgtaatccatggctgctcttggtaaaggacataaaacagctttcatctcttgaatggtaacaaaccccacaaaggatttcttgcctaaagggtcactcttacccataaaaagttttcacctttaattcttgtcctccgcttttccattttactcttcttgtatgtttctgtcttcttactcaacttttgcttcaggcttcgtctcttttgcaatttttgagttagccaagtgctcaagggagatacataatacctgaagatgtccaaggcaagtgatgccgtcagagaaccattggtggacaagaatatggctggatcaaaaccagaccagccgtggatggtttatctcagcacattcgttgcggtctgtggttcttttgcgttcggttcttgtgtaagtgattttagatttatggaaagtcactaactttgtttctggtctaaaaatgaacgttatactaaaacttggtttcgttgcaggcgggatactcttcacctgctcaggctgcaattaggaatgacctttcattgactatagctgaggtacataatccttctaggaaagattgttcatcacttattcattgaatgttgcttacctctagcttggattctgcagttttcactctttggttctttactaacttttggcgcaatgatcggtgctataacaagcgggcctatagctgatttagttggaagaaagggggtaaggaaatgtttgaaactttccatctattagttttctttgtgttgacaacacgtacttacttgtggtggatctgtatccaggcgatgagagtttcctctgcattttgtgtagtcgggtggctagcaatcatctttgccaaggtattactcaggatccaaaacagtggctatatatgctgctcttaaagtttttcctaatgtatctctctttttgtctcaatcaaagggagtagtggctctggaccttggaagactggcaacgggatatggaatgggagcattttcctatgtggtgagcccatcgagttaatacattttctgttcaacatctcgttatccagtgttaatgatacgtttggtgtgtaggtgccaatctttatagcagaaattgcacctaaaactttcagaggggctctaaccacactgaaccaggtaactaaagagcaacatgaagatcttttgtctcccttactactctgttaggggattgtgaaaagaagctaccgttttgtgccacagattctgatctgcactggagtgtcggtttccttcatcataggcacactagtgacgtggagagtcttggcattaataggtaattaaggaatttacgtggagagtctccatccatgtcagaatacttatgtgtgtaatgtggcttcaggaatcatcccatgcgctgcctccttccttggcctcttttttatccctgagtctccaagatggctggtaagaccacaataagcaccataaaagctttgacatgtatactttcttgtgaataattagtcgtacatgtgtttgtaggcaaaagtggggcgtgatacggagtttgaagctgcactgaggaagctccgtgggaagaaggctgatatttcggaggaggcagcagagatccaggttttgaactcttgcgattttcttcttctgaatctatgaaaccatctcatgatctgaaaacatatcactatcattcttgacaggattatatcgaaactctggaaaggctaccgaaagccaagatgctggatttgtttcagaggagatacatacgctctgttcttgtaacaacacccttgcaacataaatatcaatcttcttcttagtcacgtaacgttgcagattcaaattcatcaccaattgcatgattttgttggaacagatagctttcgggttgatggtgtttcagcagtttggaggaatcaacggaatatgtttctacacaagctcgatatttgagcaagcaggtaatacatagagagagattcttgaatgatacacctttattaacttgtatctaataatcagccatattattttgtgtcaggttttcccacaagacttgggatgataatatatgctgttcttcaggtatctactaatagcagcagtccaaattcaaaagattattcttaatctctctcttgttatgttcacaaaatatcaggtggtaatcactgcgcttaatgcaccgatagttgacagagccggaagaaaaccattgctactggtaaacaaaatgagccttgaaaagattttgacagggaacaaactaactccaaggagttgtggcaggtttctgcaacagggttagtgataggctgtttgatagcagcggtttctttctatctcaaggttcacgacatggcgcacgaagcagtcccagtcctggctgttgttggtataatggtaagcaaccaaattgaattgaatgatttgttagcaccaaaaaaactgagatgaaagagagcaggtgtacataggatcgttttcagcaggaatgggagcaatgccgtgggtggtcatgtctgaggtaaattccatccctgagggacaattacttgctgttgttgttgttacttgacaaattcaaatgttttgcagatatttcccataaacataaaaggagtagcaggaggcatggcgacgctggtgaactggtttggagcgtgggctgtttcttacactttcaacttcctcatgtcctggagctcttacggaactttcctcatttacgctgccatcaacgcgctggccattgtcttcgtcattgccatcgtgcctgagacaaaagggaagacattggagcagatccaagctatagtcaatccatagctcaaacacttcctagatgttcgtttctattagccagctgggacataaattgcaatcttggatctctttgcttttatgattctttactgagttcaattgttatcactctctctatttctaatctcttcttaatgaactttggacttcaatttgatgtttttccatagttcagctagcctctttcctcctatatatatcctcctatgtaacaaaagagagaaagcagatcactcatacaaaccaaaacattacctctacctctgagaaagagcgcagattcattcttgctttattatatcatattcattagtataatttcatcatattcatttgtattttgcctccgaaaataaagacatttatcaataaaatcatgttacaagtgtataacttgggaatgaagttatcttatctcgaggccgtatagaaacccgagtcatagttattgctaaggactatcttcaaagtcagagcttatccaacattgactattttaattaatacagtaagtgctaacgttttcaagaaagctaattaatctcattttgagaaactacaaacagaaaaaaaaacaagagtacagtagtacttactcactcatgaatactacaggtttcggttaaagaagccaccttgtctaattaacattaaaagcagaccaaaattaggatgtagaaaaaatggaaatctaggcaaaagtatatcagacttcacgttcaacacagagactagcacgattattaactatacacagatctcaaattgtgttaatcaaccaacagtcgaaaaaaaacctgtaacattttgtaatatatatgttgattgttcatgctttatagtagtgtgtcctccacgaggcctttgtgagagacgagttattattatacgtagtcgctgtaattctctgcagcttatgtgatcttatcggtcgctgctcctgctcgttgacgttgatcgatgtagcttttacaacatcgactttgactatgtgatggtccgaggttcctttggaagacaacacggaatacgaccctggcacgaaccggtacggtgaatcggaggaagcaagtatgtagtccacgcgtgtcccgtacttgcatgtcccctgcacacctgtaaaattaaaactctatcaatcaaaactctattgagggaggaaacagctagcaagcatgcggttgtttgacggtgctcactttggcctttggcgacaacaaccacagattcgcattctccagcaaagtccttagcgtcagtgtattctttgctctttaagaatctcatcacttgtgcttttggtattggcttacccatctcttcgtaatactatatagcagcgtacgttaataattacatatagaaaagctagctgttactagatcgattgataacttgtatatatatatatatatatgtgcattaatttgtttggataatgtaccttgacgatgtcggtccatctctcaggagaataatcggattcgtcgagagaattgagagcaccagcgagtatgtgcggtacgttggtggattggataatggcatcgacttgcttcattctccacttctcgtccaagtgatccagatgagtgcagtgaaactccacttccccgctcccgggaacctctatgctcgccttcaacacgttcctgtaaatcattcacatatagtaaaattaacctaattaattgtttgattgtcaaaatataatttctaacatatataaaaccacatgcacctacagtatataggtacctttcttataatcagaatgcttacaacatgcaagaacaacaaaaacttactaataccaccacctttttctatgtctgccaccaatttgataaaataaaataaaaaacatttaattattgtgaatttggtaggaaatttttattaaaaaaaaaacactagagttttcacaagaaccccatgagatatttatttatagagatactaataataattcaaagacaaaagtaagtacaatattgacgtttgaagctgtcgctaagaatatacagctgttatatatacatgtttgtgcgtatgtgtttgtatgtatatgtacacacatttgatgctctcacgagacgaccatgacgactaggttctcaattggtacaaagtcgccgcatccattttattgtttgattcctttaataaaaggaacatactgtatactatattgatcaaccacaatttgtatccttaagtttgagggttttagttggtaacactaattataaataagggtaataacttaaaacaagaaaaagaaaaacagacctgaaatcagtgtggtcgaagattcttagaacattggagcttttgatgggccacttagagagaatggcgttgccgtactccggcgcccagctctcggcgaagacgtaattcatccccagcgccgcagcgagatcggagagcggtctcatttggtcagcctcgtccgccttgacgtcttgaagagccagcacgtctgcgtctagctcactcagcacttccagagccgttctggtgctccggagaccgatctcgccgggcctgaggggagagtgctgtggatcctcccggaagctgagctggcggctgatctcgttgtcggggagattgatggagactctcctaggcctggatttggcaaacctctgttgctttctagagtcgtgagtaggagatgcggcggcgttcatgggcttgagaatgctcttggggcggtcaaccgtagacttggaccggaatggcaagcccttgttgctagggacggcgggagccatggagaacatagcagcgttaaaggtggccactgtgatggttttgtccgggtttgggtggatggcggctgccgatgaaaagccattttgatgatgatgagtctcaggagaagaatcaactgagaggtggtggtggttgacggagattctggctttccggggacggcggagacgacggcggaggaaagcaatgaggttcaacatactaaaaaaagggcgatcgcatttattaagtctaaaactagtaaaagtatatacttttgagttttgacaatgagagagagagatgatatagatttccttttatacgaagaaatgagagagagagagttgtggaatgtggagtttgctgcacaaaaaagaaggtcatatgagcttcttgggaaaatggtatttggcttacgtggcattatcaactcatcatcgatgttaataaatgtaccaaatccttttcttttttgtgtgtcttaattgtattttattactattattttagaaaagcccaccaatcatttggtttcagtcttttattttccaatacagaaatcatgaaatacagtatggtattctgtttttgttttgtttaggtaaatctcgaactaaaagtatacaattattatggacgttaaacaactacgaaggaataggtttatgaaccatcgtcagagaagagaaagggagcatattctataattaacgaaaaggaaattaacaactcccaaaaaaagttatagagattttatttttatatataggtttaatgcatggtatatatatagctagtgggtcaggcctatttgacatggacctcctcattaaaactaattagactatcaatttcaagcatatgtggaccaactgctctgtaatttaaaattagtaatatgttgtatctgtgtgattgtggtatttaaataaggaatttgatatcagtcacaatcacttttattattatatggaggaggaaagattgaataataatctatttaagaaaagaaagaaagaaaaaaaaaagtgtcaaaaagaaaagaacaaaaaaggatggaatcgagagagagcgttgcaagttaggtcaagtgttaattgttttgtatatgaaaaaggtaaggaaggatgacttatttagatatgggtaaagtctaatataatctcttagctggattttctaataatactaatactacaatacagttgccaaaacaactgcatgctgtttccatcctaccaaaacggcattacatactctgtcttttttcttcgtgtacttattttatccaaatcctttttctgccacattcccactcagatatatacatgttgttgtcttccaatgaatgatacttgtatattgatctataacaacttaacaaacacactagaaaacgactattttattatatttctcattcgtagagtactaattagtaattattatcgtttatgaggtcatagataatcaataatcaagggatgattatttaatattgggccacggcccacattcaattatactatgtgtgtttcggcccatcgtctcggatgtgtggctctgtctcctcttttcattttggctggtttagtcttttaggagattggacttctgaatgtggaatgcttctttgaacccatctctcatttctcctcttttcattatgtcgcaactacaataatcaactacaagctgattgaaaacaaaacaaatccctcagaatattccgctcagtatgtacaaatatgacaaagtgtttctttagtgtgagagactggttttggacctaagcatcatagtctagctttgtatactcgagcagcatgtgcggggatctatagatcttcacaagcgtccagtatagaacttcttctactccaagctcaccctctgctctagccgcgtacaagtcctcgcatatggctattaatctacattcaacagtgagtggtcataatctcttagaggttgagagtatcatggaacagcaaaactcttggacaatgtttacaaatgttacctgtcacacgaaggcaggttctcgtaaggtattctcatacgcaggtcagagcattgaagcctgatgaaacgccccaccgctagtacaaatgtgatatagagtccccatatactgaacttgctgagggtgtcacccagaaagccctctgcatattattttcggtatcaataatagaacatgagttatgaaataacacttgaattagaagagctaacttacgtggcggtgtttcctcagacattatgatagcaactggtccatccatcccctcgcaagcgctgatattttcagacgctttaagattatggaatgaccaccaccacttgaaatttgcatggttaatgagtatgtctgcactcacttcatccgtctgtagcaacaacattacaatattggaagtataagccaaaacaggaaacattgtctggaaaataactcttagcttgtgcagacaagatttacctgatcctcgaaagacctgacatcaccagaaccagtaacacggaagaactttgggtacaaattatgcactctaaatccatccatcgacccattgagaaccatttggatatcagagcgttttggaaggtccagagggtcgacacttctttcatatttcacagtctccttgcctttagggcggtctctgttaagaacccaagtaaaggtgatgtccatatctgtgtcccagtcaagggattgaataaatctggtcacaactgtgtcagggacaagccataaaacacttgcatcagcttgacagcatatcagctggatgtcatttttgttgtatgttggcaaaaagctttgagacccgagatctagcccgagatcaatgttatcccctgagattctctcgcatagggtcgtttggtacaaagtaagctttccaccaactgtttttaaatcaatctgaacgctcgcatcttttatcggattggcaatgtttgtcgggttaccactgctatacatctgcaaggataaagcagccattgccaacaaacaaatgactcaccaaatactcaaactgtaagacatcacagagaattgttggattaagctagcacataatttttctttctcctataaatacaagcatcatgagtactattcatcccaagaacgtattgataattcagattccaaatgaaaaactttacaaaagcattataaaagttgtgttgtaagaaaattattaccagcataggagcccagataacacataacaagatgaagaacagacatatcccattgcagcatttagtcattttcgtttgtttctccccatgtttatgtgttgctcgatttaaaactgtatcgcatttgacaaggtacaaactcgcatttacatcttccaactgcaaacgaacaaaacttaagcccttggcagtatgttcaaactaacatgaatgatccatgatcatagcaagggttccagaaagtaaatgcatgggatcagacgacataccttgagccagtcatacattgtcagtgatgtagctgtgcaagaccagtcaagcacacatctcagttcatacaggaaaggaagagcacggtaaagtctgtaaccatagtaattgatccgtgatacttcacttgtcaaaaactgccgatacaaggtgcttttatgaggtagtccatagcggatttgtatggcctggagagctagtgacattgctttggcaagaaatatgattctgagagccaagccagcagcgtgttgctgggtaggatatatgctccaagcatactctgtcactgcatatgtgaagagaataagactgaagagatagtataccacttttccagtcgcaaatgagcaaagatagatgacgcgatcaacaacaattaggaagaagataacctgccataaaagcatttcatcgggttagggcactgatacaaaacgggtgtgaacagataaactagacttatagaaatggattaccataagaataatgacaaagtcgaatggaaactggtcttctagctgatatacatcaataaactcgcttttatttttaatgactgattggtagaaaatggcaaccagaaagaagactatcaagtcagcaccaaaaatgtaggcgtagaggtctgtatctctctttcctccgccaattacagagagaatggggtaaggaaatccagttccttcaccaagtccactatgttgagctttacgaatttctttcgccacatccgaggctggagtaagtgatttgtaccattctgctgaagaacagccatttgtgggagaagcatactcaacctcgagaacaactaaggcctcgtttggggtttctgtacttctctctatactttgtacgtgaaccctgctagagtaagggcagagatcagggtttcccttctcgcatctctcattatggacaagcctaagcaactgattcattctacattcaactctttcaggctgaattccatcttcaggccacatgtgaacatccattgtcacctgaacaaagtacggaggggattctgctccacgtgtcagagatatccagtatcggtagatgcttctgatcaccaatttcgcactatctcttagcttcttaaacacatccaagattctctggctcaatctaattcttgtaagatccttctggctaccacgggcattccggcgcgaagtaaaatcagcagaaggaacccaatcaccatctttcactgttatagaactctgtatgagagtaaatatgtaaataaggaacagaggcaacgagctgacaacaaatgatgatttgattctttgcgttggaaatcccaattcatgaagaagaggtgcatcaatgcttaacccacagtgctggattataatctggtataaatactggagcaggatataaatttctgtgtacattagcatgatgacccagaagatgtgagtagggccagtgtgaacgcagagggcgtataggaacagtgctgctagatagaccatggaaagaagactgaaattccagagaaacgcaataatgaagcagcaatagcaaacaatatcgttattggactgcatcctagaccatatatgacgaaagatccttcctatctgaaaactagtgccatcactactcctgtcagattgtagagatgttgaccgttcgaaaggtgtgtgttttcttttctgactttccatttcatcatacacctcatcatcaacagaagactgctcatttgtatctgaattttccggcgagatgtttaagaaattcacaaggttatttactgcctgatttccaataaactgtacctgggaaacaccatcaccgatgagttgcaccgcagaaattaatggattctcctttccctcagacttttgctttctttcacgttccatagacatcacatcaagatcctgttgaacttcagttatctcacaaggagatgctccaaatgaatactctggagaatctagtgcttctggagtggtactcactggaaactcatgcgcttcaaaaggatactgtgaatcctcgtcaataggctgctcttctttcctgtggaccactccgtcaatctcaggactggctgcaccactatctggaattagatacggactcttcctccttcttagaccttcagtgcgcggagaagcaactccaaaattagaatcagaattcattctgtgaagctgtacacgtaggttcagcatttcagatttcatcttttccacctgcaaatttcgctgcctttttttttcctcagcctcacgaatttgttgcagttgctcggtcttccgtgctgctttcttctcttgctcccgcacaatagcaccgatttgctctgcttcaagataccgcgacacataatcaaactcctgggaggaaaacatgtaggactgaagagatactagcataaatatgatgatctcaacgagagcagatcttgcagtgattcgaaacccatagtcatacttgtaaaatccaatcacctcgtatatataatcaaccgtttcacattttccatcattgaagtttccaacaaatggagactgatatgcgagagaaaagatgatgagaacaaaattgtacacccgcaagaacctgaatattttgtttttcttcttcagtatttcaagtctcattcgggcaaaaacaagagcgaatgcaagataacccaggtgtagaatgtcatactcaagagttcctgtgattagaatcagaataagcacaacatccagcagatggacataacaatatagcctcaggtaatcaagcacagtccacatgctttttgtctcgaaggagagatctctccagacaaatgaattctttctttgagacttcatctgatgatatgtcgatgactcagagaaactggatatgtgatcagcccgaagtttgaaacaggcaagcatgaataccacaaaatagctaataagagtccgggggtcgtccactctcactcctgcaaaaataaatagaaaaagcttctccaaatagtacctaattcttggatctgtaaaataaagaattattgcacaaagaaaagtgcttcaaaaagtttgaacggtcataccaagccaacactcccggcaaaatttaaagtagagagctgcgatactccagcagtcatggcaatgcacactagtttcacttggagcctgatctgaaggcaaaaaactattccatgtggcaacatactcaattgcgagaattgatgcaaacagaaaaacaacaacaggccatagtttctgaattacacgtcttctcaagaggacacatgcagcaagcagtgcaatatataccatggagatggcattcagcaaagcaaaactcgcaagaagcagcgcaatcatgtttatctcaaggccatagagattaaacatattctctatccaaaacttcaagtaaattttcaacagattcttctgtgtttcgaacctctccttcttcaatgcaagaattctcctcctgttccacctgtgactctctttgatacttccccagaagtgaccaaatgaaaatttcctactactgccactttcagagcctccagtcttggggtgcaaaaaaccagctccctggttaccacggggagagaagaaaggccatgagttactcgttgcctcgccttgtttcattgatatagaagcatgatcagtcgaagatggattttcaccattagaactggaaacacttgcagtagtgtcttctgcagagacaaaaagtggacacggctcttcatattttcctttgataacagttaaaccagatgttctttctagccaacgaaatacattgtactgcagagtacaggctgcaacaaccagcacttttcctcgtagacctgattctataccccaaaatccaggttcatatactcgaagccccaagtagaaagacaactcagcatatttttgcccagggaacatctgagcttgcatcccccacaattggaaaagatactccgcagacaccagaaatccagtataaatcaagaatgatttggatggtattgaagaagactttgggaaggttgtgcagatgacaaggccaaggagatatacaaatccaaacacactaatcggagacaatgatgcataaaacaatgccgcgaacaagatcttctgaccatgccatgccaaaaatctctcaaaaaatccaaaaaccccaggatgaagcaaactagattgacctggaatgtagtgtccactctgcctcctttcatagctgtaaagttgcatcacgatcaacacagcaagagattcccagacattatccagcaatggggctttagagttgtaacccaaataaaagtagagatcaataaatccagataaccaaagctgcaagctgacaaagctacttaagcagtagataaacataaacaccaaaactgcatatgctttcaaagggaaccacaagcgtctcttagtttcttcaaacagttgtcttccagtaatccagagcaagagaaggaaaatatatccaaatgatacataattgggtttgaccaggtatacacttatgagaatagtgatgaaagcaatgtatgttccacacgatcggtacatagacagaaacttttgcccaattgcactcagaaatgaagcaatatgtctctctgtaaagaaataatggtgattcgtaagcataaaagaatatgaggaccaggaaataaaactgatatgtttgattaatggtgtggcaactgcattaaaggaaactaattggcatgcacgcaaaatgccagaaaaaatagctgacaatggaagcaaggatttggagttgaagtaaaaatctaagacggatatatgtcactcattcaaatgttcacttcaaagacaagaaggaagtgttgtaccgtaagtggtattatcctggctataacttgaagatggagacgaatagacagacaagaggactgatttgttgagaccagctttcaatatgctaaatccaattggagggcttggtgtatggcgtacaattgctgaaaaggaaaatagcacctcaaaaccatgattatggatagcacagaagcaagctagcaaggctatctccaagaagtcccaagagctttcagacctaaggagacctgcaaagattcatacagagagttgtcagtgagaactcttccctaatccttttttcccgcaaatccaagatcaccttgcagctaactttcaaagggaaatccgtgaatttatcctataacttgaaaaatacagaaagagaggcgtacctaactgaaatagaacttctctgctcgcagagccttcctgctttaaggagttcgacaccaggtcaatctcaagaatgtagagaagtgcaaaatgaacttcacatagtagaatcaaggacttgcgtatctttctgttgatgttgtggctcaacagatacataaggaagaatatcactgaaagaagtccattaagatacagtatcatgaacaatgtttttcacaaacacccagatacatgaatccttgttataaaagcaaatgggagggggataatcataccatatacggcatggaaaaacccaggtttcatagcaatgagaaaaatcagtgcaagcataatagcccgtgagcatttccgcaatccccaagcaatggtcgcgacgaccaacacctttgtttcttcatcagctgttattgatggtaatttcagtcgttaagaaaaaattgaataaatagcagaagattgaaatcgcaacctaaaactaagcccggaataaactaagcttgccaatataatagtaattttaagattttctccttcaaaatcacacagtacataacattttccatgatattctatatcaaaaatttctttaaaatatattttggatagcgtgataactctttaattgtctttagatggtttcagtcagaaaagatgataggttgatcgcgataaacaagtacacccattttctcaactttacagttccgacaaccctggaagttggaaaacatcagataacttgctttgcagaaccgaatatgaggcaattaccttcaacgtaagatctctcattggaagatctggagctctcttcagacaggtacagaaaaacagaattgtttacaagattacccaacgcgaccaacatccccaaaccaaactgtgcaagcaaaaagaatccaggtatagtataatgccaaagtcccaccatctcccaaatttgcatgtcctgtatatttaagacactagttgttaatttacatcttagttttcttaaagtagttgaagattttgcgcatcgagaatatattacctttccaaccttagtgttcagaaaagaaaaggccacattgaatatatacgtactgacagcccataagagtataaatacgagaagaaggccatttaatctgtgcaactggaacaatgacgggaaggcataaataatgtaaccaacatatgcaaggaggccaaaagcacacaagctcgcaaagtgaaaactccagaacgaaagagcaaatagagagacctggcaatcatgaacgcaaataaaaagagtgtgagtttctgacacattatgttgctttagctgacacatacactttaataccagggatacaaatatataccggaaaaccatatgtgaagaaattaatactgaaagtcttaaacacagctcccctcagtaaaacattggtgtgcctgacaccggccctgaaaatttggaaaaaattaacacattaagttgagtgtaactattatccatctacaatgctaatcttgtacagcccagccaagagaacatccattagaatgtgtgaactagttgtactctgtaagggagtactaatctttacccaaccccatagtttctattagcagagaaaccaatcacaactttgtgttcataaaactgtccagtgtttaggcttccacgtttggtagtgccgacccttgaacacaattctttgagcatattcaaccataaattaattaacataagtaagaaaaaattaaacagaaaaactaaaatttcccttgaaaaactgatatactatgttaaaaccacaacagctcccagtaggaagaaactaaacaaaaatctatatagaataccttgattctcgaataaaaaatgaatattttggaggaagaagccgctctgccaagttattttcactcgtggacatgataaagtccatatcctcgaggtctgaccttacataggatagctgcaatagcagaacgacaggcatgtcaagactgttacaggtataacatagtggtagctcgttaacagattaaggcgggtaagtcagttcacttgaaggaaaaactacactggctgttggtgttcataaccaactccccaaacacggtcaccacatattgacagttgttttgagaaacagttcatcaattatatggttcagtaatatagtttatcattttacacttgagtgagaccaagtaatactaatcctcgaaaaacaaaagacataccatgatgtagaacaacacaaggaaaagaccagaacaaatatcagggccttcagtttccagggagattctgaatagacctataaagcttgctatccaacgaatcatatcggaaaagtttattggtagttgatagaggtaaagcaggacaatgttgaatcctgcgtagatataaagaactctccaccaccttaaccagacaaaaaacgactagatttcagagaagcagggtttggaagtgctaactttgcgtaataatcaataatctatccacctgaaaagtcctgaaacattgcttgtcaaggaccagtccacaagaccggcacagcttccaataaaaaatggcaaagaaacccatgatggattgcagattcccactgccaattgaactgctggtaacaacaagcaggaggcaaccctaagatgacttcctgagtaataaaggaggagataacgtcaaaccaagaccagatgaacacatgatgagaaaacgttacagtaagtatttggacaagccgtatgggcctagtacattaattacaaacctaggtgttcgaaaattcctgagaagtgagaccaccatgtgtcccgccatctagcgaagccgaatctactactgtatatgtcagctaaagcaaccaatgatgttagtagttgtaaagccaggaaatacataacggtggggtttctccaagactttaatctgcagaagcaaagacgagagtatcaactaacaagtaaatatttgtaaggcaggaagatgaatgaaatgatgagagtactcttacatcataaagccaataactctcatccagccagtatctggtgtatcccagtcttgacctagagcagcccaaatgacaaggtagaccacttgagcaagaaatactgcaaaggaaaagatgaaaatgggccataatagccaatgcctcctctgaaaacggtatcctggcaaaataaagcaagaaccaaagtaagtttgagaaagtaaacatcagctaatcaaccgtaactgaaaaaagcgacgaaaactgagaataatagactctcttttttttttttctgtttctccaggctaatgtagatgttgggcataaactagatgaatcctttcacacctaaaccccaaatcaaagattccaagaaacatgtactacagcagaaacattggggtatttcttttgattagagggaaaacaggcttaccaatttcaggtgcaatatagtgaacgaggaggaaagctatcaaatcaagaaaggatatgacactccagttaataagtgcagctgtgagagaagagaaaaatatattaggaaaatagaagctcaagcgaaaaaagtacaagctacggtgtggtagagaatggagatagcaataacaagagatatgataccaatgttttgacataaaaacaccagggtcgtttaaactagtaaaacttaataaaggaaccttaatagagtaggtacaatgttaaggagtaaatgagtgaagctcaagatatcccatgagacaaagaggaggactctgttgattgaagaggactagcaaagtaaggatttttttattattattattgcaagcaagaagatagagaaagaaaccaacctgccagaagaagcgaaggcaacaagaagcccaccaaaaaactcgccattggaaacttttgtcttaacgatcaccatatcccaattctcatcgaattcaatagatcccctctctagctccgacctcaatttcttccaaaaggccaacgaaatcagcccgccggagactaaaacggaggataaaaatttccaattctcacgaattctagcaagttcccgaaaaggtagctgttgaagatgtgtgtgaatttgaaggtggattgcaaatttgagagaattggaaactggaaatccaaatccacaagcaaaaatcaaagaaagatcttttcttctcgcaataatcatcattttaataaattatatttagcgccgagaaatggctaaaccaatcaaaccgtcgtgggctcgagattcaattattgattgctggcttttaatttggaataccggagttcggttgagaattggaccggttcaataaagccaacaagtttcttcttccttatcgcgattattggaggagagaatgagttggtctctctgcagcacccatggggtctcctcttccatagctctcacttatggctttcgccatagaagaagatccaccttccgtattttcgccacctctgacggattagaacccaaggacgacccgccggaatctcctctcccttcctcatcctctgctctcggtaaagacttgaaaaaggtccgccttttttctatatcatttacgatttttctgttgaaaccataggaagacatgaaaatgaaaatgcaccatgttagattggtctctagtgcttgaacctgttgaaagagttgctcaagcttatgacttttcaattcaagcaggttgttaacaagactgctgcaacctttgcccctagagcttccaccgccagtaaaaaccctgctctccctggaactactctttacaaagtttttgaggttcaaggctatgcatcgatgttcctcggaggtgtcctttctttcaacctcctctttccctccagcgaacctgatttatggaggttgatgggcatgtggtccatttggatgttcagtatgtctccttctctactttcttctaactttatttattccaaggctgcatttttgcccctaatcctttactttctttccagctattccttctcttcgggcacgagactgtccaagtaaagagaaagaggctcttaactacctctttctcatcgtccccttgctcaatgttgctattcccttcttttggaaatcatttgctcttgtctggtctgctgacacggttgccttctttgctatgtatgcctggaaggtatgtcgaatggtaattattgaggggcgcttatatagttatatgtgcttgctcagattatttttttcactttttgcctcttacttcagcttggatggctggaaagaacagagtagggactactcgtgaatcatgatgggattagagcatgaagattctttgtcttttcttccttagaatggtacttcattcagcttatcgtgttaggtacgtgggtttaaggcaaatgaatgtgaacattgctctagaatgatatatgaactagccccttaaggaatatttcttgtaaatcttaaagttctgagatgaattattgttcaaaatacaagtgggagtacatatacgttttgttatcaagaatgcagctggtaaatttaaacaaagtaaaagaattgagtatatagataattcttgcatcccagtgtctgttggttcttctattcgacagagaaagcgagagaagaaggaggctcatgtgtttagttctaggctaagcctttcctcatcttctcgagtgtactttcgataaaagcatctgatttcttatttatatcatttagtaggggccccaggcgtctatgaggctgtggtggtttccctgcttcaggctgagtgatttgttgcttagggctgggctcacccagcatgctcttttccccgttctcctgtaacctcttctttgggccgttactaccattaactagtgtaatcattgtctctctctctgattctggacttgacgaggcaggggaattgttatcctccgagtcttctaattgcttgaaatgaatagtgatgtcagacattgatcccttcttgatcagtttgttcctctcaggcttatcttcattcatctctttgtctcctaatatccatagtttagccaccacaaatcgaaacagccgacggcaaatgccccgaggccgcagagagctgatgctgtcatcatcctctcttatgtgcattctctgtcaaaaagaagactgcagaaacagaaaggtatttttcttttctctccaggattattgtgcttgaggagtggttttggtgtatatgaagaaatgagtagtggtatatcgggtttgctttgattctacgcttttgttagatggggaaattgagccagtggaagctatgtgtcgttttatccaataaaagaagaagaaaaccagaatctctctgcttccttcttcatcctcttttactttaactgagaagcagtttcaggaatatttgtatcaatcaagtttcctcttttcttgattgaagctgaagatatttgaaattaatggcaagtggtggggcatatcctaaagatttttaatacaaatagtgaatcatgtaacaacagtagatgatgtagcataataccctaatcttcgttctataaaattgaccaaataaaaggaaagcaaaatgttaggaagaaacaagaaaaacccactaaactctcaagtgtacaaccaaaagactctgctttaaaaaaaaaaagtaaaggaaaaagaaagagcttccgtgtgtgacactttccaactcaactcactcctatctctggcgacgatgactcactatctgccactgactttgatgatgacaagagacgcagcctctggacacgcggcgggagatgcttggctggttttcttgacactggcggtgtccacggcaagaaaactccagtgccagcgtctagcctcttgggcgccggagctagcatcaccagaggagaaggggtgcctggtctccatagggtgggcggcggctggaccttaccggagtccggtttgagtttgaagaaggtgattgcgactcttttgttgggcgagggacacattacatgcctagccatatctgcactgttacccctcatcaccagcaacgacctgcgagattcattttctgattagaaagaaaactcggatacaatcaacatcgggggagtgtttccattacccttccttaagtgggagagtgagtgagcctctgaagttgccatcgttatcgaccccgagtctgtgcccaaacaccatggttgattcagacaagacaagagtggatatgggttgatccacgtgaggaggtttctgaaatggttgagagtgttcgtcctgaaaacaatcccaaaccttagctggaaggaaggatcgagagatggtgatctggattctggaaatggaagtgtaagtaagtacctcatcgaagaagttgatcacacagccatttggtcgtttgtattcaggaatcagacgccattgaagaagatggtcgataacactttggacaagggttgggataggttccactgcaaggacgggttataaattaggagatggtatgtatatgtctagaaatagcggaagcaccaagtccctgccttgttgtcattaccagagtgttcatccgtggtgttgccgaaaataggaactccaagctgaagaagctctcttttggttcccttggtgttcttgttgaacagaacgaaggtctcccctgcatttgagatgagagaaacttactctcgtgtgtaaggtttatgaaagaaaaaaagacggaattaaattcaaaggataaaatcacctgaaagttggtgattccgaccagcctctcggagctgattaatagaatccagaagcttggagagttgaggtcgagtgaagacatcttggtagagtttaaggcctttgacaacattggcctgcgagatagaggagcaaccacgcagtcttcttagtcatggaaacaattaatgaagcaaattcaatatccatcgggacgacgagattacacactaaggaatgagtaatgatgattgataggatctaataagcctttaaatatatatatatatatatatatgttgtttcagtagtacgtagttactaaacaatcaaacctcagatgtgttttttaaaagcaagtctgcagctttggtaaagaggatgatgaacttgccgtatgtcctctaacatgttccttggccgagaaacgcttggactgcttgaggagtgaggctcctcgtgattcacattcgtcctcgtgcttacaacagatggagagggtttcttcttcccgggatcctccatcagtgatgtcgctggagggagaatcatcgtcgtggtcgtcgtcgagatgatgatgaaagcctttagccaaatgttgttgtagctggagggtgacttgagagatggaatggtacttctgcatctggaggacagggatccagttgagcctgcggcgatgaagggctgccatgacagactcgtattgagcggatccgccggaggcctgcataaggtgagcgcagagagcatcgatgatggcgttggcggccgcaaactcgccgcgaaaccaagtgagcatggcgtccttggcggcggaatcggacaaaagaacaacgggagggtgaagaggaggagaagccggcgtttcagccatcagttaacgaaagaatgggatcggaggaggttttggggggtttaagggcttgaatgctttgttggatactaaaatttgtaataataaatgtttctttggttttggtttagccacaaaattaataatacaagtaaaaagctctaggcatggatgatgtttaaatataggtaggggggggggagggacaaactcaactcgactcgactccatcgtaattattgactaaaccataacttaaaaaaataaaattaagttggaggaaagtgaggagaacaagtccttcgatcgagtctgttgtggccatatcatttagctttcttcttcccacattgcccctcaggagaagagtcctctcgcttgccggaaaagacaaaaatctctttcttttctctactaggccgttttcgttcgtatcatccatccatccatccatggttacagagatgcatggtttggaactaattatctaccataactggccttgcctctctctatatatctttattattgtctcctaatctgctataatatgactgcctctctctctttcgtaattttcacggttccaaaacattttcctacgttttttttactcaattaaagaaagattcaagacctgttgcaatttttctacacctttttctaatcatccataaagtcgacttccctctacgttttccacgtgtaggtagtaaacttttcttttctcaatatataaaactcttttttttatgtatgaagagcacaatgagttcaccagataaataaataaagcgattttgattggtctctctgtcactgaggggtcattgatttgttcgtaatttttgtgcctgccttttgtaagggcattgacgatagatactgagtgaacgaacagacaaattatatatagactatacatttgttaattatagattaggatttatacaactcagagagtaattatataataaaatgatccagccactgtgagtaacgtgaggccttcttgagtcatcatgactcacctatcgtgccaccgtccagtgcctcgcttacaccatgtcgactacttgatttatcaaaccaaattattcccgattgctcataataaaatgtaggaaacaaaacattaatttgtctgcgtttgctaaattgtaaaatagtctaaacactaggcgtcctcgagtttttttcttccttttcaaaccagtttggtaacgtcagatttagttgacatatgaatgtagttttattacttaatttgaatttaaattgcataagggccaatcatgagattcgtcgtattcatttttgtttttaatttaaatatacgatcgattttgtctattgtgcatattatgcatctgctggagtcaaacttgactcttgatcgtcggaaagggacttctccatttatgtattataatggacgtaaacaaaaattgtgagttatcgacacaacttcagaaacacctctcatttatggtatattgtgaataaacgaataagttatccattggaaaaattaaatcagtagctagtagaaacatatatgaaaaaatatactgcgacagacagtatattaactgggaaaggagaaaaaccgagaaagaaaagaaattgtcaaaggaaatcaatcgtatttaattaagaaaaggaaatctcaactgaatctgcccttttttggttaagggggcttcagattaaaaaagagttatcgcttcataatgaatgaatgaatattcagtacaggtcacgacgtcatgttacgtacgactaaaaccgcccattttcagaatcagagccgatcggggtattgtttaataacggatttaacgatcgtgcatgtcatttcgttataattccaagctttctcatcattatcattttattatcatctttatcaacttaaacagactcttctttggcggcccattcacagcccatataatgattcttaagaaaagaaaccactcgctaccgatgtaacaacaaaattattaaaatgatcactagtattatagttttcattaaaacgacaaatccatgtccgtacttgtcaacacacaccacaaaacatatacatatatatcaatctctcaggccagaggattattcaaatcattaatttgtcgaaatccatcacttgaaagtcgggttagcacgagcaatggtggaagaggaactgagcttcatctttgccttctttatgtactcagagaactgatctgatgatctccggccactactacctacgtgagagataggcacatggtggtgaagatgatcatgacgtgtctgatctgtttcatcacttgtctcccacgcatcctccttcatcatatcaccgacattcgtcatcgcccttatcttcagcttcgctttctttatatactcggtgaacctctcgtccgttttgatcgtagtatccactcgagcgatcaccggttccacctttgtaatgggtttggctgccctaggcctagccgatgtctctgcaaatttgacgcgaacagcctctgctggtgaagatttggtggagatgcgacgaacggttcggacaggactagtcactgctctgaagatcttctcgcacactctgttttcttgcttcttcttgctactactctgtgatgatgagttctttgccatggatgtcaccttgggaagtactaaaggtgatctgtgcagagaagatagtgacattaacgagctttttataatgcaaaatctatgtgattttatctttgttaattgcagaataacgtgtttcaacatgcaacaagcgaagaaattacaacttgttgaaaagaggaaagttggaaacttttacaagtttttcaaaaaaggaagagtgatgttagaaagggatcggattctgattccactatgttttctttctttctttcttcttcgttgtttttgtttcggattgttacgttcctgtcaggatttgagaatcatgcatcagctgtcactcctctcaggagggggagattatatctacttgtaacatactaatcttccaataaataagcacttcacatattattaaaatacagtagattctcataattaggccattttccataagcttttgtttacttatttcaatccactagtatgcttttcacattattcttttcctgcaatttagcatgaatcatgtatgcaatttagcatgaatcatatatatgaaacgggggtttactaaaactctatacataaatttctaaaactctaacccactccaacccggttttttctgttcgggtatcgggtccggtttttttttcgcaggccctaattaagacattcaagaaaacaagaagaagcataagaagaggcctaaatgcccagagaattaaacaaatgggcctttaacaatattttaaacaacactgaacaatagatgagatctcaacttcgaaaagctaaagccttaatataaaaccaaacatcaatctctcgccgttaaggttacatctgtcgccgccgctgagaccgccacttaaggccgtctcctccgctctatccatatccaaaacagctataaagataaacttccagagcttggtgaaggagcagcaaccctagttttcaatccctaaaggtgaagtttttgttcttctttttctttgattctactcttttttcgtcacaatagcgcagtagcgatctgggttggcgtttttattgacggattttggtgggtttgggttcgtgttagattttactttcacagattcaggtatgtatttgatcttatttagctttggtaatactcaaaccaactagtatttgatcttaattaggtgacgttgatattttgtgtgttgtgggtcaatcatccactctaggttgatctgcgtctatgtttagtcctaattttgaagaatcattctaattgctgatgtttatttatgacaattttatgtcttacttcgaatttagctaagataataaatctagacgagtgcctttataaacagtttatgtatgaacaatgcttcgcttgtgggattgttgatttcactacatttgattaagaatgtacatactattacaaatgttatcgattaaaaacgtcattttcagatattagttctccagcgagttgacacaaaacccgattacgtttcatccggcgactcgctttgatattccatggattctcagttgaatccttccaagagacgcaagataaggttcgcgtctctcatcttttccccagttttttttcttattcgaatcacttaaggcttgagaaattagtggttagggtgtgtaaattgcgtttgatatagtgtcaggcacagatgcgttgcgtgctataagatgttcaatagacgagaacacctcgttgagcacatgaagatttcctaccactcacttcaccagcctcgctgtggggtttgcctcaagcactgtaaatccttcgaatccgtgagggaacaccttaacggtatgtttgtatttgtattcgttttccaccacacatcgtatgaatatggtggttgttgatgtttgtttgattccgtctttccaactatttcagttccagaccatctttccaaaggaaactgcaaagccattttcactaaacgaggctgtactctctgtcttcaaatctttgaggaggcctttgctctcgccgagcataaaaacaagtgtcacctctccccacctcgtcctcttgtaagttttgttgggaattatttagataatgtggactatatatgctctgccgcctccaatattcccgagtctattctttctgattattgaaatatcagcagttttccccttaaatgatctgattagtgctttattcatatcagggaacatctacccaaaggaatccttctagttcacttgctggttcacgtctcaaggctatggcacttgactgtgaaatggttggtggtggtgctgatgggactattgatcagtgcgcatcggtttgcctggttgacgatgacgagaatgtgatcttctccactcacgttcaaccactgctccctgtcaccgattacaggttctgcttgtggaccatttgtgcttgttttgttttataattcttccttttaaatctcaccccgcctcatgttcaggcacgagataactggattgactaaggaagatttgaaggatggtatgccacttgagcatgtacgagagagagttttttcgttcttgtgcggtggacagaatgatggggctggaaggcttcttcttgttggtcatgaccttaggcatgatatgagttgcttgaagcttgaataccctagccatttgttgaggtaactaactgacccgtttttgttgactctttgcttgaaatctaatgtaattgctatgcttcacctcagagacacagcaaaatacgtgccgttgatgaagacaaatcttgtaagccaatcgctcaagtacctcacaaagtcatatctcgggtaagttatgcttgggctttgatttgttgacattggattatgaaaacttggaacatgagatagaaactggttttgtttgtatgtgtagatacaagatccagtgcgggaagcacgaggtttacgaggactgtgtatctgcgatgagactgtacaagagaatgcgggatcaagagcatgtttgtagtggaaaggcagaagggaatggtctgaactcgcggaaacagagcgatctagagaagatgaatgcggaagagctgtaccaaaaatcaacgtcagagtaccggtgctggtgccttgaccgactcagcaatccatgaaatgaaatcccaatttctcttttaaaagaaagctccttctcttcctcccttaagtctctttttgttcgatgggaggattaagaagacttgttaagagcttttccggctagtttttggataatcaaatatgatatggcttcattcaacaacaactctccctttgggaactcgtataaaaagttactacttaagcttcaaatctgtgtaactaaaatggataaagtctgatgcatctgaggtcttggaatctgttgctcatagttgtggataccagcaacatcaaacattattacttgtttaccaaacccactctcagcttccatttcatcagtttgaagtcaagtggataaaaagactgtctacataactcaaatactgtagtattatattcacatataaatgagaaattgacatttcctctagaaaaagaaaagcaatcgtgtgagaagaaacaagtaaaaggctgaggaagaagacgactattagtccccgtcgaacttgtttctcccggtcgtccaacaaatggctccgtcggagttccaaccgagtctctgggaatcggttacgtcgctgattaggtcagcccaggagaagaacgtggatccgcttcattgggctcttcagcttcgcttgaccctcgcgtctgctggaatctcccttccctctccggacctcgctcaattcctcgtcacccacatcttctgggaaaatcactctcctctttcatggaagcttctcgaaaaagctatatccgtcaatattgtccctcccctacttgtcctcgcccttctctccccaaggtaacaatgagtcgtccgtctactaattgctcttctaatggttctcatcatttatgctacttgttgaaatattcccctcaagctgtctgtaataggctcattgccgttgggttatcacttttctttttctttttatcaccaggctcatgtacaagatcactacagtttttaattctttatggtttggtaattttagggtaatcccaaacagaaagcttcatcccgcagcctataggctctatatggaactcctcaagagacatgcattctcattcatgcctctaatcagagcaccaggatatcacaagtgagttccttatctcagttaaaccttgttttctccaaaaaagttatttatttttggcagtgtaataagatattaatgtaaaagtttttacatgcgtaatcataatgctaatttttcttctcctagtttgtaaaatgcatactaatgttgttgttacaaatgaacagaacaatgaattccatcgatgatatcctccatctttctgaaacctttggtgtccaagatcaagaaccgggaagtattctccttgcatttgtcttctccattgtctgggagctacttgatgcatccctagacgaggaagggcttttagaactgacatctaataagagatctaaatggccaagcagcccacacgacatggatttagacgggctggaaaattctgtgaagagaaatgaaaaccatgatgcactagagaaagcaaacactgaaatggctatcgagctaatccaagaatttttgcagaataaagtcacatcgaggattcttcatttggcaagtcaaaacatgtaagaccttttaactagcaccccttatttttctctagttgtctgatttttttcattgtagacactgctggccccatgagcttgatttcttgcaaatgaatttaaattgtaacaatttcttcagattaatttctcaaccaagccctctaagtttcctttctcttcagggcaacacactgggaagatttcagtcagcgctttagagtactggcaaccaaatcaatgacagtgaggaaatcaaaacatattaatccagaagccctaacacagctggcatatcatacacgaaaatttcttgaaagggagagcaagaccatccctcgaggagaatttcatgcgattgtctcctctggttctaagttagcattgaccagtgattctgcactttggttgcccattgatcttttcttcgaagacataatggatgggacacaagctgcagcagctagcgctgttgaaaatctaaccggttagaagatttatctctatttttcgttcgtgcatttcttctctcgtactcatctacatatttattattatgggctttattttcaacacaagcaaacaattgcaggtcttgtaaaagcattgcaagcagctaatagtacatcatggcatgatgcctttctagctctatggttagcagccttacgccttgtgcaaagggtaggtatctattccgacaatactaagaattttaagctcttagcggtagggtaggttgttctggtcttggtgcttttaggagaatctatgtctgcgttattgctttttcatgcatatgttggaaatattatctgaagtaagtactaacatgtgtgaggcacccacttctgttgcacatataaacttatgcatgattcataattagaaggtcatattatgagaacgtcgagcgttatgaatattttaaatttctgagtcacatacttctttaagtctactgacaaatatatgttgtaatttgaaggaaagagatccaatcgagggtcctgtgccccgcaccgacacttttctttgtgtattactttctgtcactccacttgcagttgccaatattatcgaagaagaagaaagtcagtggattgatcaaacttcgtctagtccaagcaaccagtggaaagagaaaaaaggaaaatgtcgacaaggattaattaatagcttacaacaacttggtgattatgaaagcttgttgacaccacctcgttctgtacagtccgttgccaatcaagctgctgctaaagcaattatgttcatctccggcattacaaatagtaatggatcctatgaaaatacaagcatgagcgaatctgcaagtggctgctgtaagtaaacttgctatttattttttgctctttcaatgttaaactgatccagcattctggttttgaattttgatcaagagtgcggttttccttgtttactctaaagatgtttgttgttatgggtgtgtatctgctctggttttatttgtggttgtgacggcttagggttcttcattgtagatgtttgttagttttctctctagtgccatgctattttgcttgttcttcctcgtcattttagactattaactgtgtatttgaatgtgactggttttgtaattgtgacatgtgttggcacagctggtaacatgcgccatctgatagtggaagcttgtatctccagaaatctgttggacacatctgcatatctctggccaggctttgtaattgggggaaccaatcaagttcctcaagttatacccagtaacatttcttgttggtctctagtgatgaagggttctcctctaacaccgtcattgacaaattcactaatcacaactccagcttctaggtatgttacatctatgatcgatctctgtttatgtttctctttaggacattagtttaaacggggcattgatagaaaaaatacaatatttcaagtttgcatgtttaaattaaaatagcaatttcaattactagagcctgttttttagttgactattgtctatttccaagactctgtaagtggagttctccgtttttttaaccttcccagctgtaaagcaactgaattaagctcattaatgttatggaagcttagcagagattgaaaagatgtacgaggttgcaactactggttcagaagatgagaagatagccgtggcttctattctctgtggagcatctctgtttcgtggttggagcatacaggtatgtttggcacttagattcaacttctgtgatcttctttttctagaaagttttattgctcccattgctccacctcagatcttctttctgcagcctcctcatctcttatggttaacccgatctctgattaatatcaggagcatgttattatcttcattgtaactttactttcgcctccggctccagctgatctttctgggagttatagccatctaatcaattctgcgccgtttcttaatgttcttcttgtcgggatatcacccatagattgtgttcacattttctcattgcacggggtggtaggttttacttttcctcttcaacttgtgttatttgacaatgaacgaagaatgttctgttttcaatgggttagtatttatgcttcttttgccaggtcccattacttgctggtgctttgatgccaatatgtgaagcgtttggctccggcgttccaaacattacgtggactctcccgactggcgaattaatctcctctcatgctgttttctccactgcatttacacttcttctgaggctatggagatttgatcacccaccactagattacgtcttgggagatgttcccccggtgggccctcaacccagccctgagtatctgttgttagtaagaaattgccgtctggaatgttttggaaagtccccaaaggatcgcatggcacgtcgaagattttcgaaagtgatagatatctctgtggatcccatcttcatggattcattccccagactgaaacagtggtaccggcagcatcaggaatgtatggcttcaattctctctgaactaaagacaggaagcccagtgcatcacattgtcgattccctccttagcatgatgttcaagaaggcaaacaaaggtggtagtcagtcactgaccccatcttcagggagcagtagtttatctacttctggaggtgatgactcgtctgatcaactcaagttacctgcatgggatatcttggaagcggcmccgtttgtgcttgatgctgctctaactgcttgtgctcatggatcactctctccccgggaactagcaacaggtttgtccattccctgaaactatagaaagtgttatctgcttaatgacaaggggatacttacctacatctgacgatcataagctattttattgtcttactgtctggatgcatcataaacgctacttcagaaggtagctaatagttgggtgggcgagatcttaatctgtcccttgatttgtttcaggtcttaaaatcttggctgattttctgccggcaacacttggaaccatggttagctacttttcttcggaagtaacacgaggtctgtggaagcccgtttccatgaacggaactgactggcctagtcctgctgcaaatttagcaagcgttgagcaacagatagagaagatcttagcagctactggcgttgacgtaccaaggcttccagcaggtaatgcttttcttctctaaggataatggatattctcaggtgtccaggggttttgtcatgaaagattagaaccttagatgcagtcatggcagtcccggataacatgtccctggagggtcttgcttagatttgtaaacaattgtgatatctataaaactgaaactgcggagaaagtgtgaaaagaacatgctggaagaaacgaatacaatgattatgctgaaaaaactctcatagtttacacacgtctgtctttgcagatggaatctctgcggctacacttcccttgcctctcgctgcactagtgagccttactataacctacaagctt

SEQ ID NO: 391 - DNA, 58448 bp, Arabidopsis thaliana
aagctttaatggcggaaaaatccaaatttcctcgaaagaagtataacctgattcgcagagattgtgaagattggagtcatgggtatattaagttacgccgtcgccggcggtggatttgcagtaatcggcgcgtgggagtcactggactcatcgaacctggatccgaattcatcttctggtactgctgattcatcttcccctatggctcagatcagagcttcgccgccaaaatctgttggatcatcttccatccccgtagctttgctttcgtctctgtttattgcgaactcgtttttctccttcttcagctcaatcggatctcgcgatcgggtcgggtcaatgatccagttacagatcgtggcagtggcagtactattcctatattacgccattctaacatatctggtcaactccaaaaacgctgtctttgttgcacttccgtcttcgattacaactttattgcttctctttggcttcattgaggagttcttaatgttctacctgcaaaagaaagatgtttctggaatcgagaatcgttattacgatctcatgctcgtgcccattgccatctgcgtcttctccacggtttttgagctcaaatccgactctagcacgcatcggtttgcgaaattaggtcgtgggatcggtctgattctgcaaggaacatggtttctgcaaatgggtgtatcgttttttaccggtttgatcactaataactgtacgtttcacgagaagagcagaggcaatttcacgatcaagtgcaaaggacacggtgattatcaccgagcaaaagctatagctactcttcaatttaactgtcatttggctctaatggtagttgtggctactggtttgttctctgtcattgctaacaagaatggttatctccgtcaagatcattctaaatatcgacctctcggagctgagttggagaatttaagtactttcacacttgactctgatgaagaagacgaggttcgagaagagagcaacgtagctaaagaagttggtctcaatggaaacagctcacatgattaaaggtataaatcaaagtttcagacttttttttttttgtctgttttgaatctgtccattttagaaatgttgttggtcaatgggaggattaatgatgatatgtaatcaaacacacgagataataataatgttgaatcttttgcatttgatattataagatactgtttcttatgaataaaaatcttacagttgtctatctcttttggtttgctagttagttctaaagctactactacagttagatcattcgtggaatcttatggcaaacggttatctaagtcgactgtgtcaaaggaatcaaagtttttcttctttcatttaggggcttcttctttttcatcgccttgatcactgctactcttgaaaaacttgcatagaaatatgtagactacaaagcttattgtacttgtaagagcaagaagccagtagtatttgtcaagccgagcttccgacatatcatctgcaaaccagttttgtcggtcacctgttgagctcgagtaagcctcgacaattgagatcagtgcggcgctcacaaagcttccaacaccaaaaacacttgtgtagagagcaaatcccattgttctcattcttacaggaacctcactgtagaaaaactcttgcatcccaacgactgtgaatatatctgagattcccaagaggatgtactgaggcagcagccagaagatgctcagtgggacggtttctggatcataatcaggtaaagtcttcatcttttggcttatggctagtcttttcctttcgactattgccgcaataacaatggcaatgatggatagaaacattccgactcccattctctccatcacagagatacctgtaccgtttttcttgattctcttggtaataggtatcaaaatcttatcatataatggcataagcaggatgattgataatgtgatcgtgctttgcagggttgcaggtgggattttgaagttggacccaatgtttctcttcatagtcacaccttgtttggtgaaaaaggttgctggtagctggaagataaccgcgaacatgagaagcatcatccatatggggaaaaggcgaatcactaacttaacattatcaattccagagaaaaccgttttcgagctctcgtcatcttccaatcctttggaggttgttgaaggagtctcaatgtcttcggtctcacatttacagagaggcctctcctctagcctacataaacaggtaatcattagtcgctaaaaaacttaaaagactaattagtttcatgagatatcgtggtttttccgaacttactcaagctccatagcatccaaatctttctcatctgcaagtgtatatatgcttctctgcttcactactctccctttaatgaatttaagaatcttctcaaaaggtgtagtagttgttttcttcttcagacgggcgcccggagcataaacataaattccacaacccgacatgaacaccaaaatcgacaggaatatcacgataccaggaatggcgaaaccgagaacccaaccaaaagtgtcttgaatataagccatgactgtgacacccataaggctgccggtgcagacgccaaagtaccacaattggaaaaactgagtctttcgggtagctttcgcgtccttttgatcacccgaggaaagatcgaaattcttatcgaggtcgtggtcgagttggtctgcaccaaaggcttgaagagaagggtttaagacgcctaaaccgattgagacaagacatagtgaagagtagagaaagtaagaagagatagtcttagtagctgaacgtgacccagcaaatgccgtccatgtcaatcccactagtcccttcaaagaaaaaacagaaataatatattaaaaactactaacaaaagaagattttcgagtttccactaagctagctttttcgcctataagatccgataagacccattataagcactatatcaacattctaatcaaaattccattatcaacccaactattaaagggatccatataaactccattagtggtaaaagaaaatttctaatcggacggtgaccaagtatctaatttcttaaagactctttaagatggtctacttgatctattccttaactcggaaaatgacccaacacctaacttataacttccttagatatatcgtctaaaccagtttttcttgcacaagttaatacccattatcagtttatcacttaatgactgcttaatcaagcatatacatagacatctaatagaaggccaaaacattatcaaaatataaccaattctattaacaacgcgattataaaataagataaataaaagcaacattccctcaccgcctgaccgttattgtctgacggtggaggagagtttcagcacttagttaacacttgattctacttaccacaaagtagacggaagaagaagcaaggatggtgaagaatctgtcccaataagtatcagccaaaggagcagagaagagaggcaacatagaagtgaaaccagcccaagtgttaacagttttggctgctcttgaattactcatcttcactacatctgttagatatgtcactaagtttgatgcaactcctttgaatgcatatctctccattcccgcaatcactatacacacagaaaaacaaaagttcaatctttagtttcagtgaagttttgaatctttgaaacaaacgaacaaaaagaagagaggaaatcatttacctatgagaagggcacatgacttgctaagtcctcttgtcttctgttctaaatccattagaaactgtctttatgtgtttattgtctatgtgtgtagagagaagaggggagagaaattatttggttatttatatgtaagagagtggagatcaaggtgattgttgatgatttgtgagattggttttttcgtatttataaaggtttaaaatcttctgagtaacaaaaaaaaaaagttgaaaatcgttagcttttcggtgttatgagaattaacttccactaatggcagagattaatttccatatttggaattctatatctttgtctccacacctatgtgggtggatttatgtatttattaaatagtttttccttcttttcttaccatgcttcttctgtttcttcaaaagatgtgttttccaattttatacgaattaaactaaaactgtatatagccaaatatacacttcaaattgatttttattctcttcgtttgtaaaatacggatgagttaaaaagtgaaaattaaacatttaacgaagaaaggtacaagctagtaaaagttttttttaccaaatgatggagttttatgtaggtggaaaaaaacactcattgtagatgtcaaccaaaataaactaactaattgaattcttaaagaaatatgtgaattggaaagtttcatgaaaatggtttaaatgaaacctggtttaagtagattaggaaattcaataggtttgtatgcaccctagtttgaattatatctttaataaccgttgcgcaaaccatttttttttgcagatttgttctattataattaaacactattaagtctattatatatctcttaccctttagtttttttataggtcaacacccttttaattaaattgaggtttaacgtattttacaaaagaaagaaaaagaggaaattttttataaatatgtcgataaaatgcaaaatcatgcagtatatatcactaaaatggaccatctagctcttagctttctatctgttagctacattgaattcatccttcacccttgtacaatatgaaaaagaaataactataattaaagttatatgttcctttcatttacatttggcgtatttgatactcttttatatacataattttcgcattcccttttttgcgattctttttccttatacaaggttgttcttttgtttctttgtttctaatttctctatttttcctaaacgttttgttcttggtaaaaaaagaaaaaatcatttgattatcaaaatattgatgtgagctcatttcgtgataagtgtttagtctatattttaacttaatttatttttggtttgttagaattccacatcaaaaaatacaaaaagtctaaagtaatatattaatgatagatcaactcatttagtagcaattagtatcgaattgaaaagctcatgaaagttaatatgattacaaaaaatgatagttctatttcgataaatttcattagaattgttttttaaagaaaattcaagcaaacttaaatttcaatttagtaggtatcatgtacgaagaggttacatacaatacaagtaagtatgtcgtcatgtagatctcacgtggcatacgttttgcgaatagcgaatacgtgaacaaaacacgttttctctatacgtgccaggcgtcgcatataaaaacggatgcatattaacacttgtaggtggttctgtaattaaggaattatagataaattttttttttttaaactgttctatagttgtaaaactgactgtagtggaacgttatagtattcaattcttacgatttagttccttaaattcaaagtgttcgtgacacaaaaaacaaaaatccattaaaagtgtgctatcattttttgaacaacctttttttgcctcattgaccgactttggggattaaggtctttttcttttgaatatttaaatttaatctttctttttttgtcgaaaggtttttaaatttatctaaaattcttctttgaaaaaaacatttttcttttttataaaaaacaattgtgaaagaaacacctatatacaaacttatgcaacgtgggtggtggtgccattatagggtggatttaagagaggaatgagataagatcgaattgtttagagcaaaagtattaccgagacttgctcttcagtgagccattattcgaatctttgatgcaaatatatccatcgaagctttaggttggccttaaaccgatgttcctcaatatccaaggagttaccaaaccaggactcattttctttttcctctcatacctcgattgtttgaaatttattatcaaagaggcttatcattgttggattagatctgcatttttccagtcacgaaaaaatatatatatatatatatatattttttaaaaaaaacttaatatattaggccaaatctgcagagagtacggagaaaatgagaaggtagaaattataaactgagcagagatttgaaaaattaagagagataaagatttattactttctgactatcaaagtattaactctataaatagaaaagtaggaaataattaagagagtaaaagataagatggtctcagaaccatatagtttccggaatatttggcgatttacagaaagacttaaaatacctaagatgaaattacaattaactactaaagacgatatacagtagagattaatttatggtaattaaatgttcatgcggattataaattataagaatccaataatggtttaaaaaaggaaaaaggatgataaaatcaactttggagaaaagtggagtttattaagtgagtgagtgccacaacgtagacttgcaccaaattttttaaaagggaacagcttccgtgcatcaaccttctctctcgctctgatatatactgccacgtgtctcacgttcttttccacgtcgataaatacacgtcatttcctatggatgctttaattttcttttattcggttactggcagcaaaatttattttatcttttttctttttcttttttggaaaatactttattctttaacgttttaacacaaattgatacgtatttttttatgtggtccaataatgctgaccacaaatagaaaagtgaagatcattcatggtccaacaaaaattatattttattataaattttatttcatttgacatcagtcaattttcaccgttataatattataaagttatttagtgtgttaggaaaaagtaactatttaagttgattaaaattttggttttatatttgttttctgtttttatatccaacacaaattaagttgaatgtcatgttaaatattcaatattaaattttagaatttaaagggttccattgttgagaacttgagagcaacacgtgctaacgtttgctaagcacgtgaactgcgaaagctattgttgaatacattcgtgtgtaaagtaaatatgattatatgaacgttagaatgttatattgggaaattatttatcacttgtttgtagacaacatgatcacgtactacctggaaaacaataatgaagttatgatgtagatgttgacatttttttgttttgtaaaaaaggatatactgtattttggagatgttgagttttttcttgtaacgaaaatattcaagacactctctgcatgtagttttatttcaagtaacttggtatataatatagaccttttagtttcttttaaattctttgtccaacaaaaaaagtttctttaaaattctttgtacccccacgctatggtggtttagtgagatggaaatcattttggtctacaaagtagaatgggaacagagataacactgtacgtgttttgtctgtccttatgagaaattataactatcaaatctagtatttcctgtcttcctgataaagataataatcatataatatttggctatttgcgtgcctgatcctttatctacatggtacgtaaactagcacttaacgaacacatgttggtttcatacgatctagttaattaaggtgactacatgcacttacacaaaacttgaatttaagtatttttatactagtgtcatagaaatatctgtattagtttggtggtacaaagttaacattaaatatgttaatgcttggctattcacgaacattttaagattatatcgtattattcttttggtgactttctacattacattatagtattgactgtttgactccaagtgagtatttaaatatgaccaaaatatccatacgttagaaagttatacttttgtttaatttctttgtttaccatataattttgactcttatattagtaacagttatgtttcttcagttattatatatatgaacaatgatataaagaattcagttttttttttgtcaaacaaagatcttcattcattaaaatctcaaaagagacaagttcatacacaatgaaaataagaaattacaggaaaataaggatagaagcttcatgagttttctaatgattgaaaaatctgttgaggccttggcagattcgaccatgaaggcgggcttcgcgaaatcctcgaccatcttgtggtcaaaagaagctcttgcaaacaatgcatccgagcttttgaagaagtgctccgttgaggaggctgacgggttaacgaggttgagaaaaagacggtaaccacttcttgaagacatggtcataatgccgtactttttcaacatgtcaagagattgcaaattatccaagcaatagattaacatgacatgaatgagcgcgataaatggtgagtggataagttgagagttttcaaggcttcggtaacacctactcggtagagacagggtcataatgccgatcctcttaactctaaaggccatttgcctatgggtgggtaaaggagtctcggatagggtccaaagaaaacttaacatcttatctcgacaatggtaactaccattcccacctaaacaaaccactattctgatagcaaggcgtccattaccagcccaaacagaggtagagggtgctaaaaggagggaactcgatagtaaattaacgatacttggtgtgggcagcaacactctaggacacttccaaagagaaaatagctccaaacgattcaagactagactcaaacactgaagaaaacggaccaaacgagatagactatcaactaggttttgtgagagagagctactaatccaagctaaatccatcatcaccatcacaggaaagcgtccattactctccctaaatgataacaacatcaaaaaatttgggctttgtaaaacagatttgaaaacagacctgggccttagaggatatgggcttaacccagcagaaggcttcatgggctttaatagtttaggtaatgggttagggggaggacagaaggggcttgggttgggcccaatgcgaaaaccctgaggcagcattaggtttagccgccaagcgcatcttctctttgtcaccaacgacgacggcgacggcaaaacggacttagggtttacagctgccgaattgagggcgtcagagacaagatctaaccaaacgaagtttgtttgcgatgaggctcggtctgcagaagttggatcttccaaggtaaagctcttcaacagctccggcgtcaaagcaaagctccgatccagaggggaatagggagatgccggtattgacttcaaggggagccgaggagagggataaaccacggaggtcgcaaagaagataaggggagaactagcacaagaagtgaacgtgttcagaggtatggtggtcaaggtaatctttggatacaaagggagaaaagacaagcgaaacatgggaacacgggagaatagagaacaccagatgacatagccattgagaagagagcgacaagggaacgatagctcccggcaccggcgagcaaacggctctaccggtgccggaatttgtttggaagctttggcctcgatgagagagaatgaatgaaaagaattcagtttaaaaatgtcaaattggtgttctcaattttcaacatacccaataatacaactaaacaatattgaaggcccaataccatatacacgatggcccatctactgcctgatagtatgtagggggtattaatgtcattccaacaagtaggggtagaatcggtaataaggacacaaactcgcctctttcgctttgtctctctcgtctctaagcagtagcagatctgagttttggagagttcaaaggaagaagataactccaataccagaggttcgtaacgatgtgagatttttctctgttgtttatgaagtcttagctcaatttgatcttccaatgaatttcgttaaaatttgctagacttctatcagcgcctgtagatcgatttaggttatgtactctcattcacatcggtgggaagcgatcaatcttagaatccacgttttataatttctcgttttgatcttgtttttttcacaacttgtaaacattgcgatgttgattgtgttgattaatcgcttaaaattgaggtctgagtttaaataatccttgtgcttaccatatggtcttggctgtgataatttgttaattgttctgcttaataatctaacactttgcttcggttaatgtctggatcaacatgctcatggttgtgttccctgttgatttgtattgtaacagtgaaagcattcaggaaacatgcctcctcagaagattgaaactggtcatagcgacactattcatgatgtggtcatggattactatggaaagcgagtagcaactgcctcgtctgactgcacgatcaagataaccggagtaagcaacagcggtggatctcagcatctagctaccttaaccggtcatcgaggtcctgtctggcaagtcgcttgggcgcacccaaagtttggttcacttctcgcttcatgttcctatgatgggcaaattatattatggaaagaaggtaaccaaaaccaatggacacaagctcatgtcttcacagaccacaaagtatctgtcaactctatcgcttgggctcctcatgaacttggactctccttagcttgcggagcatctgatggaaacatatcagttttctcggctcgagctgatggcggttgggacacgacaaagatagaccaagcacaccctgttggtgtcacttcagtgtcgtgggcaccggccacagaaccaggcgcactcgttagctctggtatgatcgatccggtctacaaactagcatccggcgggtgtgatagcacggtgaaagtgtggaagttctcgaacgggtcatggaaaatggattgtttcccggctctcaacaagcacacggattgggtccgtgatgtggcttgggcaccgaacttgggtctcccaaagtcaaccatagccagtggttcagaagatgggaaagtgatcatatggaccatagggaaagaaggtgagcaatgggaaggtactgttttgaaagatttcaaaacaccagtgtggcgggtctcgtggtcgttgaccggtaatttgttggctgtttccgatgggaacaataacgttacagtgtggaaagagtctgttgatggagagtgggaacaagtgactgttgttgagccatagattgttgtttgtttgtttggttatcttttgttttgtggtaatatcaaaatgtggtgtgttctgtatacaatttctagggacctgtttctctctatacgtttctcaggaaagtatattcttatgtattttaatcagacaacagagattgcaaaagaaatgtatttttcataaaactttttaattccgataatgagttttttttactggtatgatgtttttcacatttttacccttttatgagattccgattttggcgtaaattcattgtagtttataaccaaaatttaattgatttcaatataaactcatttttaactaattaatactttaaaaatttaagcctgttcaaccttagttaattgtgtttttaatcgatcaactaattttcaactcattaaccagctcgtttagccagccacttgataaattttaatgctcaattaggcataaaattttgatttacgaaattttgccgatggcgctcaaaaaatgctaatccggctctgcatcgatttataatatttaccctttcaatactccgtgtagttaagaggatcgagggtatttgcgtcattaacagtgataacaagtgctaaagcgatgaatgaagcgcctattttcacaattcgaaatctctctccccccgctttggccccaaaaagttttttttttttttttttaattgctaagacaaatatccgaatctcagaaatttctcgtcctctttctctgttttttgtttctggggaaaatgtcttctgcgattgttgtttctcaagatgcggaatcgcttggtctgcaaatttatagccgcaaggagaaatctcttggggttctcgtctccaagtaacacctctctctctctctttcaccagattttgctttgttggatttatgtgtaattgatgtcttatgtacgattcagtttcctgagactgtataaccgagacgatgtggatctcattgggctcgatgatgccgctgggcaattaggtttattcttcttcctcctgattttgtgagattgaaattttaaaatcgatggataggtcaaatctaaacgtatgcgttcgattcctagactaagaacaattgggctaacggagaactaagtaatccgatgactgttttggttacgctctcatcggatttctcaaattttgtttcaggagttgaaaggcggcgtatctatgatgtggtcaatatattggagagtattggggtatgtatgctcttttttattttgctgggtttagcttgagctgatttagagttttgtggtgtatattcagattgtggcaagaagagggaagaatcaatactcgtggaaaggttttggagagattcctcgttctctagatgaactcaaggtttacttgatatggatgttcaacatctggcttttaatgatgcaaggagaatggttttgaaacttgtctttggttgtttttgtttacaggaagaagggatgagagagaggttaggttactcaagttcaaacaattcagacaaggtatataagttcatcctcttaagattctttgttgctgaattttttattagattttttaaagtggtttggaatttaactttgaagatgttacctgtgatgtgattctatggtcgtaaatgtattaggtttcaaatggttgtgaaagagaagaacctttaactttaacacctgatgatcaggagaactcatcatcctctaaaatgggtaatcttctttcttctagtgttttgttttgttggagtgttatcaatatccatctgctaatcactattgggatttcagtccacaacttgattctgaataaacattcttctgcaaatagttctgcattaacaaagtgctacttgatgaataaaagtttccaggataagattttctttaggagctaacttgaaatcaaactaatatcattttcagaccaaaagaaggaaaaatctctctggcttctcgcacagaattttgtgaagatgtttctatgttctgatgtaagtgaatatctctctttggcttcttacacaatacttttcaaatccctcttataaacaacaactcacaccctgtctgctgccttctcttcaggatgatctcatcacacttgatagtgctgcaaaagccttgctgagcgactctccagattcagtccatatgcgaagtacatctatatttcctgttttagatcttttctaatctctgttctcacaagtatacagtaccattaaccaaccaaatttctgaaattgattaacagctaaagttagaagactttacgacattgcaaatgtatttgcctcgatgaatttaatcgagaaggtaagagctttgttcctaagccaatacattaacactgtaatacttgcaaatttccagtgtatcatcttttagttattattattattttttttgctttctccagactcatataccagtgactaggaaaccagcatataggtggttagggtccaaaagcatagctgaaagaggattaagcttatttaattccggagaaccgaagcgggtatttggaacagagatcacaaacttgagggcaaagagaaacaaaacatattgttcatcaatccgcaagcaaattggatataagaaacatgacgaggaaaacacagagcaggaatcgaaaccagctgcaagtaaatatgtgtttggcccgttctccccaataggagcatctaagacgaacaacgacaaagtcggaaagggaaggttactagagatcgaggcccttgcttctacctaccaaccacagtattgcaatcaaggtaacaaccacactctaatcgtttcttgattcgattggcaaacatatctgattataaaacataaactgagttttggttttgaaaaatgttgttaaaacagaaataactggtcttcttgggcatttcacggaggcatggaagaaatggtatgcagaggttgatcggaataaataacattactgaggtcacatgttttctctgggtacatgagagcacataactcatccaacatatagctttagtctttgtttgccttaaacaatagtaagaaacagagtattgttattgttaataaaagtcacacccaacaaattccgagtgactttgttctatacttgattcgaattcctatcctctccttaacttaatataaatgtttaatccatccatatttggtttggtatcattacatttcttttcagttgtaaaaagaaaagaaaatttatgctcataaaacttaaaccaaatctatatcatcatgttttgacttttgtaccttgtgccacaactatgcaaacgatcttagaagaactacaatattagtttgtttttttttttttttttcaccgacaatattagtttttttacctacctagaaaacttgaatcttccattcatttatccttggattagttgttgataataatatactgttgtatttaatttcagaatcacaaaaactgaaaagtgataaaattaattaattttctgtcaaatagtatgtactatagaaaagtgatttattttctttctttttttaatgggaaatggagctgatatccactttatggatttcttcatacagtattcaatcattttccaatatatatgggtcaaacaaatatatgaactttctaccaaaataaaataaaataataatatatgaacttgccaagttaattttttttaagtcaaactttcatcacatatcacaaattcacaatacagtacaaactcttttctatttatacgtcgagacaaagatacatacaattcgaacccacacaaccaattcttttgaaaacttctcaaaaaagaaaagaacaaaaatggaactaaaacaaaccaaagtgatgtttttcttggtagccctaatcttggcattgaatttccgaccatcggaagcagctccgccggtcagatattgttcaacattattcatagaaagagcgccaagatgttacgaagcgttgagaagagcggtgcacagagatgttagtttgttaacaggaaaatgctgcagagcagtattcgcaacacttccagttacttgcttcttgaaacttacttctgaacttgaattgccaatgactaacttcagaaatatttgtgatgctgttaagcctccaacttcatgatttttctgtatctttcaattataaaataaataatgaaataatatttttgaatttttcttacctcattcaaactatacatatctttgttcacttcaatgtttcatcgtccttggactttatctgaactctcattttcaccgtgttccttttgttttaataggcctatcattcctctcacttattgggaatatatattttcaactttgatttcataaaaagaaatatacccatttataaaatattcaaaagattacaattaaattgttattttgccatattcagctgaaaattcacgttaacacttgtttaattaacagaaatattaatcaacgaattaattcatataaaccatcacaacatagttcagatcttggtaccttttgtcacaagttaaatatgtaaaggatcgtttaaacgaagatgtaaaaataccttactcttttcttttcttttgtttttgacatttttccattcatttgtcttgtgaatgtgatcatacttatactggctctgagttaaaaaaaaaagaagtacttatactggctccaaacgtaatcttgtctaccaaaactgaataagtgataaaattaattatttctctctttcaaatgatacgataaaaagaaaaagaaaacgttttaattttcttacgtcaactatacatttctttttcacttgatacatctggatattggtggtacgtacctcagacggtaatatataatttccttaaaaccatgacatattatatacacaaattgattgtggattctcttaataattatatttatatggggtcaaacaaataaataaaatttcccaatctttccagtgaaactttgttatataagattacattccatacaatcctaaattattttctttttatatacgatacaatgtcttatcatctctacgaaatccaaacccacaaaaacaactaaaaaataatattctcaaaaaatgaaaatgcaacaaaccaaagtgatgtttttcttgttagcgctaatctcaacattgatgttccaaccatcggaagctcggaatacgaacctgtgtgaaacaacagcgatagagaaggagcctggatgtttcgatgcattgagattagcggcaggcgacgcagatttccgatggctaaatagagattgttgcagggcagtgagaacacttaatgatacgtgcctcttgcttatttatcctggcagagcttaccctattagaatcttcaaaagcatttgtattggcaagtttcctccattgcgtcattagttttatcattttctttatcttttaagtttcaaccaataatataagatgattaaaattgtactctataatttttctactttgtatcattggatgtttcatttataagaaaattatgaacaattcgactcttttatatcgatcttactttgcctcactgaatgtttcactttgtttgagatctcatctttatttcttcgtcttaattaaatgttatataatcctcctcaggttttggaatttttagtccaaattaaaaagcagccaaccatagaaaacgaattttagctatctatgaaaacaaaagttgaatatctaatccatagtacgggagacaagacgaaagactcaatttgcaatatatatattggaaaatctcaagaatttgcataactctaagatttgaatgtggtggagcgaagaaattttattcagtaaaaaaaaatatatatatattttttctttgatataaaaactgattgtgaatatcctactaatatatgcatatgggtcaaactttcctattctcttctagttcttatagtcaaactttcttcacctatatcttctatgtataagaaaattccatacacagcatctgaataatacaaaaaaaaagtctatttatttaccaaagagcagagatctcagttctacactatccaaacctacaaagctaattattttggaatcttgtcaaaaatgaaactaaaacaaaccaaagtgatgttgttcttgttaaccctagtcttcacattgattttccgaccatcagaagctcgtctagatccaagtctagatccaaaccacttatgttcggatgatgagacaacgccggtagctaacttaccaggatgtttttatgcggtgagattagcggcggatcaagatatcagatggctatcaagagactgttgcgaggcagtgaaaacacttcctgattgcctattgcttgtctttccttacaaagctttaaatactatcatcttgaaaagaatttgtgttacaaagttccctggatgatcaattttataactttggtgtattcttaatgatatattattgaaactgaatcaaaatttacttttaaatactggcaagaaaatcgcaaacaatcacctatgatctatgtctcgttgaatgtttcatgcatgggctcatattcttcttgtttcattaatttttatttcaagttttatatcaagtttataggtgattgtttgccatgaactcagcaacaagcacttgttgactctgacctctccaaaggaaaactgtttcacggaggcatggaagaaatggtatgtagaggttgataggaataaataacattatactgaggttacatgttttctctgggtacatgagagcacataacagatcatccaacatatatagctttagttattgttaataaaagtcacacccaacaaaaatccatgtatttttgcccagtgactttgttctatagtttgttcgaattcttattctctccttaacttaatataaatgtttaatcccatttttggtttgatatcattacatttcttttcacttgtaagaaaataaatttttgttctcaaaattttaaaacaaacatatatcatcatgttttgacttttgtaccttagcttttttttttggacaaatgcttttgtaccttagcttgtgccacaaattatgatatttttttgttaagtgttaattttttaaattttgtgttaactaagtggacacaacatccaaatctttaagagttgttctacgttcaatatggtttatatattgtttaatttttttaacacttatttttcttttcttaaaaaaaagttatttaaactttgaggttttttattaagaattaaaatttgaaattttatctaaactaattagacacaacatacaaacaatgttttaggtacaatataatatggtttacacatattcaatgattttcctatgcatatgcagaaaatttgactatatatcaattgatatggatagatatatatatgggtcaaactaatatatgaattttccaaattaatttatcaagtcaaactttctttacgtaaattcttttcataaaaaacattccctacacaacattaatttctaatacagcacaatctcttttctacttattcgccgaaacaaaagatctcagctccatacgatttgaacccacggaatcaattcttgtttaaacttctcaaaaaaaaaaaatgaaacaagaagtgatatttttcttgttagccataaccttggcatcgattctccgaccatcggaagcagctccgccggaagtttattgtttgacatacaggataagcagagtaccaggatgttacgatgcgctgagattagctgcgggaagagattatagatggctatcagtagactgttgcagagcagtatacgcaacacttcctgatacttgcttcttgacacttaagcctgacttggcgttaccaattaatgtcttcagagtcatttgtagtaatacggtccctgcagctgcataaccaattttatgaattttctctatctttcaatgatacgataaaaaaagatacttaaataaaactgttttaattttcttacgtcattcaaactattgtatatacatttcttttttcacttgcccttcttaatctttctatatccaaatcaattcttatatatcttttttttttcagacggtaatactgtatataatctccttaaaaccatcacatattattatataaacaaattgattgtggattctcttaataattatatttctatatgggtcaaacaaataattcattaattttcccaatctttcctgtcaaactttattatataagattcattccatacaatcctaaattcttttctatttatatacgatacaataccttatcatctccacacaatccaaaaccacaaaacaacaaaaaaataaaaatatactcaaaaatgaaactacagcaaaccaaagtaatgtttttcttgttagcactaatctcaacattgatgttccaaccatcggaagctcataatacgaacctgtgtccgacaacagcgatcgataacgtgcctggatgtttcgatgcggtgagaaaagcggcagccggagatttccgatggttcacagaagtttgttgcaaggcagtaagaacacttcctgatacttgcttgttgcttgttaatcctggccaagcttaccctactaatatcttcagaagcatttgtattggcaagtttcctccattgcgtcattaattttctttatcttttaagtgttaaccaataataagatgaattactaatttactctttaatttttgtacttcgtctcattcgaagtttcgtttataagaaatcctcaactttaaactcttaccttgtctcactgaatgtttcatggtccttcgctttgtttgagatctcatgtgatcatcttatcacttcagtcttaaaggctatataatcctcaggtttcgcatttttagctatctatgaaaaattgaatataatccattgacaagacgaaagactcaatttgcaatatattcgaaaatctcaagattttgcataactctaaaatttgtatgtagaggagagaaaaaaagttgtacagagtaaaataagctaatatattatttctttgatagcatcgcataattgttgtacagaaaagacttcccgattgcctattgcttgtctttcctaacaaagctttaaatactaatatcttgaaaagcatttgtgttagaaagttccctggatgatcaattttataactttggtgtatttttaatgatacattgaaaatgaatcaaaatttacatttaaatactggcaagaaaatcgcaaacaatcacacctatgatctatgtctcgttgaatgtttcatggtctcatgttcttcttgtttcttttagtttgtatttcaagttttatatctatgttggtcttatatctaaatacagtcctcaggctttgtcaatatatactcaagtttttcttagcaaaataaatatattcaagtttttaatccggaaaaataaccatccaatatccatacataaactatgcaaaatcatatattgacttggtattggtcatacgtgtgtcaatatctttcgacttggtattagtatcatgtttcatatgtaaaaggatccccgaaccaagaaaaacaggatctcgtttgttagatcactttaaatcttcgaaatatagatgttatatcagttaaatccttttatatccagtataaatctttgatatatttgttgaatccaacaaaactaaaactccattggttaaactaattatgtttaaaaaagtattgcttggtcaaaactccataaattgattgggtcaaaaaaaaattacgtggtctttctttagtcactcttcttatagaaggagatccttttcttttgggaaggaaatccttagaatacattccacaccaaaaaaaacttcacatcatttctctacaactaactacacaaactttataaagtatataaaccatatattttccgtcttctgtttattaaaaaagaaaacagaaaatgaaaccaaagcaaatcaaaatgatgttctttttattaattgtagttgcagctatgattttccgaccatccgaagctcagctaaaaacgagcatatgtacaagtaaacagacaacgccaattacacaggtggctggatgtttcaatgcggtgagattagctgcggacaaagattccaaattgctaacaagagtatgttgcagagcagtgaaaacacttgatgattgccttttgcttgtatatcccgacagggcttacaatacttatatcttcaaaggcatttgtttcgaaaagttcaacgaatcacttttataaattctctgtattcctttttttaatgataaataaaaaaaacgaaacaaatttatttttttaattctgatacgagaatcttaaaacatttcacaaatcgcaaacaatcatatgtgtctcgttgaatgtttcattgtcttccgtcggtttgaagtcttatcttaaagacacatttcgacggcctcactaacaagtgtttcaatgcgttgaaaacaaccaagtcttttgaccttccattgattaatgtgtaaccttacgatcgattatgatctcgctgtctctaattattttcttgttcttatatcacaaaaaagatgttgttactgcttcctcactatctcgacctcaatatatattgaacatattacatatatgacccctcaaagatatcttttttttttaaacaaaaacaacaaatagtgagaacttcttttttttttttttgtaaaaactaagaatcaccaataaaaaatttgagtccaacaaaactaaaaactctattggtcaactaattatatttaaagcagaaatatatatttaattttattacatggtctttctttaattagtcaatcttcttatagaaggaaatccttagaataaattccacacataaaaaatcttcacgtcgtttctctataactacacaaactctatattataagccataaattttccgtcttctattgtcaaacaaaaacagagaaaatgaaaacaaagcaactgaaaatgatgttcttcttattaattctagtttcggctttgattaaccgaccatccgaagctcagctaaaactgagcgtatgttcaagtacacagacaaggccgatagagaacgtggctggatgtttagattcgttgagattagcggtgcatcaagatttcagattgctatcaagagactgttgcaaagcagtgaaaacacttcctgattgccttttcgttctttatcccaacatagtttacaatacttatatcttcaaaaacttttgtttcctaaagttcaacgaaacaaaaatcatgtaaccaaggggatttttatttgtacattttttatgatgaaataaaaatgaatctgattcactttttgtttctggtacgaaaatcttaatatttcacaaatcggaaacagtcatatatgtggagtaagaaaaaaatatgtatattatttctttgatagcatcgcataatctatatccaaattgattgtggcatccgaatatgcattaaaaaaaacccacgaatcaaaatcattcatgtgcatgtcagttctgttgacttggtatttgtaccatgttaaagttgtaaactatgaagaaaatgaatcaaggaaaaaaggatcttcttcatcgttagataaaaaggatcttgatcgttagataatttttaattctcggaaaatgtttcagttataatataaaaaaaatcaaaatgattttgaatacaaatgagaagaaagtttgatatacgaagcgtctaaaattaaaaatacatttcgttgattccaattgtttatattaaataattaaaacttaaaaaaaaattcaaaatatttgtattttttcattacatgatatttgtttcattgaaaactactgagaacataagtctctcaatacaatagtattgtactctacgccgggagatacaatcaaaaggcagtgaggaagtatattcactgcattgcaacagtcttttgatagcaatctgacaaatttctccgaccctaacgctaatttcaacgcatcgaaacatccactcacgtttactatcggtgctatctgttcacttgaacatatccacgattggatcttcatctgagcttcggatggtcggaaaatcaaagctgaaactactattagtacgaagaacatcattttgatttgctttgttttcattttatctgtttttgttttacaatagaagacgaaaaatgtatagatggtttatagagtttgtgtagttgtagagaaatgacgtgatgccttttttttttgtgggtttttttctcaggatatccttctataagaagatggagtaaagaaagaaagacgtaattaattaaatatacaagttttgacccaagcaaatacttatttatggaaaagtaattttatatgcttgaattagtttgaccaatggacttttttatttatttttgttaaaaagagataatctttgaggggtcatatatgttcaatattaaggtcgagataagcagtaacaacatttttggtgacttaagaccaacaaaataattagagacagcgagatcatatttcggattagttaagttggaaataacaactgaaagaaaatcactactaaaccttaccctaattaggtttcactttgaccaaagaataatgttgattacccgtgcatccgatatggatgttcatacattcaacaatatggattatttgttatctcataatcgatggaatctctaaatactaggttgtttacaaagcattgaagcattctttagtgataagacttcaaacaaacggaggagcatgaaacaaagaacgagacatgtatagatatataataggattgtttgcgatttgtgaaatgttaatattttcgtatcagaattaaaaaaataaatttgattcgttgattatatcattataaaatacagagaaatcataaaattaagttattgaaaatttcgaaacaaatttctttgaagagattagtattgtaagctctgttgggaaatacaagcaaaaggcaatcatcaagtgttttcactgctttgcaacagtctcttgatagccatttgatatctacatccgcagctaatctcaccgcatcgaaacatccatccacgttatctatcggccttgtctgtgttcttgaacatatgctcgtttttatctgagctttggacggtcgcaaaatcaaagctgaaactacaattaataaaaagaacatcattttgatttgctttgatttcattttctgctttttttttacaacagaagacggaagatgtatggtttatagagtttgtgtagttgtacagaattgacgtgagattgcttctgcgtggaatgtattctaaggatttccttctataagaagagagtgagtaaagaaaggccacgtatacaagatttggaagttacatatactcatttatggaaaactggtaaattttaaatacgttgaaaactaaccgcgcctaagcatccactggttagttagtccgtaagcaaaaatgaatcttaacatttcacaaatcgcaaacaatcatttatgtctcgttgaatgtttcataggcatcccgtttgtttgaagtcttgtcttaaagacaaatcacgacggcctcactaaggagtgtttcaatgcgttgaaaacaactaagtagtattattccatcgattatgagatgataaaaaaatcatcattgttgaacgtatgaaacatccatatactggatgcaggggttttcaacacatattctttggtcttttactctttaggaaagatgaaacctaattagggttaggtttagtcattttcgtaaacttaattaacacgaaatatgatttctctgtctctgtatgtctcattgttttcttgttcttaattcaccaaaacaaaaatgttgttgttaccgcttagtcaccaataaaaaatttagttgatttcataatcttgaaatttgaagcatataataataatttttcttttgggcctatctatctattaaccaaggcatcttcaagtgctttcccatatttacaacaacattctcctaaagagcacagacacacactacatgtaacactaacagacttggcacttgaaacctaaagatacacacagtaactctaaaccaccattgttcttcttatggttttgttcctttgtgcatctctctatatctcatcttataatcagcatagtaagaaacttgaagaccaaagttgggaattgttgcagagaactttacttgtgcgactttgtcagttttacctttttcttgtgtgttgttggtttgaaggaaagaagaaaacccaagaggaaactttgttgtggtcatctttaagctgagagaaacctatggaacctttctactctcaccttgttacgttgccataactgttcagtcttctttttcttcttcttcctgtggaagtaatcctctgtgtccaatacgtacgcgatctacaagagatgagtatatatgttgactgattcatgaacaagaaattgagtacagagaagcttttgcataaagaaagatgaacaggttgaaatgggtataattgagttgcttggttcaagatctttgggacggaagatcggtttaccttgtaagaagagcaagacatcttgcattccaagccatttactacttcgacaccttccatagctttacagagatcatacaacccggtgaggttcctgccaaaagggaatttatttaattatgcaatatcgttgcagtatcctggaccagttccagtagaagagaaaaagaaataataaacctatatataacctgcaagcgtttcaaaagagatagaatctaccatttccatgaacctagaggtttatgcgaaaaccttaaagagacagatgattatataagatatatacctttgtaatacaatgtcatgtccctcctctttctttcctgatgagacggaaagcaactcagtttgcatataacttgcaaatgtgggatccatagaaactgcatatgcttctggcttctcgattatgttatccataagctggatagataaacgtgaaggcaaggatgactgcatatcaattaaaaagggcaattaagttcaaattgatcatgagtcaccacattgatgtatgaagaccgcgggagataagagagtcacaagggttcatacacattccaaccggtaaatattttcctcgtgaacgaggaccctaacattttcataatacactgagtcgataacccttcctggtttccgggatttctcatactcatacaactgaagcagcttgttgtccatttcatcggctacaatagcttgaagctgcagatggataatattagaacatcacaaggaaggtaacataatgtcgataacataaaaaaaattgtcctaaaccactagtgtgagtaacacctgcttaaccaatctgtaaatcagtttgtccaacgtgaataacacatatgattggtttccaattatagctctgcactcatcctcaaacttggtattttcagctgatccatctagcaaaccatacaaaaccctcataaacctgtacaacacacagatcagattttgatgggaacaacatgtatatgattatctacataggctagtataaaaagttgtacaaaggaaggtacctcgcataaggatctccggcattggtatcctttaagtttttcgatttcagttcaccgcctgagcaattcctttttgcatacaaaattctctcgtacaggatctgaaaatgcaccacgttatctttgctagagagaatcaatttcaataaataattaggtaactcacttggtgaagcctaaaaagaacataaaagtcgtcattcccatagaaaacttggagatcttttgttctctcatcgcataaaactgctgcgacatgctttgaaaggggtctgacggataagagaacacgttctgactgtggaagcagctcactttctccttctaagagatgtggatccattccctccgcttctccttcactctcagctttaccatcgatctcatcatgctcaccattctcctcctctctatcttcgtcctgagaacatacgtcgccaccagattcagttccagatgcctcggaagcattttcactatcaacatcgtcagcatcgtcctcattctctacttcagcatctgcctctacttcagcctctgctgaattctctggtttggatgtggacttcaccccatgatctttgtaaacaccaaagttgtcttcaaaatcaccattaggtgacagttcaccttcctctttctcatttctggagggaccttcgggatcatcagaattcctagtacctttagaagaatctgaccttaatccatttgccaaaactatcgaattgccaacatcacctccctagtaatatgacagagtcagaagggtccggaaagcataattataatataagacacattttaaatttttacacccctgggtcccataggtagtactgtaaatttttacatccctaagctatggaaacctccaggtaatagtgggtttaggcgaatatataaatatggtacaacgagcaactgaatggtgtaaatatggtacaacgagcaattgattgtagtactagtacctgagtcgaatgaacagtttcaatgctatctacatcatgatgaatatcagtgagggtgtcgcttggtttggcttgaatctcatgtgcaccttaattgtaaagtaacaaatatcaacacaaataatcaagcagcacaaataaaattaaatagcttaaatctggaaggcacctggcaaaacttccttgcctactacacaatgattgttttctgccccacttgggattgatatactcgagatggctgctctttcgctaatatccattgggataggttttccaaaccttttctcggcttcatttccagtttcttgttctttctgaggtttcacagcagagcaggcaacaccatctctgttagctatttcaacatcttcaagattttctttccctgtcgaatctttatttaacaaacctatcccatgtttgaatgtcccagatgaagaattctcatctccattggcagcagatttaagtttcctagaagccaaccttgctgtgtctcctccagaactcacagcagcctccccgttaggagatgtgctgtgattcacatcgagagtcttggggtttattacaacatcttcaacaagatctgtgcccttggccctgggaggaacacccagcactgcctccaggaaattttcccaaagcctcagaactttactgagctgttcttttgtagaacataactcctcacatgaaaactggactactttgaacatgtcttcatgaatagctctgttcaaatactcatattcaagattaggatttataggttgtctgtaaccagcagaaatagacaacagaacatcatcatcattctgagacttctctttcagctccttaatttcagccaacaatgctggttcacgaagcaataaaaaaacagaatgagaaaggaataagtgaaaggaaaaatagcactgccggatgtatgtgagcgataaaacaggataaaggaactacttgaatataaatcttcttacgacttctataagtctacttacattttgcactcaagttctttgaatcttgttgcttgaagtagaagctgcggtgatcaagtgacttgtaatggttttttgcatatacgttcgcccagaccttatcaaaatcgtcacggcatttcttccattcaccttgtttctgctttaaacgagttaggattacaggaagtgcagtggctggattcttatttaatatgtctatcacgtcaagaccatggtcgccataaagtcgctcaatacaccttaaatttagggctgtaaatatgtcaataagaaaatggtaaagttaataaccaaacatatgaggacacctaaataggggaagagagaagatataactacgaactgtaaaatggtcccaaaaaagcatacagacccgtaaaatggtcttcgatcctgaaggagccagaaaaacttattttcttctctgtgatgatgttcaacaaactttctgcacttctggccgcagagctcacagattccagcaacatgtccaactcaaatctgttataagcagtaattaacataaatgaccaattacttcaaactataatatgtatgttgtcaatataaatacctatcatcttcgcatctgaacaagctctcttcatattggtttctgcgcatgtgcttaaaagaataatcttcacttccggaagtgacagatacccaatgatcatttaaaacctcagctcctagctccgatctctgactcgcaattggtatcggatactgcaaatataatattacagtaagtaaaaatccaatgaacatgctcaaaatgcaacttggaaatagaagcttacatccgcaggcagaagccggtagctaggagtgcaacactcgcaatcagagagatcgagctcttgaatagattttcccatgtactccttcttgcattgctcagtttccttcacagcctcgagttcaggcttgtgttcactttctttctcttccaccttcattggcctggataactgttcttcgctgctaaataattctgccaagtgtaccagcaatgtcagtaaagattttacaaagtaggagggaaagagacaatattattcacagctgggaagtttaaaatagcagcatacttttgctcataacaccagcaagacgctgaaatccatctacaaaaagaggatgaccgtcagaaagaagaagattgctgatatgtaataactattaaaataacaatacgtatttcagtaccagtaatactctcacaccgctcgaagaactggttgaactcatccatcagatcaggaaatttcccaagaagatcagaaacctgaaagaaaatgaatgggatttaatacaacttcctgaacgttaccacaagatcaacccctgatcacaaattgcaataccaagttttgcagatccttcctttggattattccattgctaaaaatattgaggcacttcaagaatgtctgataatcatcttggctgcatagtctatccttgactttctcacagaaaacgaatgcttgtttgtacatacctaacacaaagtaaacatcttagaaaacagaagcagatcttcgcaccttaaagatcaccatgcaaccaaaattggaaaataaattctctctcaaagagaaagaattaaggtgtccaatgtttgggactcttaaaaaatagaaaaggtaccaagcaaataaaaaaatgtttgacacaggagttagcttacttttcaaattgtctttctcagaatgtgaagcagaaccagaatatgcttcaagagcttcagctcttctggacgactttcttttctctggaaaatggtgtaggttatcttgacctgcttctctatcgtccaaatcacggcctctccttgccctgttctccttatcaaggcgcttccgctgctctctttgaatcttcaccatcgttttatcatcattaaggtcataacgttcaacactataatcaccgcggagagcaacagccctttctcgtcggcgttcctggtgataaaaagttgtagcgggaacaaaattgagatacgtggcaaaaaatagaacaaggaaaaatatgaaacaaagatcaaacgaaccttttccacttgcatttgatgaagtagaggagggtctgatcctcggtcgctgtactgttgagcctgactccggctatgctgcgctgctgaatgagatggcaaagacgctggcaaaaacctagtaaactgttcaagcaaatccaagtggccttgaaaaagaatagatacctggagcatagatattcgaaggttagaaaaagtttggagtggcattacaggtgagatgaagtatattacctcgttgtacacctctttaatttccttgttctcctttcggtacatattcaagatttccaagaaagatttatagacatgttcatcgtgcttgaatcgcatctgcagtgagaaaaaagaaacttgtacattgagacacaagatgtaagcgcacttcaaaagagaaatataagaccaagatttcgacagcaccttaattttattcacaaaattgatggcttgttcgaattcaacagtcttctttggcagagcgtcgtcttcctcaataagcgtaatttcatatcccttaggcaaaaaggtgttgaatccataaatcaaattattatgtcccttaaacaattccttaactcttgcgatcacaccgcctgtgtcggttctgaaaatgcaagacgaagaattaatacaatgccgcctactaaaacttacttgaactttgaagtcgatagagagtgaaagagctaacctttgagccttaaaatctttcataacctcgaggaacctgtcatatttctcgcgttgatcttgaaacatctcttttacttccctcaggtacgacaacgcatcattggttgtcaatttctgagagactctccggctccctccttcttcttcttcttcggtgtcaccactgccgtggaccggagattgtccacatctgcaccaaatcatctctaatcgattacttaaaactactcaattcataacaaatatttgtcactctccatgcagaattatagaaaacctaatcgccacaaaacagaaccaagatcaaaaccgaaatttgaagggtgaatttagagaaactcacaattggcctcgagaagaaccaagaggacgtctaaattgagacccagaggcatatacatcatctcttatccgcttcatcacaagttaattaacgaagcagaggatcaaaattccctccagaggaaaaatatgtatgagacctactttctatcactctcgagaaaacatatgtagtagatgaaatcagatactcagatctctcaaaggagaacagaatcgttaagaagcgctttgatcaccggcaatcatacatagacagaggaaaattccggcgagactccaaattctccggtttaacacactagactgaatatgaattgcgatgatactgataggagacgagaagtagtagaacgcagagtcgaaaacgaatgaagaagacggagaatttcagaggagtttgcaacaaagacgctgagaattttcgaataaggaaggagaaaaaggcggagagagattttgcattctggggtctcttcgatgtttcactttctctgtgtgtttgctgctaactactggtaaattggtaacttatcttttattctacttcaatttgggccggacactcaaatatctattgggctttttaaaataataggcccatttatcaagaactctgtttggtcggaaaaaattgtgatgaatttttcatataacaagaaaatatatgtacagatttgcgtcaagcattgaacaaaattaagcacgagccgaagaaccgatacattgtcggaaaagtgatgataaaccacaagcgagtttgtttcgtgtagaagatgagatgtctggtcctctacgtatttcagaaaagtatggaggtggtgatgaagaagatgacgaagaacttgatttctgtgatggatttttatcttcaagatcattactatttcttccggtttgttctagatgattttgaagaattgctccatttttttgatctaagatgaattgatcactccaaatacgacccgaagaaccttgacgtcggaacgaaacagctgatctttgtagcgatgtcattacttaagttttgaatcttgttacgattatatcttctttaataccaaacttattttattctatcaattttgttgtgtgtttgtttcttttgcgtatgtatgaagctattgtttcaagtgtttgaacttgtttaaagataaaatgaacagaattagttgagtttgaaattagattttatccagttttggatttactacaaaacatgctaaattaagcttaaaagtttatatctactccccaaaaaaaggatataaattttgatcttgtcttccattaaaataggatccaatgacttcaagccttaaatagatgtagattttcttacaaattattttgttccaagtacatatttttttttaaaattaatattttgttttttcttgaatcaaaccaaaaatgagaagttgtaaattttcagtcaagcccatccatataagctaattgagtattggtttggggtttttatgggtcaaaagaggtttattataatgggccttatgaagctcatatacgacccataagcgttagggttttcctcgagaaacctaagaatcgccgccattggggacctttatatacaaaccacacatgactttgacagacatcaagctcttatcaagtcagtttagggttctctgttcaagttcgtattttatcttcagtttagttttctttagatctttggttttcgagttatgatgtattggtccgtatagataatgcaaaattgagatcaggtgatgaggtaatactgcaacaatatgatggagtaatctttgtgattattagtatttaagtctctgatgatcttaatcgttttcaactagatctttttcgatttgattttcttctgttttgattgttttgtttgaaacgagagatatgatgatcaacaaattggtccgtgtttcagattaaccgtgaccgaaaaaattcttaaccaaactctgatctctcttcttttctttcgattttttagtattttccttcaaatttcgttttggataatttcttcttctgcggtgatgattttatgagaaattcacatgtcagacttcagagattcttgtaatctatgagaataaattcatatatctgagcagaagattcgaattataaaagactcacacatatacattgaccgtttacagagatggaatcatagaaacaaatagaacagtttgatttatttaaccaaatagttcaattaatggaagaggttcagaatctggtcttcggagttgtcatactatttagaaatctggtcttataatctgaacaatcctaatcccacggttcaacaaacttttgacatggatcaaacatataacaaaccattaacgataaaagactcaaatcaagcgaattaaaaaacaagactcaggtcaacaaaccatattagcctacgttgcatcacgataatgaagaataacttatagatccatccccttttgtctcctaattcttaattttttagaaagagatcattattgttctcggatggagatatttagaaaggcaacgattgtacgtctccgtagccacaacgacaaatacctaagtgccgatgaagatcaagaatccgttcatcaagatcgtcgcggcacaacaaaaaacactagatggacggttgagatcgtacctggatccaatgtgatccgtcttcaaagctgttacggcaaataccttaccgccactaatattcatttcctccttggagccaccggcgaaaaggtaggtttatctaggggagattgggttacaagaaaccatctcaaatcaaaattaggattctttttcaataaatttcttgaaaaacaaggcatccaaatccattgataacatttataaacactttgacaaagtaaatcttgcccaagagatatttcaaatgtttaacaacgagaaaacccattcttatgactatagcgcaaacaaaaacgcataaacagaatttttttaaacgtggaaatgtttcttgctaaacaagccgtgtgtgtttcatattcacaaggtacttcaaactctacccgaaaagttggattcatctgcggagtgggagccgctatcagacgatggtgtacacgtacggttcaagagtcgctacggacaatatctgagggcaaacaaaggtgtaccaccgtggagaaactctatcacacacgatattcctagtcgtacggtcacacaagattgggtcatgtggactgttgacgttcttcagattcgagttatcaaagatgatgcagagtctacccacagttcttccactttttcacggattgaggtactactactatatacactacacatacgtgccaataccattcttctgaaaatactagtactaaacattcatcgatacatgatcagtcagatgattcgtttattgtgagtttaccactcaagtccgaaggaaggctaatatattacgagaccggagatgatagtgggaacataaataaggaaataggagaaaaatcattgatattccatggaagcgagttgatagaactaaagaagaagcttgaggaagaaacagagatggaagatgttatgatttggtgtagaaatcctttgaacgaaaagctttgtcctcttcaattgcatcttcctcctaacaacgcaactatgcacatcatcgtctttccttcttcttgcggtactaaacttacctccttcttcattgttaccattatctataatcaaaatattgtttatgcattcctaatttttttcaattgaggatttcgatttccaattaaaactttaggtatattcgagacattgggagtccagagttgttgtttttccgatttcttttggtcggaactctaatgaaaaatccgacacatagttttcttgaaagtctcattattcgtcacgtcagcacaaacttttattcatcccaagtttaactattttaatacagcctctaattgtgtttttgattttttgattttttttttttcgcagagattgacaagtgattgtcaataatatattatcaaattataaccaacttgggaagaagaaaaaaaagattattttgttatttgtgtacgaagaaagaagtcattgtgaagctaatttattcttcatattccaatatatgatagttgataagtacatgtatagttgtatatacaacataatgatctattcgtttaacatttttcttttaaaaatcttggaatgaaaatactgtatgttacctagaattcaaatagaaatcacacctaacgaactagttggtagtagaatcttataattttgtttaatacacaaaataaagtcagacaatctgaaaatgacacataatatgtttttgggtggaacctttttaactctattatgcaaaaacataactttttgggaataagaaaagttgtaaagcaaccaaaaagctaaatgacatatattttttctttctcttaattactgcatattctagaatcctactactagatcttatccttccactttttttttttgttacatattaatttgtcttaaccaaaatatacataggaaaaccttatagggacattatatctatttatgtaacattgatggacgacacacacaatggaccatgtgatattttagttcatatatcaataataaagttttgatcattattattataattatatttgctcgaccatgatagtgtatttaacgtcaagtgtgggtccaatttcggtccaaggatgctgactagaaattagcatttttatagttttctcctaataatatactatttaatgcaaacggcctgtgacgactgaattgtcctctgtctggccccgtgagcttcaccgcagcttttagatattttctttccccgttctttcggattttttttttctccccctctcaagcaaagcattatcgctattgctctgccttgtgagctgcgatcacctgtttactggtaagtctctcctcgtcttctccttcttcttctctgggagatcttctactgttctctctgtgagctgatttgtttggtttcctccatagagctgatcatatcatcatcgttgggaactgacgagatttagtctatattggtgaattatttttgtttatctggttttgattttttgaatctgtgactttagagagaagaacactgcgacgtcgttaaaagtaggttgagagcgagaaaggccgagagaatggagatggaagaaggagcaagtggtgttggtgagaagataaagattggagtctgcgtcatggaaaagaaggtgaaatgcggctccgaggttctgttttcccttttttttgtttgtttgttgctcgtctttcgcgtttttctactgaccaacagattccgattacacggctccatgatgaccggtttgtcttttttttactacgtgtgttctcgctcatacattccttgttgttgttgctttataggttttctcagctcccatgggggaaattctcgacagactccagtcttttggtgaatttgaggttcctttctcacttgatgatcaatttgatactctctggtttgtattcttatagttgtttttattttcattggagagagattgtttttttttgatggaataacctgtatttttgtgattcttgggcaaatgttattggaagatgcttctgagtaactttttgcattagtctgctaaagaagagttgttgacactttttgtcgttgtagattccctggtgtattccatttcctcttttatttatgatctcatttacacttttgttgcaactttatccacagatcttacattttggggataaagttatacttgaagatccaatagaaaggtattctgtaccaaatagagctctcttttggctttaactcatgttatgaaagattcgttgttagtgtatttagacaaactgtagctgaatatatatcaagtacaaagtatatactggaatcaaaactttaccagactgtttactctttcagttggcccatttgtgattgcttgattgcttttcattcctctggatatcctcttgagaaggctcaggcatatgctgctttaagaaagtgagttttaccttttatctctcactgttggctcaataaacagcctatcttacattagtctttttggtgaaaattaaatgagtttggctattgaggtgtgatttttcaaacttgtgttattcaggccatttttagtgaatgaacttgatccgcaatatcttcttcatgatcgccggaaggtgtatgaggtaagcattttagactgcaagatagctgtttctgtgcaaattcttcagagtgattcagcgttaacgaaaaataagaactacctaatttttccttttactaatcaaaataactacttatgtgcatctacagcatcttgagatgtatggcatcccagttcctaggtatgcttgtgtcaatagaaaggtaccaaatcaagaccttcattattttgtcgaggaagaagattttgttgaggtccatggtgaacgcttctggaagccatttgtggaaaagcctgtcaatggtgagcttgcctctggctatcctccttgttttatttatcttctgatttgcagtttttttttttaaaattattattggctaactattgacattctttatacgtgtttaggagatgaccatagtataatgatatactaccctagctcggcaggtggaggcatgaaagaattgtttcgcaaggtactgcatccttctgcagaacttctctgttctggatcgaactggttattctgatattgtcataattctgattagctccttttcttcctaatatatttcgcttgtccccatcttactacagattgggaaccgatcaagtgaatttcatcctgacgtcagaagggtaaggagagaaggctcttatatatacgaggagtttatggccaccggaggaactgatgtcaaggttctgattgtttcccttctacacatttttcgataaaaccattaccattcccatcttttggacaacataggcgtttgagaatattattgtacagttgttggtatcaagtgtcctcaacgtagtaggttgctatgttaatatcctatgtttttctactggcctatatattacagtatatacatgctgcatggctttccacctgctgatgtagcttttattgctgcttgtttctgtctggtgagcatgagttctcaactgacaatcttcctggtaaacacaggtctatacagtgggtcctgaatacgcacatgctgaagcaagaaagtcacctgttgttgatggtgttgttatgaggaatacagatgggaaggaagtaagtctttcaatcatttcccaacagttccatttagggaacctaacatacctagtttttaatgaaggaagggctatggtttcagtatctactgattataatgaaaagcatgagttgcttatgttttcatgaaggtttaaactgttaatgttttgattttgatcagtattttatttttggttaatatattgaacaggtgagatatccagtattgcttacacctgctgaaaagcaaatggctagagaagtttgcattgcatttaggcaagcggtatgttgtgaatccaatcctccggctctcattatgtcttgcagggccgtaatcccttataatggtacgttctgatttcgtgcaatgacgtagtaatttcttcaacatttttcacatttccaggtctgtgggtttgatcttctacgatctgagggctgttcatatgtttgtgatgtcaatggatggagttttgtgaagaactcatacaagtaagctagcatctgcatttttattttctttcttaaaatcatagttgtatttataggttaagtttctagaataaatgctgagatggtttttagactggcatgtttcgcctctttcttaactctctaaaagttgagtttcaattttaaagtattcacaaatctcttgcactgtaaggtattatgacgatgctgcgtgtgtgctaaggaaaatgtgtttggatgcaaaagctcctcatctctcatccactcttcctcccaccttgccatggaaggtcaatgaacctgtacaatctaatgaaggtctaactcgccagggaagtggcatcatcggcacttttgggcagtcagaagagctacgttgtgtcattgctgttgttcgacagtatgttgtagcatataatcacctgttcttcctatccttctctctgtttagtcaggatctgagaagtgttcaactttgttttacatgtcagtggcgatagaactcccaagcagaaagtgaaactaaaagttacagaggaaaaactattaaacctaatgttgaagtacaatggtggaaagccaagagctgaggtgagaggctcaagtctttatatcttcaagttcagcttgtcttgattaatttgcttatactgtgtcaatttctccccttttgcagaccaaacttaagagtgccgtccagttgcaagatctattagatgccacaagaatgttagttccccgtacaaggtaccaaaaacatgtcttaatagtaacatgtcttagtccaaatctttcgaaggggattttgtctatcccgttgaagttttcttagaaacaaaggagcatgcttcatttactactgatagaaatcgtgtttacagttgaaatctagtaagaaccttatggtcttccttttttatctttagaccaggtcgtgaaagtgatagtgatgcagaagaccttgaacatgctgagaagcttcggcaagttaaagcagtccttgaagaggttaggtgtcttgatatatttgttactttcccgcatgtcattgtagtgaatgtagtccttgggaagagtcacattataagagtcctcaatttatattcactgcctgccgctgttacagtcatatgttcttgtttttggatttacaatgatttgttgttaagatatatctgggacttttatacaggttctgtttggaattggctttttctccgtaatttctctctcatattagacctttgatatgcagggaggacatttctctggtatatacaggaaggttcaactgaagccgctgaagtgggttaaaataccaaaaagcgatggtgatggcgaagaagaaagaccagtagaggcccttatggttctgaaatatggcggtgttttaacacacgctggtagaaagcaggtatactaccattcagtatcagaaaataattgcaaaatttgagatttctgttactaaatggagggtatcttatggtagcttatccaacacaagcgcaggcagttggtgtattcttgtctaatttttttgatgtatgcttcatctgcaggcagaagaacttggtagatactttcgaaacaatatgtatccaggtaagggaacttgatctacttatatttgttactttccacaggagtttagtgtactcgtgacgatcagtatattttctaagtatctcacgatgaaatggcatgcaggtgaagggactggtttgcttcgtctccatagtacgtaccgtcatgaccttaaaatttacagctctgacgagggacgtgttcaggtacagatttacgcttttagtagtgaagatgagcatatgatattcaattgttgaacatatactgcaagctttactactcctcactgtttgcaccaaaatatgtgaaagagctcatcgcatagaaaaatgtaaactgatttgcactgttgacagatgtctgcagcggcttttgctaaaggcctgcttgacctagaaggacagctgacgccaatcctggtttgtccttttctctcatgagaactcttggtggttggtaaggtcatatggtcactaatttcttttcttttttttctctaggtttctttggttagcaaggactcttccatgttggatggtcttgataatgccagcattgaaatggaagcggccaaggtttttccctctgtttgatatgtcattttattgtgtatcagtcacgttttggtcaacaagatcgaaactgtttctgaaagaccgtactatcttctcaaaggaaataagtactcttctcaaatattttttgtaataattttaacagttttgatttctctaatttctttccctgcaggctagattgaatgagattgtaacgtctggcacaaagatgatagacgacgaccaagtctcctctgaagatttcccttggatgactgatggagctggacttcctcccaacgctcatgaactcctacgtgaactggtactcatacttttccatctaacagtagtttattgctaatgtgaagcagatcaccaaccattattgagtttgtttgcacaacaaccactgtgcacattggtctcgctttatggttgcatttctcttccattttttccctcgcacaagtgatttactggagtccaggaaaaaactcttatctgttgaattactttctaaataatcaggtgaaattaactaagaatgtgactgaacaagtaagactacttgcaatggatgaagacgagaacctcactgagccatacgatataattcctccatatgatcaagcaaaagcccttggcaagacaaacattgacagtgatcggattgcttctggattaccatgtggtagtgaaggattccttctgatgtttgctcggtggataaaacttgctagggatctctacaatgaaagaaaagagtaagtttatcatcggatttggattttagcgatgcttctcaaaattttcatctctttgtttccagtaaagttttgtgagtagcactgatagttaattttaattgcagccgatttgacatcacacagattccggatgtttacgattcatgcaagtaagttgtttttagtgtatctctagatttacacctagctttagttactcgtttttgaataagccgtaatatgttattctcaccaggtacgacctgttacataattcccatctcgatctaaaaggattagatgaactcttcaaagtagcacaggtaaacaaactgaaattcctccttccctttcctgaaactttaatcatagtttgcactgaaacaatgaactttcttgttacatctctaaaatgtatggttgactgtgctcgcttatagctaagttatgtgttatgtggttgcagttacttgcagatggtgtaatcccaaatgagtatggcatcaatccgcaacaaaagcttaaaatcggttcaaaggtgacaatctaagataagagtagttattttcctctctaacaattgtttttccaggggatctcacaacttatcatttctataatttttttccaataaaacaaaagattgctcggcgcttaatggggaaaatcttgatagacttgaggaatactcgagaagaagcactgagcgttgccgagttgaaagaaagccaagaacaagtcttgtcattatccgcctcgcaaagggaagatagaaatagtcaaccgaagctatttatcaatagcgatgaattgagacgacctggcacaggtgataaagatgaagatgatgataaagaaaccaaataccgattagatccaaagtaatagtctttactttctctctcactcttatatagatagttatttcggctactaattggtggttttcatttcgcttttaggtatgcaaatgtgaagacacctgaacgtcatgtgaggactcgactttacttcacatctgtaagtttcctctttgctccattgcttgtttaagtctgtctatgagtgaaactataatgtttatgcctggtatgatttggaacaggaatcgcatattcattcgctcatgaacgtccttcgatactgtaaccttgatgaatctctcctaggagaagaaagcctcatttgccaaaacgccttagaacgtctctgtaaaaccaaggaactcgattacatgagttacattgtcctaaggctctttgagaacaccgaggtttaacattacattccctttgactctcacacatgcttcaatatatgtatatgctctctcagtgtctgactctagacgtaaaaaacggatgcaggtatcacttgaagacccgaaaagattccgcattgaacttacatttagccgtggagctgatttgtctcccttaagggtaagagcaaaggatgtctttaactaattagaggaacatattataaacttttggtaatattgaaacatgatgcagaataatgacgacgaggcagagacattgctaagggaacacacacttccgataatgggaccagagaggcttcaagaagtaggttcttgtttaagcttggagacaatggagaaaatggttcgtccatttgctatgccggcggaagatttccctccggcgtccactccggttggtttctcgggttacttctcaaaaagtgctgcggtgctggagcgactcgtaaacctcttccacaactataagaactcttcttctaatggaaggagctaagcagagaccaattgttttttccacttatatatattttgctcatgcttttttctatgtgcagtttttaatcatcttcttgtttttctactgatgttttaattttctatgtgaaattgtgaaagggactagtgcagttgggtttgaataaagatatgattacatggaacataaatgagtcacccgtgacgttgtctagtgtttacaataggactcatctattataactcaagaaatgatgatgagtcttattgtaaacactgtgttttcatatcatgctgttacgttaaagttgttgcggatttgttggaatttatatataatctgcaaaagaataggctgatgatatcggataaacaaataccgaatctaaaacaatctaataatcggtggatttttcgttttgggaaaatctcaagacattaaattgataattgaaatacaaattattattattagtaagaatagtactaattgattggaaattgtaataaacgacttaatatacaaactgaaaaataacaaatgatcatgaaaaacattttaaaaaatgaccaaatgaaggagatacatagatagttttatcaaattttaaaaaatgttggtaatgcaattagggaacatttgtccgtgaaggaattaattagtctctgtttaaaaaactacgaaaaatgcgttttgtaactgttgttgagaagagaagagagagttagcaaacaaacacatatatatttacattattattgcccaacaaatctctctctcttgcccgcttcgtgcccgtctcttctctcttcttcgtattctctctccacagacatgaattccctttttgactaacctcctttttcccctaataagtgaatcttacttcttcttctcgccaagatcaaatttctgggattcttcttcttctctctaattcccttgcgtttgtttcctctgatcaagttccgtcctttttcctttttttgttcttgagttctcgtttgagctgctttttgggggagatgggtttcgattctgttaaagttatggagaattggcaatccaagacatctaatgagaatgagaagaagaagaagaagcggaggaggaagaagaacaacaatgtcagaaacagtgaacattatgaagaagaagcaaatgggtgttgggtcaaatttaggtatatagtctgttgcgcttcttcaacatcagacgttgagacctctctcactctctctactagcactggtatgccttcttcttttggctcttttcttctctgctctatttggttctgcaatttagtttcctgtgccgttagagttaataaaaacccttcctttgagattcaaatcttcttcatttttgtttccatatttgtcacaagacgtatctttccatctagggttcttattgagcaaaacctttaatgtcattgtggttggtttacctaactttgagctacttcatagattataatgtatatatattgcagcaattgtaggaactgacatttgaatggttttttataacagtgggaagtcagtccgcaattgtgcaatcaaatgaccaaccggttggcccagtctcttctactactacaactagcaatgcagaaagctctttgtccactcctatcataagtgaagaacttaacatctattctcaccttaagaagttttctttcattgatctcaagttggctactagaaatttcagacctgaaagccttctcggagaaggtggctttggttgtgtcttcaaaggctgggtcgaggagaacggaactgctcctgttaagcctggcactggccttactgttgccgtcaaaaccttaaatcctgatggccttcagggtcataaagagtggcttgtaagatccttccttccttctcttttcttctatatatatatatccttttccactgttaaacacacaactaaaggttcctgtttgcaggctgagattaattatcttggtaatcttctccatcccaatcttgttaaactggtgggttattgtatcgaagatgatcaaaggctgcttgtatatgagtttatgcctcgaggaagtttggagaatcaccttttcagaagtaagtaaaacaactacaaccttcatattctaattacactgtagagttattttctttccttttctttgttttcgatttgggtaacaagtgtctacaatttagagatgtgtctactccatattgttaaagtgattagaatctatacagctaaaattggaacctttctgctctatatggtaaagttggtaccttttagtgctgtcttagatggtttatattgcttgactgtattgacccacgaagcaataagtaaatccctcgcattcattgtttcaagatttttcggcgtaaaaaatgtgtttaaaaagacacagtgcttttgtatgatttatcttctcagttatcattgatgcaaatctttttatttgtgaattaacttgtgcttcgtgttgaagggtccttgcctcttccatggtcaattcggatgaagattgcattaggtgctgcaaagggtctcagtttccttcacgaagaagctttaaagccggtcatttatcgagatttcaaaacctcaaatattttactggatggggtatgttttcctcttctttatatcaagggatcaacatcttatatacacgtctgtttctttgcttctaaagtcttaccatgtcccaatttcaggagtacaatgctaaattatcagattttgggcttgccaaagatgctcctgatgaaggcaaaactcatgtgtctactcgagtcatgggcacttatggttacgctgcccccgagtatgtaatgaccggtaagttttgttttttgtctttgcatttcattcactcctctacttatatcttctctgtatggttgaatatagaaaattagaaacctacacatatggttgatgcaaagtattactatgatgaaacatacatctaatttctttggtttgagattatatataactactgtcctcttattactccttaggtcacttgacatcaaaaagcgacgtttacagtttcggtgtggttcttctcgaaatgctgactggtagaagatcaatggacaaaaatcgaccaaacggtgaacacaacctcgttgaatgggcgagaccgcatctcctggacaaaagaagattctaccggttacttgatccgaggctggagggtcatttctcagttaaaggagcacaaaaagtgactcagcttgcagcacaatgccttagccgtgactccaaaataagacccaaaatgagtgaagtggtggaagtacttaagcctctcccacacctcaaggacatggctagcgcttcttactacttccagacaatgcaagctgaacgtttgaaagctggttctggttctggttctggtcgtggattcgggtcaagaaacgggcaaccagtgtttcggacattgtctagtcctcatggtcaagctggttcgtcgccttatcgtcatcagattccgtctcctaagcctaaaggtgcaactacttagattggctcgcaagtgtggacgcaagcaaacgtcttttttaaccgatgtaaaaccgacattgttaaccgatttaaagaaggaaaattaaggttgttccgaagaagatccgaatttgtgtatttactacctttgtgacctcatgtttcttcgtctgttgtaactcttgaacaaattgtctgttagggtaatattgtcattatgtattagtcgtttcgtatcgcttcaccagcatgcaaccaccacttcttcaatgtaaagatagatagatatcaagaatggtaatggaagatgtgggtgggggtgagagacattttgctttgaaattttgaaaattttcttctctttgatttttggacttatctacttgtagcttgtcgataatcgagttattaaaatataaatacgaaagaagaaaactgacaacttttcttacgtgaaacttttatactcacatacaagttatccactttcttggttaaacatgcgagccgcaaggaccaacgacttttatatacaaataatttccttataaaaaggattacagtaagatactttgcacactagcaagcttgatgattgtatatcaacatcataatttttcttattaagttatgataaaaaacattcaactataatttaaaatataatggaccgttccgaatttccataaattcggttaccacctccaccattttacatcaaacagaaaccaaaaaattagatttagatatatatatatatactagtagaagtagaaccatcttgttctcgtatattattacgaaaccctacagttaacagctgcagaataatataaataaagcgacactccacttttttctcctacattttgttgaatttgaacctttaaatcaatagtatataagaacatacaatgtaatagataacgcgtttactcaatcaaaaggaacaagtatatactactagataactcttgtttattggcgtctgacaaggctctgtagtatattcaacgatacgattatcctcttttcttcgataaaagtatattcgattctcttactacagaaacatagtttacattaatgttagtgaaaaataccatgcacggaaaatcaaagatttaattctgtggtttgtataatttgaagtgtataatgaaactattttttagcctaacccaaaaagaattaaaaagaaaaagtaattgttataaaaacgaaaagcatatttatcaaatattattattgaatattctccaagatataaacaatttgacttttcaatgaaaatgccactattgaataataaataggaaatttccgaggagtagtacaactagatgacaacttgacatgatcttcttcttacttttgtctatataacactcctgcgactttcttctcttcaacaaacttacagagagacaaatacctataataagccattcataatcttcttgcttcttgttcagaataatggggaatcttttctgttgcgtgcttgtgaagcaatcagatgttgcggtcaaggagagatttggcaaattccaaaaagtacttaatccaggtctccaatttgttccatgggtcatcggtgattacgtcgccggtacactgacccttcgtcttcagcaactcgatgttcagtgtgaaaccaaaacaaaggtaagtaacattgaacacacataatgcaaaacttcttcttctaatggaccattaattcatctatgattatgtttcaggacaatgtgtttgtgacagtggttgcatccatacaatacagagtcttagctgacaaggcaagtgatgctttttacagactcagcaatccaaccacccaaatcaaagcctacgtctttgatggtatatatatctcctcttcatttctcaatacttagggaaagtgatgatttatccggtcaagttattgattttcgttttgttttttcagtgatcagagcatgtgttccaaagctgaacttggacgatgtgttcgagcagaagaatgaaattgccaaatctgtggaagaagagctagacaaagccatgactgcttatggttacgaaatccttcaaaccctaattatcgacattgagcctgatcaacaggttaaacgtgccatgaacgaaatcaacgccggtaagtcctcaaaatcgtaaaaccctaaatcaaaatctaaacaaataaatggtcaaaaccctgaattcaattgttgttacagcggcgaggatgagagtggcagcgagcgaaaaagcagaggctgagaaaatcattcagatcaaaagagcagagggtgaagcagagtcaaagtacctgtcgggactcggaatcgctcggcagagacaagcgatcgtggacggtctgagagacagtgttctagggttcgcaggaaacgtgccagggacgtcagcgaaggatgtgttggacatggtgatgatgactcagtactttgacacaatgagagatatcggagcaacttctaaatcctctgcggtgtttatccctcacggtccaggcgccgtctctgacgtggcagcgcagattcgaaatggattattacaggccaacaatgcctcctaatcactcaagtcaaattgtcttggtcgtctctttatatatttttgtatcttcttattaaaaaggtaaatttgacttttaatataatggtgtgcttattgtgatttgtcattatgtttgtacctatctcttttgtgagttgtgtgatagatatactttgtattttttcttaaaagtcaatataaatttctgtttgcgagagaaaaatcgaatctttgaatagtgaactttgtggcgataaactaatataatgattaatgaagagaatgttgcgatataggacactttcatataatgaagagaatgaacctgatcgataaacatgtgggcctaaaatgaagcccatctcaatcaactctctggacacaggtccacttactcaacacacaggcccatctgaatatgcaattttcattatgacacggcaaataaaaagagaagcagaagaggaggatcttaagagtttcatcaccatctcaagatgatcattttcaacctttttattcttctacaaatccggcaggaaaatgggaaagatcagtagttgcccactcaaaccatgaaccaagcagagaaaaaacagagtacgtagaaagaaactagtttaaaaaaactattgcaacttcttcttccatctcagtttcaaggcttgagtgcgagagccaatccaactttagcactcttgtcaattgactttgtgtcgacttctccagagattgtgaagaatgacttgggtttccactcgtgttgaatgagagcacttgcaatacccgcactattgacacgagccttcacagaggtcaaggggtcaagcgagtgctgtgttccaacagttatggtgctgtccttgctagataacttgtggctcacttcggctccaaccgcagtgttgaacagcgggttcacaatgtgatagtaagatgcattcaatagatcgcccttgtcgttcctaacaaacaacaaaatcaaaagatattaaatggaaacattgagaactccatctttcatccagaattctcactaaaaatcacttacacagtaagggaggcaattaagtcctccttggtgaagcttaaaccagcattgatcttggtgaaatttccagacttggtgtcaaatgaaacatcagtaccaacagccaagacattggagccaatcacaccagagaagttgacagttgggttctgagtcaatcccatgcttgtgctgataccggcgtactcatgcaagtattgcagctcaacctgtttataagacgaaacacgataaaaatgagaagtcaactctcaactgatgaaactttaaaacaatacaaagaaatgttgttgaattaataaaatataccttgccagaattttggtcaggaaccttgaagctgaagattgacctcagtccgggtgcagcctcatcaacggtagcggtgatcagaaactgaaaccaatacacacaaagttgtaaggtaagtagcccaacaaacaaacaaaaaactataactcaatatacaagaaaaacaggagatgaaattgagtacacaaatacacttacagtagaatcagtgcaaactttcaaatcagtagtaatgttctttcgcctcgactgaaaagcgacatctcccaacaataagtcacctttcttagttccggttgaggtgatggcctaaaacaaagaaagagccagattatgagcaacgatgcccaagatagaagaaatccaatgtttaccatcacacgaaacataagaacaaagtaagaaatccgttacataagataacaatgctaattcgacacaaacctcagaagctaatgaataaagcaaaagtggaaacagaatacagaagacgacattccataaaccctaatcatctataatgaaatgagaaacttacaacaccggcaggagagaaagtggtgatactgaatttctggtcactgttgtggtctttgtacagaagatctgcaaatacacagagcagagcaacagttttagacagcttattaacaaaacattctcaaaggggacttaaatggtgagaaatgctaaacatgaaagagaatcacagcattcaaattggctattccagatcaacgataaacaaaacagggtctattgagaaaggtagagagcttaaacgagagtgacggagacattgaacccaaggaattactcatatcagcaccaatgattgaaatccattacttatgaatctctacccgatcgaatactcgaaatctacgcatgcatctatgatctatcccggtagccaaatcgggaccgggaaaaggaaaatctaagagatgagcaaatgaatcaaaaatcctaaggaatcaaaagaaagtccagattagaagacagaacgggacactaagtagcaacaatcagatcgtctacgccataaacagatttaattgaacgaaatgaaagagaagaagtgagggagataataaaaagatacctctggcctttttgccgatttcggtgtagagaccgggacctttcaccattgttgcttatctgagaaagttggaggatgttctgaaaagtcttctctgagaatcgaaagaacaagagctggaaaacgtggttggcgtctataagagagagagactgaggaaaaccctaaaatgttttttatttccgaatattatcagagaaagaagagttttcctgtttatcaagcataattttatcagccgttggatggagactcgcttgcttcagtattccttatccacagccgtccatatatttattccccactcaccaagaaatttattctcatttattacgtggcaactaaacggcgtcgtttaataacacatttttctttccacgcctaaaatgagaaaatcgtttttttcccttgatgattagtcgcataaatttagctatttcatcctttattttagtcatgaatgagtaatcgaatgtgatggtgaaatcgtgatttttacatatttatcaaactattttcagaaaaatatcccaactagttagcggctgatatagtaaacgattagtcaagtctccgttatggtagcaatttatactacaagcagtctgacattttcactacttttagatgcatcatgagaatgtaaacgtaattgtttcttgttgctaaaattggtcgaaatcataatgttagtctctccatagaaatatccaaatataggaaacgaacaaaaaacaaggagatgtaaaattaaaaagaaaaaaagaaaacaaagaaagctgtccacaagtaaattatggtggctttccatacataacgggaaatttttctaaatatagtagttcactttcttcaccaggttttttttatcattatttaaacaccaacattcatgtttgtcaaacttcgcaatacgattcatctaccaaaaaaggctttaggtcaaacagaaataacgacctaaagctatgtttaaagcttagcagttctccacatatatttcaatatataaaaagattacccctttttaaaaaataaaatagatatttgttttccgtaaaagaaaggggtaatcaaataaaatggagacggctaggcttttcaaattagtgtgtgtgatatgtattgccagtttgattccgaccatacgagccaatgttgctgatgagaccgatgagtattgggtaaacaaggccaatgaagctcgtaaacatacccttatggcttatcatcccgacccttatgagatcgtcgaccacttccacgagcgtcattacgagtaagtcaaatattagtatctcgatctatatatgcattgtttttgaatcctaccgatttgtcgtctcgttgaaattaaccaggcttgattgtaatcattagagaacggtttggattagtttattctgatttcattcaaattacaaatatttattagtagaagttttttttgggttgtaaaaaggatgttggatttatgatggttttggtttggtgtatatcttcagcaactcgactgacgtcgaggggaccgaggaagagaaggcggtcgcttccgaggaagaggacgtcattgagatgatttctagtccgacaaacagcacaaggcggagcctaaccggtaggggcaagggaaaaggaaaaggaaaatggagcaagctaacgggaccttgcaccgcaagcaaccccatcgataaatgctggcgttgccagcctgattgggccagacgtcgcaagaagctcgttcactgtgtccgtgggtttggttacaggaccaccggaggcaaacgcggccgcatctatgtagtcacgagccccagagacgatgatatggtgaaccctagacctggaacactacgtcacgctgtgatccagaaagaacctctatggatcgtttttaagcacgatatgagcattcggttaagccaagagctgatgattactagtgacaagacaatcgatgctcgtggcgctaacgtgcacatcgcatatggtgctggtatcacgatgcagtacgtgcacaatatcatcatccatgggcttcacgtccaccacatcgtgaaaagcagtggtggtttgataagagattcgattaaccactttgggcatagaggagaggctgatggagatggtatctctatctttggggcaacaaacatttggcttgaccacatttctatgtctaaatgccaagatggacttatcgacgctataatgggttccaccgcaatcaccatctctaactctcatttcacccaccacaacgatgtgagcattccacaacgtaattaactcgaccgttatactattaatgacaacccaagttaaccaaaggatcttgttatgtttttgggttctgtctttaggtgatgttgcttggtgcacaaaacaacaacatggatgacaagaagatgcaagtcacagtggcttacaaccatttcggaaaaggacttgtgcagaggatgcctagggtccgatggggtttcgtccacgttgtcaacaatgactacactcattgggagctttacgcgatcggtggtagccaaggtcctaccattctcagccatggaaaccgtttcatcgctcctcctcacaaacaacactacagagaggtccaaaatgatttgagtgtgcacatatatatatggcatcaaatcaaagtactaatagaaaacatgtgtatatataggtgacaaagagggattatgcttcagaaagcgaatggaaaaactggaactggagatccgagaaagatgttttcatgaacaatgcatatttcagacaatctggaaatcctcatttcaagtgttcgcattctaggcaacagatgataaagcccaaaaatggtatggccgtttctaagcttaccaaatacgccggagcattggattgccgggtcggaaaagcatgctaaaaatataactcactactaaattttttctctttgtatcaaagcctatataagaactgataaaatcatggggtaaaaatggaaattaattattctaatttatgaaaggctctgtgtaaagaatctatgcgaacggcttgatactttgtaactcttaatttgtttgtgtatgtttttttgtgctcgttaatttgtttttttgcaaggatgacaaaatagaagtaaggtaattaattttaaaaacgatgacttgacgaaatacatatatcaaagacttagaatcaaagaatttcatacaagaagtattttttcacaaacatattcttttttctgaattttttttcattttgattaatagtgtccagtgacatgcagcgcaatttttaattcttaaacaaaaagaatatcgagcatggatactgccgaaatcgtcgaagatctcatattttattttatctgataatacggacaagtcaaaaaccttattaataggctcaaatctaattattaatcagcttcatatttgacaacaatatcaaaatcttgagtgcaaatgacaaaaggctcaataaccgcacaaccaagaaaaagaatgataaatagcaccaataagtgttgtggtgattcatgcagcactacaatactaagataagatatctatattgctgatatttgtcaatttaagtaattttgaattttgaataaaaccaaagtataatactaaacgatgcatggtgcactagctcactagctagtaatactcggaatagtgtgtttcttccaaaagaataatatgattaagaagattaaaacccgcctataaatatctactaagaaattatagttactcacacttacattatacacatacaagaagaaaaaaagaaaaatggttaggatttcagttttagtgtgtttggttcttttggttacaataggagtcatggttagtgtctcactcgctgacaacaacgaagagaaatcgactgatctgaagaaattcaaaggaggagtaactgatcactcgattagtaaggcaaatgataatgatcacgacgatgatgatcatgatcaagacgatgataatgatggagatcacgatgacgatgaccatgacgatgataatgatcatgacgatgataataatgatcatgatgatgatgataataatgatgataataatgatggagacgatgaccatgatgatgataataacgatgatggtgatgacgaaaagaagacgttgagggtacacgagctaaagaaggggaatctaacggtcaaatttacaaaccggggtgcttctatcatgtctctccttttccccaatataaatggttagtggaccatatcatatatatatatatatatatatcgttttgtacgtattcatatatattatttagtgaaattcgagtaatttccaggaaaattagaggacattgttctgggatatgacagcgtcaatgaccacatggttagtaaaatactttacttttaggtcaaaataattttggtatcagatcttgaaaagagatttaattagctttgtatcagattgacacggtattttgtggagtgacgttggcacgtgtagccagtaaaaaggaaaaggccgctgcaaacgatggcaaaaacacgatccatggtaaatatgttttaattaattacgttctaatttaagtggacttcataaatcataaatgacaaaattcataattaacatttttctctaattaatcaggtgggacgaaagagtctagcgatgtgatttggagagttaagaaacacaaacataatggcaaaaaaccttatattgttttcacatacacaacaagtcctgatggcgatcaaggttcgttttttatccttaaaaactttatctgtatatcttcttttttctattatatatgcataaatgttaagatagagaaggtattcatgttattcaatagggaaacttgaagtcactgtgacatataagctggtaggagaaaacagattgaaaatggtgatgcaagcaaaggctaaagagaaaactactccgttgaatttggttcatcgttcttattggaatcttggtggtcataacaatgaagatatcttctctgaagaaattcaaattctcggttccggttatactcatctcgacgataatctcactccaaccgggaaaatcctcgccgttaaaggaacacccttcgattttcgccaactccgacctattaaagacaacatcaatgagcttaagacagggtaaaagtttcaaacaaaccggatctatcttgaaccggtttgtgctacataatttttttaattattaatgttggatcaactaatatgtattatttgttttatctttcgaatgcaggtatggtataaattattgtctagatggtgttgcaaataagatgagaaaagtcgtggagcttgtggacaataaatcgaagataaaaatggagttatctacagaccaatccggtctaaggttgaaaaccactaaaccaaaaaatggatcggttcataaagctt

SEQ ID NO: 392 - DNA, 105543 bp, Arabidopsis thaliana
gaattccagtgataatgatgatgacgggctcctgggatcacctgcaatggtttcgcgtcccttagacttcagaactattgatttgaggttggctgctggtgcgtatgacggatcaactgaagcttttcttgaagatgttcttgaggttggattttccctcttatgtctgatttttctttgtgcaattgatggtatgatgctttttgtgcgatttaacaattagtttctgaatgcttatactaaaactgctattcattttgggcatttcatgtttctgctgttagtttaacactgctggtttagatgcgtaagtgtaaagtatcacaagagccagatttatattaggaatacttttactttctctttatgtcatagaagtatcaggttaaacggttgaacgccagaatttttgctggctcatttgataactttagatttgaatgcatgcaacttgattttttatagatgacatgctaaatataactttctaatttgcagctgtggagtagtatacgtgttatgtatgcagatcagcccgattgtgtggacctggttgcaacattgtctgaaaaattcaagtcgttatacgaggctgaggtttgtcttctctctcctttttctgctatgctctgcacaatagatatattcattacttagtagcatcttgaagtggagacagtcgtttatattttggcacttttgtgaaataaatgtgttaagatttatcatttctgaaagttataggccgatcaaagaagcatctggagatgcccattaatgctatatgctatgctttagaagggttcttccttttgtctgcgtgtatgattttcattgtgttcgcctttcagaaattgtatgcatggtctcctttttctatgagaatagttgcagtatcggggtgctattattttctcaagtttcaagcctttatttatttgctggtataggttgtaccacttgttcagaaacttaaggactacaggaaattggaatgcctaagtgcagagatgaagaaggaaattaaggacatagttgtttcagtaaataagcttcccaaggccccgtgggatgagggggtatgtaaagtatgtggcgttgacaaagatgatgacagtgttctcttgtgtgatacatgcgatgctgagtatcacacatattgtttaaatccacctcttattagaattcctgattggaaatttggtattgtccatcttgtgtcattgccaagcgcatggctcaagaggctttggaatcttacaaactagttaggcggcggaaaggtagaaagtatcagggggaactcacccgagcttctatggaactgactgctcacctggcagatgtgatggaagaaaaggactactgggagtttagtgctgaggaggtcagttttgaaacttgtctcccattttttgctcattcattcgaaatgtgtcaacttttcattcccaacatgattttatttcgtggtgattacttgtgcaagtgatccctttacctataaattcttacaatcttttggtgctgtttccattggtattatggttgaatttttccctattctgatgcagagaatcttgctgcttaagcttctatgcgatgaactgcttagttcatctcttgtccatcaacaccttgagcagtgtgccgaagcaataattgaaatgcagcagaagttacgctctctttcctcagaatggaaaaacgcaaaaatgcggcaagaattcctgacggctaaactggcaaaggttgaaccgagtattctgaaggaagtgggcgaaccacataattcaagctactttgcagaccaaatgggatgtgatccacaaccacaggagggcgttggagacggagttactcgtgatgatgagacttcctctactgcatatcttaacaagaatcaaggtaaatctccacttgaaaccgatactcaacccggagagtcgcatgttaatttcggtgagagcaaaatttcctccccggaaacaatatcatcccctgggaggcatgagctacctatagcagatacctctcctcttgtaacagataatctgcctgaaaaagatacctcggagaccttgcttaagtcagttggaaggaatcatgaaacacattcaccaaattccaatgcagtagaattgccgacagctcatgatgcatcttctcaggcttcccaagagttgcaggcttgtcagcaggatttgagtgccactagtaatgaaattcagaatcttcagcaatcaattagaagcatagaatcacagcttctaaagcaatctatacggagagattttctgggaaccgatgctagtggtcggttatattggggttgctgcttcccagatgaaaatcctcgtatattggttgatggaagcatatctttgcagaaacctgttcaagccgatttgataggttcaaaagtcccctctccgtttctccataccgttgaccatggaagactaaggctttcaccctggacgtattatgaaactgaaaccgagatcagtgagcttgtccaatggcttcatgatgatgatctgaaagaaagagacctgagagagtctattttgtggtggaaaaggttacgatatggagacgttcaaaaggaaaagaaacaagctcagaatttatctgctccggtatttgctacgggtcttgagaccaaggctgccatgtcaatggagaagagatatggtccatgcatcaaactggagatggaaaccttaaaaaaacgggggaagaagacaaaggttgcagagcgagagaaattgtgtagatgcgaatgcttggaatccattttgccatctatgattcactgcctcatatgccataaaacattcgcaagtgatgatgagtttgaggatcacactgagagtaagtgtattccttattcattagcaactgaagaaggcaaggacatctctgattcttcaaaagccaaagaaagtctgaaatccgattatcttaatgtaaagtctagtgccggcaaagatgtagctgaaatatccaatgtttctgaacttgattctgggttgataagatatcaagaagaagaatctatttccccataccattttgaggagatctgttccaagtttgtgacaaaggattgcaacagagatttggttaaagagatcggtctgatcagttcaaatggcattccaacatttcttccatcgtcatctactcatcttaacgactccgtgctcatctctgccaaatccaataagccagatggtggtgattcaggggatcaggtcatttttgctggtcctgaaaccaatgttgaaggcttaaattctgaatctaacatgtcattcgatagatctgtcacagacagtcacgggggtccactggataaaccaagtggactgggttttggcttctcagagcaaaagaataagaaatcttcaggtagtgggttgaaaagctgctgtgtggttccacaggctgctttgaaacgagtaactggcaaagctttgccgggtttcaggttcctgaaaaccaacttgcttgatatggatgtagcactgcctgaagaagctttaagaccatcgaaatcacatccaaaccgtagaagagcttggcgtgtatttgttaaatcgtcgcaaagtatatacgaggtttgttttaatccttaaccttttctgctctctatctatagaaacagataacaagctgtttttctaatatctacgcttttcgtatttatttcagttggttcaggcaacaattgtggtagaagatatgattaagacagagtacttgaaaaatgaatggtggtactggtcttctctttcagcggctgctaaaatctcgactctctcagcgttatccgtccgtatcttctccctcgacgctgctatcatttatgataaacccataactccatcaaatcctatcgatgaaacaaagccgatcatcagcttaccggaccaaaagtcacagccggtttcggattctcaagaaagaagcagcagagttagaagatctggcaagaaaaggaaagaacccgagggatcctagttaattattaaacccacgggaaaaagaaaacctcgtgagcccagccagggagaatgtgaaccggaaatatggatttattattccggtatagtcaaaagtggagccaatgtgtatgtggtagatataggcaatgtttcaatctatctggaaccggacctgtaagttccggatgttgagatccgttttggtggttcatcatcataagaggcctaagtcctgtttagatctttttcttggaatggaggttcaacaggtggatgagccaaggaaagtatgtgtacacatatatgtagaagactaactagtgtggaattaattagtatcaaagtcgctttttagacattagctgatgttagaacggaaacttcaattattctttataatctctctctttctctctagagaggctttctgaagaagatcaatctttttaacttcaaatcagaacactgcattgacttgatttcataaaagcatataatgcaactgataaaaataccgttgaacagcggaattattccacgagtcaacaattatcgtcaacatggaaacaacaagaagatgactcttgaacttaaataaacacacatttattatcagagtggttttctaaggccatccccagaaagccaatgattcaccgtgatgatcgtgcgacggtgaagtggtgggcacaaagacgtcggcgaaacagctccggtcattgtcatgatcactggcgttgctgttgtcttggatgggtacgatgcttgggaagtaagagtcacagctgtctagtagttgaggtgcgtcgtcgtctagtaccgcgctcccaacgctccctgaacttaaccggtcctcggttttgattgctgccgcattaatgtaaaccggatcaagttggtttggttcgggcacttgaccaggtggttcattagctgtctcttgtttgccctgaagcttttcggtcagggaagtaacctgtcgggttggaaagattctaactttaatcacaacggtcaacacaagcaacctcctcccataaaaagataattaaactcgttgattgatttgattccccaattttctttctttttctagtctctcctctaatttatatatatatgatgatggattctctctatcagcttgtgttgaaaaataggaaaagcatattctcttttcacttgatgctttttttatttttctcctttggaccaattaaggtaaatcattcaatttgtaatcttgttgagataaataatagtcccatgtataagtacctcggatctgagcttatcgttgtccatgacgatggagtcgtagttagaaagaagttggtcgtaagtggacttgagaagatcgtagtctctctcaagctgttttgttttccaacgagctcggcgattctgaaaccagacagccacttgccttggctgtagaccaagcttcttggcaagctgagtcttgcgttcaggctctagcttgttctctgtctcgaagcttttctccagcagatgcaccttttaccataatataatgagaatctatcaaacttgtttttgaatagtggatcgttaattattattgtggatagtgagagaatctacttgttcggtagtgaggcgacgcttcttttcaggcaactggtcgtcgtaaaagtcatcgtcgtagagatcctcaggggagctaaagaagggccttcgcttcgaagtttcctccatgttcatcatcgatcttgctcctcctccttcacaaattcaaacgaacaactgctgtcaataatcgaatgaggtattcatattcaaattggttctcatgtgtgtgtatgtgtgttcctaacgttttatacacaaaaacaggggaaattcaccgaaaagtaatgtgttccaagatgatgaaataagattaagagagtgagaaaagaaccttggacgacgggattgagattcccaaggaagaacatgctgttgccgtgtgaagcagatggatcgaagaaaaacgaattggattccatttttgatcaacagaaataaaacaacaactacttctgagttctgagaaagaggaaacagagagaaagaggaagcagagatagcgagaagatgattaaaaagatgggaagaagtaggaaggattagaagatcatgatcttatggcggaagaagcttgtactccatagtaatctcgcaggtgactccaacgggcagatacaaaatcccatcatgaactgctattctcccctccttttccagagggatcaagatccaacaagaaacctatctatatccaattttcgaatcacgttatgatcacgttaagagaaagagagccagagagagagacaagttccttgttggttttgtttttgcaatgtgagcgtctcagctaaactcatttccttcaacaagcgccgtcttttataccaaccagcaatcctcgttaaatgactcttataccctctcttttttttcctacatctcacactttgcaatcaactggattaaatatttgtgtagtgtgtcacagaagagcaaatactatcgagaataactaggctacaaatttctatcaaatatgtaagaaatcgtactttgcttaaaaattttaaaaatgacatgatggttgaatttacttattttcttatataataagtactacttaaaaactaacaaaagtttttcaacgaaatcttgaaaaggggcaattgtggtaaatcgaaagtgattggcttgtttacaaatcggaagtggacttttctgagctctctggggtccactttctttagcgagtggacttggaaacagatctcatccgttggatttgaattataccttttctctaaagttatttattattattaaaaaaaatagttttattcagctgtggtggttcggccagagtgtgttaaatagggttgcatactcgacggtcgggtcagtgtcggatctacgcttgatcctcattcatctaacggtcctcctcatcctgttacttcctattttgcacagccctgtcactgtatcaccatgtcattaaaaaattcattaaaatcaaattcacgtcattcctatcttttagtatttgtttcttattttaatgcaccttgacgtctttgcacacaatattaatttcaaattatacgtattgcgtgactgttacagcaaaattactctttaaaaatcacatttatatggttagtaactttgttttactattgctatttatgaaaaaaaaatatactagtatacaaccaaaatttggtgaatatcgatttcatgtcaccttacggagaaaaagaaaacagaccaggtgcatggaattgcttatcgccgcactaatttagttatattaacttatcatgttgtttacacaagtccccacgtagcttcgtcctgtcttttttttttgtttttcttacacattcagctattttctcagttaccattttcatgatcatgttttcagtgatatacggcattcataaatttattttataaaaatattccttgttcgtttttcatttcttcatgactcttcagctacccaaactgcaaatactctttatatattagtacacaatacatacatgggtatgcatctttatacgactttatcaatatatgcttacacacatactatggatatgtatatattgttgatcaagaaaaagcattccactttaatttgatagctagattaatgcaatatgagatcggtaacaaactgtcatccatgatatacgtacatataactaaatatgattggcctctaaatattaataattacactttagttataagaatttcctaaattacttaaccatcataatataacatttttgtgcataacacttcctcattccaccgtatttcttccgctgcagttaattattcaaaatcctcgtattcctatttttcgattcaacggtaaatatattaataagaatgatgttttatatataagatatacagatgtgaaaatatgcttaattatgatattgtctcctttcattccatgtgttagccagttggatatctatggacctttccaataaaggaatatctttcagcatccatataagaataaaagaggtaaaaaaacatttgatttaaaaataaaataaaatagtagtagtacgtactgaagaaaaattaaaagataaaaagaaatttgccgttctacgaatgagtttttttttttcacttatccccaaaagataacaatcttacagacttacacacacacacaaataaaagagagaataaaattcataatcattatatgattgatatgtaacccaattccaaatttaaacctctctgtcttctaaatagattccaattttttttctattatcacaattcacaagctctaattctacatatataatatcttaaattgtcattagataactagtaagttgactccttaaatcctatgatctcgaaatgtttttttagaaaataatctttgataggtacacgtatagcttataattgaatgtatattgttttcattaatttctcaacttagccctaatttcttatagaggaaaaccttgactagtttttgtgttcatttagaaaaatctcaaatcgaaggaaaaatatcttcatcttattaagatatatagcaacacaaaaaagaatccatgtttttccttttgttataatttttcttcacaactaagctacgaggccttgaaaatggtggcatctttttcattggatagtgtcttcagaggttttcctttttatttttccaaaaataggggactttttttctttatacctctattatttgctttaccaaaaaagatgattggcacaaatagttcatgtttaaagcattaaagtacaaaattatggattaaagaaacaccgggttacaaaaacggattatatttgaagaaatagttttgcagttgtggatcgtcgtctatggatgatttaatgttgttcatttcagcaaaaactgaggcgtcgataaaattttaatatggaaaaatggtgtttaagaagaaaggaaagaaaagaaaagaaaagaagcagaacacctgagaggaacaatgactttaggacgtgttggtagtggactgtgtcgccatgtgtgtggttctctgaaaagaagatcaatctataaaggtgtgagcaccattcttagtttaatagttttccccactatcttttttttccttcttctatatatttcttaatacgaaaatactaacttaaaattcaaaaatacaaggaaacctttttttttgtaataaagggaaactttcactggaatcgtaagtcgtaactatctgtcatgatataatcatattttagcttctttatattaattttttttcagggccacgatgtcattttcagaaagatgaaaaggatataactattaaaatttatatataaacaaaagtatattcagtcttttcgtttgagaaggtccattcattatggtatgggttttcaattctcactgtacgcgaacagtgatattcaacttcatcatctcaagccacacacgtatacacatttaactttacagatacttacatttatagaattgtacaacagttcttgttacgcgtatgtacattcgtcacgtaaccctttactaaagcatatacagtgtcagtattagtatatatatcatgtcgaaactatttttgatttctagcaatttcttttgaaagtgataaattctatatcgtcaagcaatatttaataatgaacttgcgtttcctttttaaccttatacgtatttatattaggaaagaaagtacatgagcaattgagcatacatctttaagtaatcaactaatcaaaaaaataccttattaaagactggattatttatagcatgaataaagtaccagctacaatattagccccctccccccactatatttatatgtaaattacgtttgtgttgacttcatttaaagatgtcagtatgtcactaatattggacgtaaggtgataatgcaagactctaatgaagtccacttccaaacaaatgaagaaaatgaaattaacattttcatcacaaagaaattacatatatgtgttgtgttagttttttttctttcagaaaagtcgaaaccgaaatcacataacggattcactatgattctataactaacagataatacaaacaaagcccaactaacgacccatcatagtaaatcacagaaaaagatgataactaaacagatcgtgcaaagaaagcccaactaacggcccatcataataaattacaaaaagaaagaatccggaagaaaattgaaatcttatccagagtgtagagagaaagaagcggagtcacaaaaaccccttatcctcttcttcttcatcatcatctctaattcaaatatccgacgcagacattttagacaaagttactctctttctttctcatgttcttttcggacagaacaaaactccctaatccaaatgtcaattcctttggtctctctctgaataatcatctctcttcaaaccctattcaattttaactatcgatcttcggctaagtctccaatggcggcggcgtttgcctctcttcccacatttagtgtcgtcaattcctccagatttcccagaagaagaatcggtttttcttgctccaaaaagcccctcgaagttcgttgttcttccggcaatactcgttacactaagcaggttccggtctttctcattccattctctgtttcttccttttaacacttctgaattggatattaaccctacactctccaatggataatgtgattagatttgtaaaaatggatttgactgtttcagacttcgaatcagttgaatttttaccaaagagtcaactttaattttgttaatttgatgggtaaagagatcaaatcaatcccttgacactgcaatgcgagattgatgtctaacactgagaaacttatggcacacggcagctgaaactgattaatttctctgtttttgaatgcagagaggggcatttacatcactgaaagaatgtgcgatttcattagctttatcggttggtttaatggtttcagtaccttcgattgctttgcctcccaatgctcacgcagtggcgaatccagtgattccagatgtttcagtgttgatctccggtcctccgattaaagatccggaagctttactaagatatgcattgcctattgacaacaaagccatcagggaagtgcagaagcctcttgaggatatcactgatagcctcaagattgctggcgttaaggctctagattctgttgaacgggtaaagagttttggtgatcacataagttctcttatactttgtagtgatcagtggatttgcaggtttatgttctgtttttcaaggaatctgagtatttgttttcattgtacttgtgtttggctattgtagaatgtgaggcaggcaagtagaacattgcagcaagggaaaagtataattgtggcaggttttgctgaatcgaagaaggatcatggtaatgaaatgattgaaaagttggaagctgggatgcaagatatgcttaagatagtggaagatcgaaaaagagacgcagttgctccaaaacagaaagaaattctcaaatatgttggcgggtaagttttaacataagaggaatgagagataaaagaaatgagatgggttatgctcatttagaccctttgtgattgatgactgcagctgagatcttcatgtggggcattcgcagaatagaagaggatatggttgatggctttccatatgaagtgccggaagagtatcggaacatgcctctcctcaagggaagagctagtgtggacatgaaggtcaagatcaaggacaatcccaacatcgaggactgtgtgttccgcattgttcttgatggttataacgcccctgttaccgccggaaactttgtggacttggtagagaggcatttctacgatggcatggagatccagagatgtaagacagtagcaaaatacagttttgcttttatatatgggattgaagaatgttgattaatgtgtgtttttggtttcagctgatggatttgtggtacaaacgggagatccagagggtcctgcggaaggatttatcgatccaagcacagagaaaacgaggacggttcctctagagattatggtgactggagagaaaacgcctttttacggctcaactcttgaagtaagtctctcaaaatctctccttgtcagagacttatattatatagtcttttaagctttgtttggtttttgggtgttggtgaacaggaacttggtctttacaaggctcaggttgtgattcctttcaacgcttttgggacaatggcaatggcaagagaagtgagtcctttcttcttcttcttcttctttttcatagtttatattattatgtcttatgaaacatatacttattgagtaacatataaacaggagtttgagaatgactcaggatcaagccaagtgttttggctgctaaaagagagtgagctgacaccaagcaattccaacatcttggatggtcgttacgctgtctttggttacgttactgataacgaagattttctagctgatcttaaagttggtgatgttatcgaatccattcaagttgtctccggtttagagaacctcgctaacccgagttacaaaatcgccggttaactcctcttatctttttccttttcttggttcgtaattaatactctgtttattttaattttgtgagagtatattaaaggtgcatgtctttttcctacaaatatagtatataattatgaaatgtttgaattttcatgatggaatgctttatatttatcagaaatgttgaatgcattaaacaaataaatcattggaaaattataaaacaagcgaagatcaagaataaggttttgttgtgtgttatgtataacgtatgagatgatcgtttgaaataggtacgacattcatcctataaatcaaacaccaaactaattaaaacattttaattaccccacaattaacttttaaaaataatctctcttcttccaaaatagtaagagttaattataataataatgggaacgtagtgcatgtgtgtgtacttcatgggcctcggtgtcggcggaaacagaaacagccttgttgttggtcaggaggaatcattcctccgcctttggaagtatcaatagcctccaacatagccacaacttcctccatctccggccgcttctccggattcgcatcccaacacctcttcatcacgttcgccagcgagcttggacaacatctaggtatctctggtctcaaattctatatatcattcaaagaagagattgatagatatactctttataggtggtaatccacaaaatcaattacgaaaagggtagttaaaaaggtcgttttgaaagacctggcggacgacggcggaggttacttcggagaagctgaggtcaggataaggcatgtcgcaacagtaaatctcccaaagacatatcccaaagctatacacatcgcactttctgttgtagggactcccgtttagcacctcaggagccatatagcccaaggttccggtctcaccggtcatgtcgttagggtttgaagcctctagacgagccacaccaaaatctgcaatctttaaggtgcgtgacttatctaaaagcatgttctccgttttcacgtctctatgcacaatcttctgagagtgcaagtaactcaacctaaaacatatacataagtaatcaagatttaataaaatggtaaaccgggttaaaccggaagtagttgatgaatcaaataatgtacccgcgagcaagatcaagggagagttggataacgactttgaaggcgagtttgcggcggcgagttttgatgaggaatgacttgagagcgccgccggggcaatactcaaccacgacacagcaaacgttactcggcattcccatttgcccgttttccgtttgtatgctcatctccgatgtccccatcgccgctcctatgaactttttttgtttttacatatttcccaccaaacaaaattaatataactatacaccaaaaacacatgacatcttttatttaatgctcagaaagacgtaacatttgtattaaaaaacagacatcaacgtatacctactttatctatacatgtgcctaggggtgaatactcatgtttatagcaacttgattatgtttcaattaatcggttaagtttaattcgatttcggttgttcaccggtataaaagagtgagtgtagtgtacgtaccttggtgacattgggatggtcgagcttatgccacacagcaacttcttgagtgaaagcagctctaagcgaagctatctctgcgtctgacctgtgcccctcttctccccagtctagtagttttactgttatttttaacaatattttcacacataaatcaagagttaccaaagaaaaaggttcaattgaatacatccaaattttgttaattacactgataagtgtaaagaaaaaaaaaaattgttagtttctttatctatcactaaattacggaatataaatatcagccggtatttagcggattagcaaaaaattaatgtgtacatgttaaacatattaccaaacctagagtaaaaaaagaaaagaaaaaatcattacactaactaatgcatgtttgtttaacttgatcattaagaaacctaaatttaagaataatattttccatgtaattcgattatttatttacttttttcggaaagaaagtttcgattcttctctaaataatttgaccaaaagagggtacgtatacatatctaaaacatatttcttagaataaaaacaaaaagttatgaatgatgggagagagaaagagaaattgtaccggcgacatcttgaccatcgtagattccacggtgaaccgtaccaaaagtacctctagcaatcacacttttgattataagcttagaaggatcaatctcccactctctcctcgacttctcaacctcggtcgacctaattatgtcgttcttgctgctgttgttgttgttgctatatccaccaccaagaagcggcctctgaaacacaagctgtcgatgtccgaagttgttctggttatgtcgggtgttattgacgttatcttcaccatcactcaaactcttcctcttctccatcgtccatgctttacttaagtgtctctgcaattgctcgtccagactctttaaatctatctgatctgctctcacgtatcctactcctccaccactctccgccttctccttcattttcttctgcaaaaccaaaaccttttcaagttattcgaaatggcttttttctcctttactaaattgagattttcatcttttttttttttttttttttttttttgattgaggttattttattggtttctcaatgggttgtgaattgtgtgattggagtgtgtaggagttgaacaaaaagaagcagaaaatagggaagttgtgtttgtgtttattgcaacaaacaactaaagaagaggctaactctcgcttctctcttctctgtgattagacttctcagatttcttcatactcaaaaaacctttcttttatgacaaacaaacgtttacacgtgaccacatggggtgtccttaaggtgctaggggtcgacgtgtgtcggctccacttctcacaactctcttttggataataatttgtatccggacccaaaagtccaaaacaatggtctgatatactgttatcatttatttttttctgattttatttttcaatttatttaagattttttaaggaaaaagttttaactcttctctttttttttggtaggcaattaactcttcgctttctttcggtgtatttttctcttaaaaatcagttcaagataaatataaaaataaaatttatcattctgaaaatatatattagaaatctcaaataaaaatatgtaacatcaaatataatgtatttatcaaatcaatgagtagatatatatagttcatgtcttcatgaaatcatgggactcttggtcactttgctactttttcctcaagctttagccttttcgttttgtgggtttaatcttcttcgatcgatttataccggattcataaacgtcgtccttggacaaagatttaagcccgttcaacggtgctttttcatgatggatatgtaaaacctaaaccgaacctgaccatttaattgccacaataaagaattgcaaacttgggcctaggcccataatgtgtaggcggacaaatttaaacagcaacatacacagacaaatttcagatgtttatattttatatgaccaaaaaactacgaagctacaaatctacagtttcactatccgcatccggatctgttagactgggatatccgggttccgggtaccagaattcgacagttttaaggatttgggtatcgaacccagaaattaaaagatccagagttctagggtttgtgagatatcgagaagagatcgaaatgattttgtgaccttcaaagaatgattttgtgtttgtgtcggcaagtgataattaattgggcttgggtatcaaaaatatttggtttgttaaatatatgggcttttagctaaatgggtttccaagcctttttatttcatgtagttaatggtaccggatccggatatccgggttcatttttttcattatccggatccgcccgtcccggatatccttatttacgattcaatgatttttttttgatttttttttttttagtttttattcaaatttctgtcccccaagattttaattctgtaaaatcaaaaaccagtttcatcaagatctgcatgtaaacaacaacttggtgttattgaattgacaatgtgaaatcgggtaaggcttcaaagagtttcctacagcttccaatgtagtatggtagccacatctttaacctaccaaacaacatagaaaataaaatcaaaccataaatacaaccgatttgatacacaaataataaagacaattgttcataattaaaccacgaaagatctatatcatctgcttttcctttttgttttatatatatgaagaaagttggtagagagggagagataactcatcacagtcaaaggcacattacaaattacatatggggtagatatatattatatacgatgataataatgatgatgatgatggatggtcatgatgatgatgatgatgatggattggttcatacagagctagtttcggagaggccaaattcaagtccccaaagctcaaaagcacccttgacgaagtcatagtagcctcccttcaaagcaagtgttcccttcacaagtccttctctcacaaatggatatgtcaataggtttgctagtgaaacattcaccgcctcctgcatttatcaatacatttatattgttatatatgatcagctcatcgatctaacatgtgtttgtataccctttcacatcggccacattgatcttcaaaggctgaatctccaagttctgatataacctttgacttggctggtaaacagattttgacccagtcctctatgaagtcactgcaattaacgtatatattttttactaatctcatttaataaatcctgttattaaaattgattaaattttaataaaatggatatagagatattttacgtggagttgtttccatctaaggggaaagacataagccctttgatcccaccacatgcactgtgtcctatcaccacaatgttctccacctacagtaataaattcattcaaaaattaattacatgtactttgataaataattttttttggttaaggtgttaattattttattttattttcaccttaaggtgtaagaccgcgtattcaatggctgctccaacgccaccgtatttgacctgccaatttagcaacccaaaaatgaaaatagaaagtgaatgtcacgacttctcaagacaaaagtcaagactcaagaggcagaaggtttaagatagaagagtttatatctatagagagacagacgtgttaaattattaaccttgtcgaaaggaggaaccatgttggctatgttacggaccacgaaggcatctcctggctgaaagtccagaacgtgtgatggacacacacgtgagtctgaacaagcaaacaccatgtactgcaccaccattcacacacctttgttaattactttttcttaatgtttcatttttaatttataagcaaccatgatatacacatagtattagttttatttttaatttaccttaggactttgaccctttgcgagctcaccgtacaaagcagggttggttctgcaaataaaagtataaatatgaaccagttaattaatctagaccactttagttggtgacataattaagaacaaacaaatgaaatagaaatatatattactcgtatttctccttcttgaatttgatgaagccctgcttaatggtttcgacggggtcgaaagctttcttgtcggatgaagtacctgtctgaagagccgctgtgatctgctccacctttgccgctgcaaccgtctttagctcttccttctcgctgccatatgtttatatacatttatagttaaatcacaaaaattatgaattaagtagtattgaaaaatcccgttactaatttataataatgttttagcttttattaatctaatcatgtattaatgtatgcatgcgaatagaaaagatgtatatacttacatgagaagcttcttgagagcttcaatagcctcgtcgtatgcttcggttcccatctcttcactctgcaagttggttgaccaaataaaattagaagaaaatgagtactagtatattttattgtcgtgaacgtaattaagtagagagcgagtcatgacgtgttttaaatgttgaaactacaatcaacctgttcagaacttcattatacgataaagtacaattttatagtcttttatattatgattttattttcgctagtaggaaccaaatcggtaggttgaatgaataaatatagatggcgacttaatcaccactatgctccacacgctctcatatggtacatgtgcatacacacacgtctcagtttcatgaatcgtttttgttgaagctactactagcaacttttcttttatcacgtggatcctacgtacgttctaactctcaaaatttcaaaaatgtcggatcttgggtaggaatgagacaacgcttttaatatttcgaggtgatttgtttttaacttcactagatgtcgaagcaagtagtttgaagatctgtatagaataaggattgaaaatgaactcttcccttgcttgtgattcactaattaagcaactttagtttgattcttgttaatttgggtaattctttcagtaccacgctaaagaccaaaagtcaaacacggatgataatagtaaggataatataaggaaataccaagggaaaaaaaaactgaaatgtgaaacacatgtgacagtttccaagatttgtggaagtttcgtaagctagtttctatagaagatttttgttcctatcactaaaatggcaattgcagaatctatataataatttcgtaaaatctttacaaattttaaaattctgtaactttagtttgctatctatgtaatgtacccctattatacgtaaacagcaatgtaagttatgtaagaaataatgtaggttaagaaacagtgatgaatgtaaaaatgtatacccaataaggggcaatgataggagcaggagcggcaaaaactggctcgttacggataagcgttggaacggaacgggaagacgaggaggaggaagatgaggaagaagaagaggcgggtgggaggcaagcgacggtggaagaagtacgaagagagagtttctggagagaagattgagaaggagaaagtgaagtgagaaagaagccggagagaggagcggtcgacatttgttggcgaagagaagcggagatcagagagagtgagatatgtgtatttatagttagaactaagactcttatggaagctactatatacttaagtgaataatgggattggttgaaagatttgggagtttaaaagaacggagtctcatggtcatggtgaggttgtgggaacgaggataacgaaagcgatagctgcggtgaataacaaactttcttcttttcttgtggatgaggaatattagctcaagatttcaaaacttttacgtgctcttttcttctttcaattcttttttttataaaaaaataaaaggtctcagaaaggtttagaggataaggtcccttatcatgaaaacaaggatcagcctctttcacttaccctctcaggctctcatcttaaataatcaccacccactttagatgttaggccatttgtttgtggtatacatatagaaagatccatacttctctaggctctctctagaccagagattgctattgtatacacaatctagaagatgcaaaggattaacatcgatcatggactgttctactctacgaaacaacagactcagtgaaaactcttagcatgaaaatgaagaggaaataaaaaaaatagagaagaagggtctctcctctcagaccttccatggccataaatcatcatataggcaacattagataacagagtttctattttcttcaacatgttaggagagagcgagagagagagagaaaatgaagaagaaatacagagaccagtaacgcattagggttggttttgggacttatatgtaaagtgggcaacggcgaaactatgtcgacattttttcatgcaaacacacaacataatgtcaacattctcttgtcatagagtgcgcgaatgtggcaatgttgttcacaacgatattagggttaagtacctcgaggaatggatagagacagaagaatggatgtaacattttaacttatgccaaaacaaaacttctacgactttgggcatagtcttattggacaaactgagaatgcgatacaccgagctgctttcgccagcctaaatctttcgctctctgttaacactctctcgatcacctttatgatatttgcatcctgcaaaacattgtacaagttgcttcaggtttatgtcttgaaccaatcaggcaaatataacgtggaacatcttattcaagcttttcctattgtatgaagaagagactactgcatagtaggagtaacctttcttggttgttgaattgtaggcctgacgttagcaacatcaccaactacaattatattgttcgtgtttcctcggtcatctctttccgttggtgaagttgctgaatgcctccaatcaccgttgattatgtacttgtagtagtatctgccacattgtcaataatcaccaagttatatgacacaaatgcattttcataagtttctttgcagtttgcaatccctcaaaagtcacaattaacatgcagggaagattatgagacgttttactgttgaaccttaaaaaaagcatcaacgggaaaggtaaaagaagcatgacttactttccctgtgtaagtctaacttcagtttcaaaacgtggaccgcctttgtgcgttgcttttatcggttctttccaatttcctgtgaaatccccaaccaacaatacctcctccccctgtaaaccaaggtgtaacttaaaacacagaggctagttgctcaaccctacagatcacgagttccataaagaattgcagcaaagtaataaaagcatgtgaagcaacagtcacctcatgtccattccacacaaaggttacagagtgtgttggagtcccatcatgtttgccatcgtccaccatagcgataagatcccatgttgcccaagcaattgcaggtctgtgaaaaaatacatataacttgtctgatgttttcattaaaacagaaaagctatccatggtctgcaggttaatggtcaagacagagataagatggataaaaacctgtcaggtttgcaagcgtgcaatccagtaacgaaactataagcagcatgaagagaggtatcagtcatccagtgcagataagcaatcacacaagcggatgaccggtcaaaaccagtggtacaagttacaaagacacgatggttctttttcagtaaccgtagtaagagcccaacacaaagtggtagcttcttcctaagatcaaaggaatctgcatccctggcaccaaaatatcaaaactgattagagcggtaggaaatgaaagcatgaacgcacataatgtgcctcaaggcgatatgactttgcatactttatagggtagttgatcattaagacttcagatttctggcatgcatcattgatactttgtgaatcgatcccccagttttgagcttcagttccaccttggaaatttagtatggcagtaattccctgtagaaagaaaagtatggccagttaaaaccatactttcaattctatcatttgcataccataggtaggtaatataagtcatataaaagactcacagcttccgacaagttttccacatcctcttctgtttgtatgcaagagccaacatatatttgctctgtaatctgaaaaaaggcaacaagagaagaatggtgtttgagagattgaagagacagagagaatcatgaaacaagagtaatcgggaaaaagagacaaatttcagaccttactgtagcgcattccaagagcatggttataagaaagctctcctttagaacggtcaagggctttgatgtattcctctaaagggaaattcccataaccccattccccatctccaggaacatcttctgaaaagacagagaccagtggactgataggtggagaaagaatgttcttcttagtccctgactgaaaggaattgctctgtctattcaaaagtttccatccctgaggagtaaagaatttggaggaaaacgcagcatagccagagttaccactgccttgtgatgatgctctgagattcgatgataagaggtttttgttccaagtaacaaaagacacacgccctctgttatagagcaaatcaaggtcgctcaaatgaagcagatactgaatgggaaagggagagaatggtctttcaagaacaaggctaaaggatccagttttctctaccagcatcttcctgaataaatcaaaaactggaagaaataaaaaagaaaatttcaaaaacactgatatgcaaagtgtttccatgctaaatcttcccatgttaactagtcaccagcaatgtttagttaacaacattaacaagttatatagaagcctagtactgtacaattcttacttggtatcaccaaaatccttgatttccacaagagtaccaccagaagaatcactagccttcttgagtgtatctcctaccatgatgattctcgccttctccgcattgctctacaaacaaacaaaaaagttaataacttttcaaaactcctgagattactactacttccacatgacattctaaggatcggagaataccccttttttgatggcgtggacgaagatcttgccatctgctgaaagtgcgaagcgaatcccgaggggcttctcgagagtgaccatatactcattcaaattcattttgaacggagtagaagaagacgacatcgcaacaactctaagaacgactcttcttcgtctgttgaatccgaacttttccctcgaacccaagtacgcaattcctcttccgtcgaatacacggccattaccgctccggaatgaagatccgatcataattgacggacaagatcgttcgagagctcctaaaccggagatttgttgaagaaacgccattaaaccgatccaatagagatttttccgagaatgtgtgtgtatggaagaagttggaactgtgagcagaaaacgaggcggcagaggaaggtaagaaagaaattagtggtccacgtgtcttcacgtaggtcccgctttctcgtggaagtatctaatttcctttttatcaacacatgacacgtgtcttttcctctcagtgagaaaaaaaaaatggaaaaaaaaaatatcaaacgttcctttgagtcaacgcattgaattggacttcaatacacgaaacaaaagttacatggaaatatttataaatacaatatttaaacaagtacctaattgctattatagtaattttttgtccagttgtgtaaaactatacaaattaattgagcttcaattaacgacgtaaccctctaatcacggcgaaaactccgatcaaatcttgccggtaaggcaaataagattttcttctcttgtcaccttccccgaccttatacgacaccgttttgttcttaactttcacggtcggcgagctcctcttactggtgtcgccgccgccgtcgctgtggctcctccgcttaagatccttaaaagtatagcaccgttttgatgcacttgagggcaaaacaccaccgtcgctatgacttctcgttagaaatttcttcaaacggcaccgtttcggtgtgctagtagatgattctgagtgtttcgaagcagccggagatctgagtggactccacagacaatttccggggaaacgctccgatattttttcagcggcggcttctttgtctgtcttgttagtagtggaaacgacgttggttttgaacgtcgggaagtggacgaaggtttcttcatgtaacggcgacgtttcaaactcgaagtcaacgtcttcgtcattgacggagttgactttaacggactcatgatctctgatattgtagctttcgttttcgcgggaaactttaactgcagcggcggcgaattcaccggaagcgtagtaactgaagcttgggctatacgacaccgttgaagaaaaatcctgcattgttttttacgtcttgtttacgattcgcgtccctgtaaacttgctgtgtctatgtgtctgtatatataatgtcattacatgtaacatgtgggagtggtttagttagcttgttcgtcaatactaggcgataaaacgtggtcgctttcgaggtatttgtttatgagaatattgaaattataaacgtcaatgctgacgatgagggggtaacctaaagtatgattttattcttatcaaccaaccaaatatgttagacgtgaaatcagatttggcataatcattttacgatttctgtaattctttaaagaattgtgtgaactcgtgatttattctattataataaaacctattcatcatattctgtgactttgcaaatacaagaaatgtttttttgctgaataatttccaagtttaacagttacaaacaaatgattagtcaaaataactaaaataaattagttatcatatgtttcactttcactaggagtccaatagttgttatcctctaagattaaacaaaataagcataatttaatcaaacgcaacttttagcgaatttataaatgacttttccgaaccttgctataacaactttgcaataaacatattgtcttttgaacccgtcggcactaaaatctccctgacaaatgactcaaggccaaattaacattcttatttgataaaattaggcatagaaacaagcatgattaaataattgtaccacatgccaatatccatttcccaacgaatagcaacattgaagtccatattggcatgttctgccatataaattaaacattgctgttggaattgtaatctgtcatattcttcgaagaataatccaaagattgcttcttttaattatcactaaatattatataaagatcgatctccatgttacatttctcaatttcatgtggagcaatgagttggcagcttaaccatagtcattttttaatagagtctaattaatgttttcagttcgagtttgaacatactatttgtagcctaatcaagcccaaatttgcccaaattcagggccggccttctccggagctaattcttcgcagtttcgggttactactaattaaatcagatcaacatctccatatttgctttaagcattaagagtttaacagaagaaccaacaaaaaccagaaatgcagaaatggggatgttttgtgctatcaaatatcaattttctcatgtgtgattaatcatgacaatgattatatttgtatatttgatttttttttttaacatgaattgaatacgtattcgactaaaccaacttatttggtctcttctatgctttctgatcactttcttttgtcaacatgcatcttctggtccaatgcatataagtttaaatttaagaagaatattcataatggagtccgtcaccggccgtggaacgcgtatatatgaagttatgaacatattagtgtcacacatatcaaaaccagtaatttgacaaagatcgactagttgcattatagtatattgtccgtgattaataaaattacttgtattacgggttatccaaatgcggtccacaacacacgtacagctaacgccgttgacttcttaaagtcaaccaaaaaaggagaacgtgtcattacattacatactctgtgtccaaaacggaagaagatattgcggtcagtgacgcaaacgcagcagaatgagaacgcgactcttgttgcaagaagaccgttgggtgtgtgcgtacgtgtcactgacatactgacagttggacggtgaaaactttgttacctaaagaattaaagaggagcatcgacgtggcggcctttgagcccggcgcacgtgattcttcgcagcatcgcacgtgcatgggctcaagcaaagtgcttctaaaggcagcaaacataagagggaaaaaggcgtcaacgccgctgcttattacagattttgaaaaccacgacaaataatacagttaatttgagaaactgtttatttagtctacgtaaagttatgcgcaagtacataaaatccatattaaatttttagaactcctaaatactcctactaatctcgttgacatatatgatcattctacatataaaaatatccaagtggctcacataaagttcagtttttactatatatgagactaatttaaagagagtaatttggagtgtcatgttactataaattgtaaattgttcaaaagagggggtcttttagttcgtttatcaattgtttatatagaaaaaaaaaaaaaaaagaataaagaacgaattgcataggaatgcacatgatcaggggccgagttcccataagttgattctctctgtcttcgggactcatcaaacacaaagttacgatatttcctgtaaacccgtttccaactaattactgtattatgtaattttgtattgttttatacccggtacccacttgaggattttaatctgaattgtttaagaaattttaactgtaaatttcataaaattactactcattagttgtacttaaaaaaataataatttttatctttcggaggatatttatctactaaattcacatgatatataggtatatgttcatatgtgtagaatattgatgctttaagagagcttttgtagctgctctaactggattaaaatattcatgtcagaccattatacatattagtctgtatagtgtatgctcatgagaccagagagagagagagagaaatgattttcaaaagataaacatagaaaagagaagctctaattaatcgaagatataatataatgtgtatttatagatcagatcacatctttcttcttcttcttcttcttcttctttcttgatctttttggttgttacgagcttcttcttctctttctcttctcaagctcattagaacatcaatttaaaacagaaacttttactatagaccacgataacaaatctgggtttttgttgttgttctctccatgcagagaagagtttcaaaaaggaatacaggatctgtggcttttgagtaggttaattaattagtcgacaagaaaacaaaggtatgtaaccatttgatcattctccattgcttgttgtctcgcttagatccttatcatatttaaatgctaaaatggatgattttttttgagacttttttatatatatatatatatttataactaaactttgatagataatctagtttagttagtagttgcacaaaatacattttgaattctccgttaaataggcgtttcaatttataagaataagatttatgataattttcgggttcaaacttacatattacacgttttgttatatgttacacctagttaaacatatagtgtttcatctagctatgcataagagtgtctcaccataaatcaaatgggcagtttgtgtttttttttctttatatagactacacagaatatatagtgtgcactatcttacgtttgtccggtgtgtcaatgttgatttttgcatcaagttctccttcgacaaaacaaaatgacgatatatatctatctatatatatatatacaaactgtattggcttcgtactatatacatacgtcagtcttattaattctacaacgcagatcaaaatttgaattttgactaggctttaatgtgtacgattaccttatacaagtgaaaaagggtcaatcgtacgtttacccttaaatttctttttgttagtaacatatcgaaaaataaaccgttttatatatattttcaaaatacttattcttcttgttaatgctgtcacatattataaatcattacaatgttttgacaaataaaagaaaaatcattattacaaatctaatcgttttaaaatcctagggaatcctactagattattattactattgtagaccttgtttcttttgtcacattaattaataacaataaaataatatatatttttaaaaatatttttgttttgttttgcattgtatattatttagctgtagatttgtaatgggccacgtaattgggccatgctaagacccggcaaacccatgtgagatatatgatctcccgcactatagtccacgttatctcactgatatctcattattttaacaataagaccgtctcttaattttattacaagttttcttttactcttgtagccttaaattttaggctgaaaattaaagttttgaaaaaagctatagggagggactatgtaaaataaaaaaatgtacgttaccatcagattttaccataaagagccaaaaataaaatatgcaaaactccactaaaaataatattaattcccctagccaacaaaaaagattcagattcatatcccacgcgctcgttcaaatcctctcattcgccacctgatcaaaccaatctcaatttgaaaattgaaatagacaaaatcgtgacattgggacataaaaaagcactaggacaaaattctagtcgacgcaaaaaaaattcgaaaaacgtgagtcagcgtatgtggtttacacgcgccaaagtgggagcgtgagtggggtttgaatgcacctgaaactgtctggtcaataagttaaagtgcatgggaaaaatcttggttgctgtttcctatatatctctctttttaccatcaacatgttacatatatatatggacaaaaatctgtatatgtgaatgcatataggagtgtgatgtatttatataagttagtaagctttgttctctttctctatttttttggcaggtatataaaattttaaaatggaggaggaaaaccaaaagtcgcatcgagtttcacgtaaagaccagagtggatcccactggagtcaaggagccgatgaagagccgagagccagatgctccgggaaaaggtgccggtcttgggcggcggcggcgatcgctgactgcgtggcgctctgctgttgtccctgcgccgtggtgaacatcttcactctcgcctttgttaaggtcccgtggatgataggccggaaatgtatcggccgtggtggcccgagtaagaagcggatgaagaaaatcaaccgtgaggatcggtttcatcaccatcaccaccacaggaggtcggccgagatggtgagtggtggatgttgcggtggcggagatggagatggagagttcgatgaccatcggtttgtggtggaaagagacgggagtttgaccaaagaggaagccaaaacggcgtcgttaaaagaagaggaagagacgagaataagtgcgagagtggaagcagagagagtttggttagagttgtatcagattgggcatcttggctttggtagagtctccttcactggcattcatcaatgataatagatgaacttttaattattaggcgtatatgattaccaaaactaaaaatagattttgtgaaattctttagtgcagcaagtaagattccacaagtatgcatagaaaaaaaaaaaaagattacacaagtattaatttatagaggttttagtgcaacatgtaactcataaggattaaggaaacaaaaagtatttgtgaaataagagagtacattatattatagaaatgggctaatatacatttgggcccttgttaaagggctttcacatgaaccgcattaaagggtagtttaggacatttacgatagaacttggtaggcgtagctagctgtcctgtaacagaaaaaacctgcgcattttagcatgcttatgaaattcatttgctaaaagacgcatagacacgtcgtgggcgaagggttctttgtcttcttcccccaactgagcaagattgttttccttaagagcttcatcgtcatcatccgagaattggagcagagatacgaagatttggcgaaaaatggggagcgagccaacaaaagtgatggtggcggtgaacgcttcgacgatcaaagactatcctaacccttcgattagctgcaaaagagcattcgaatggactctggagaagatcgtaaggtccaacacttccgatttcaagattctcttgctccacgtacaagtcgtcgacgaagacggttcttctctctccttaaatatttatttatctttgaatatgttcgtgcgtatgtctgtttgtgggaaatcatgatcttagttttggacgatgatgtcgtatatatagatcggtctgcatatgtctctgagttttgaccgagaaggatcgactgtgcttttttgttactagtagtgtcggttggtcgttgagattatctcttctggacaaacttttgttcggattttgatgttacatttgaagaggatgtgttagcttgtattggacttttctcggttatatgtttagaagaggagatgactctttcgtgatatttgttttgttctgtttctcgctttgagtcagaacaatgtgttttgcttagtttctctcttgtggtgttattaaggcctgttttgtttgtgacttggaaaccaggttttgatgacgtggatagcatttatgcttcccctgaggatttccgagacatgagacaatctaacaaggcaaaaggtcttcaccttctcgagtttttcgttaataaatgtcatgagattggggtaaacacactctctctttttagctcaaatcaagttatcctccgctgtgtctatgaacttctttgttttgtatctcattgcaactactgtaactttgtgatgttttatgattaaattctagctgtgcaaaacttgtaggttggttgcgaggcctggattaagacaggtgatcccaaggatgtcatatgccaagaagtgaagcgagttcgaccagattttctggtcgtgggaagtcgtggacttggccggtttcaaaagtgcgtataatactcaaacacattcatgacttattagtcattactttacccctatatatcatcaactagttattagactgaatgatgaatagcaatcagactttaactgctataaaggattacagataggtaggattcttgatcttgacacaagtttgagttaaatagatttagttcaagacggggcaggaacagagccaaacaaaggaattgtcattctaagttatacaaacattgagccaggcataacttgaaactatagagtctaagttactactattgctgttgttttgaatcgtgatgggttttgttataacatgggtttgctttgcagggtctttgtggggactgtgagtgcgttctgtgtgaaacatgcggagtgtccagttatgacgatcaaacgcaatgccgatgaaactcccagtgatccagctgatgactaaacaataacaacgtcccttccttctttgatctatacagagagagagtgcttttgtgtgtacaaaatccaaattcctacccctatatgtatttgtatctgtgtatgtatgtgtgtgtgcagcttgttccgttttctgaattggttttcaaactgaaccaaactgctatatatttggtttctttgaaagagtccaaacatcaaaaacaacaacaatttgaaagaaaaaaaaagagtacagtagtatatatgctttaacgaccagaagttactcaaacaccacctccatatgtattgaagatttaatgatttaatgcacttttcgtatgtaaattaaatgcaacgacatttcagcaatagaaaaaccaaataacgtaccatacaaaaaaacccagctggggcatataaatgtataggaggtctatatatatatcttaaatcacatggtggtcaccattaagcaagtggacgggccacagatcttcaacgttccagtaattctcgtttgactgttgttccaccacattaaacgtcgtcgtcttcgcctgagagaagctctcagccgtgtctatggctttgccggagctgccttgcgtcgtcatccccgagctctgtgagtttcccgaacaatgatgttgatgattcatcatattttccgatgacactttcatgtgtctctgaatctttgtcctccagaagttctttatctcgttgtccgttcttcccggaagatgcttcgcaatcttcgaccacctaatgcatattataatattacttagcaacataaaattaggtttaagatttgatttacgtatgcatgtactaattagtgaaactatataagacctgtttccaagcttagcatgaagctgaatgatcaaaagctgttcttcttcggttatgttccctcgccgcacatctggtcggagatagttcagccaccggagccgacaactttttccagtacgttttagaccttattaacaaaataaaaacaaaatttagttatatacatagaaaacatcatcaaaacatgatttgaatacgtgcaaaaaagcataccagaggctttggcgacagagttccaaagaccttcaccatgattaaggatgtaattaaagaggatgaaatcttcttccatagtccaaggtccttttctcactgttccttcttcttctttctgtgacgttattgtcgctttcactctccctttcttcttcatcgtcgtctccatctttctttctgttgtgtatgtgtgtatttttgtctatgcaatcaataaagaaaacagagaagagagagagagagagagatactcgaggcgggaagatgatcgacgaatgttttcttttatagggttgagacttgcgactatatagtcctccaattggtaataatacacataaccttaaaaattaataagtaacagaaactatcaataactttacactcgtttttctttttttatgaaaacatatgcattaatatgcaaaatcaatgaaaatatgaagtatttgattacaaaacttaatcatatatataactctaaagttgccaagaaaaactaaacatcaaattaataattaaacgagagaacttggcgtgattagttcacgaccacacgaattgtaaacagtgagaaggaagaaagtacaatcttaaatcaaagcaaagcttgacagaaacattacactgagtttatgtatataacgacttcttcctaaccctctatcactaatatatactaaccattatttatttagaactcacaatcaatgaagttctttcttctctaaattttgaaacttatattgatatttttatattcttgctatattttaccacatctaaactacagtctgaaatatgtgttttatttttttcaacgttatctttttttgtttgtgtgtgttaacgagtttacattttatacaaagaaaatataagtagtatagatagagaaaatgaaatgaaagttgtaatagcgtttgcttttgggcaattaattgagaaggtttggtgtaattcatatgccaaatttagtaagtgaggttttgtggctggaaatctaaatgatgtgtcagcttacaattcaattaaattattgtaagagagtataaaaattgggttattaatattctttttcaagaataatttaaccaactacttatcgtatattttgagtttgatgatttaaccaacacatacactaactgaagtttaaaactaaataatagttggtttactataattcgtaaaaaaaaaccttgaactgtcattctatgtataatgattttataatgttagtttgtactttggttgatgatgatttattaaggataaactcctaaaagagtaatctcctaacaatcaatgaaagattaatattgatagtgaagataagccatgtgtgaacatgtagtgtgagctttgattttagattgtaggagttcatgattcgtttagttgtaaaaggaaaattaatttgtaaccacaaaaaacaagagtctatttggagattaataggctgtcctcaattatattatcatcaaagtacacaagacatacactttcatctaagccatagactcaccaaacttctttttctaatgttcatttttatttcttaatttttataatatgacacttttgaaaatgaaatacacataaataatccaagttttttttttttttttaatgcttttagatagttgtgattttgttcagctcgtatttggattaagatattacttgggtttttaatttgattatttcgattgggtagaatcagtttatcaaatcgaactacactaaaccaaatctaacaatactaaaccgaaatcataatattaccactttgatttgtaatttaaatgctagagaatcccacagtattagaagaaagtcgttcgtatctaatgaaacattcttaccaatctctgagctgcaataataaataagatgaaatacaaactgtaagatatcaattgtagttttgagcgtaaatttccaatgggagggaacagtcttcttggtcttgtttttttttcttttgtttcttcatcggccaaaaaatatataatgtcacaatgataagggaaatcccccacaacacaatcttctgtcacttggctttatcagagctttgtatctctcttttcatctgtgtttcatcatcatcgtctcgtggaagctgcgaggaggagatccggtggaagacggtggtggagctctgttgaatctctcagggctacggctcctttctcgctctcttccccatccattgctgcttctactttacatcaaaaatttatacaatctcaaactcacaatcatattttcagtggcatacagagataaatttacgaagatgaggtcctatgttaattttacctgtcacgggaagcaaagctacctctgccaccataaccagagtcgccaccacgaccacggccgccggaaggaggtccccaacgactgaatttgttcattcccccaccaccacgtgtagccatttcgcggatctgaggaggaactcgctggtttgctccttccaaaatcttgatcagatccgaagcatgtttcgaatcttgatcaccaaagaatgtgaatgcctgaccagtcgctccagctcttcctgttcttccgattctatgaacatagtcttccactccattggggaaatcatagtttacgaccgccctgtgatctcaaatcgtattagctaatataatcatcaagtcacataatttaatcatttgttttacaggactgggaggatttggattatataaatacctgatgtccttaacgtccagaccacgagcagcaacatcggttgctacaagaaccggagttctgccactgcggaattgattaagaacattgtctctctcaggctgggacttgtctccatgtatagcagcagctccaaattggcgggttagattgcgtgttagttgatcacacatccttttggttgagcagaatattatcacctttgagcctggttcctgagaccgcaagatctgctctaacctcctctgtttctccattggtgctaccacttcaatatgctgtttccaaaaaagcacaacaatcagattctcctgaaacagtcagcagaaccaatagaatcagttcaagcaatacctgtgtgattgacttgttagccacaagctcgtcaacattgccaatgttgacttgagcagggttaacaagcaagtcagctgcaattttcctaactccctttggccatgtagctgtgtacataagggtttgacgcttagtgggaatttctttcacaatcttccttatctgaggttcaaaacccatgtccaacattctatctgcctcatctagcacaagataagatatctgacgcagactaatcctcctcatttcaaggatatcattcaatctcccaggagttgcaaccacgatatctgctcctctttctaaatccctcaactgagggccctttggtgcaccaccatacaaacactgaaacagagataataagaccacacatttggcatacgttagacatatacttcacaagtagcatgttgaaactttacaagttcagagacttctacataccgtacacgaaattcttgatgacctcccaaatttaacagcttcttcttggatttgtgtggccagctctctcgttggagacaataccaagattgttgggcccattcgcgaatcatttcggatacgttgaagatgcaaaaatccaggaatcaagtaacccaaagtttttcccgagccagttttagcaatggctactatgtccctaccttgcatagcaatgggccatgactgagcttgaattggagttggagcagagaaacctgcactgagtacctaagaaaacagaaaaccacactgtcctatgagaaggggaacaccaaggttcttttgggcttatggaatggtggctcatgtcagaagaagcaccatcccccatttgcaggtggcaaaaggttactgatgaaacctgcagcaggaggacgcctcttcttctgtctggacccggtggtgaaatgaatcatcacaccattaacaggccctgccacaagcttggatgatttgggaagccctttccaaaaaatttggtccaccatatagggcactccaaataatttgcaaggacctcaaagaagtggcacagtgtacgacattggctcctcccaggagcaaacatcgcacctgggaaaaaaagagaaaagggtgcgtatggcataaaactttgactctaaatgttatacctaagtcgattttagctaagtgacagaaaagtctgagactggaaaaacaaagctatgttaataaatcagactttagcaaaaacactcaatacagattccgcttattggtagaacaattataaggttatagattccgcttattggtagaacaattatcaggtttgaggggttcctaagtcatttcagtttactattaaccaatcatacctcccgcagaagctcaggtggaaaaccagtagcttcaaaggacattagaggtggtggtacttggcccccctgaagaaatgggaaagaaatatcagtaaacttcagtaatctaagaaaataaaaaagctcaaataaaacaacgataaaagagaggaacataggggtctaccataaaaacgagggtgattgttacaggaaggtcttagatacttacactgacagtaatttcatgacggcgggaataggcctcaggggatagttcacttgctggagctgatgaaggaagaggaactctggtagatgctgcaccataagcagaatccccaactccattagcagcaccgttcgaataaggcggtccactcctgccaccctatagcaaattgagaaaaagtaaacagatgaacagagaaataatgtataaaatatcgttaacagcaaccagatgtagtacctcagaaaacctggacacacgttcagagcctctggagtacttatcgtcatccttgggaggagcataggcatcagtttgttgaacctgaacggaagagctaacagaaacggcgggagaaaacttaggaggtagagagggggttggtttctcgtactgagtaacattggtctcaggattccaaaagtacaagtaaccagttctatcatcgataaggcctttccagggcttgggaagagtatgatcctcaggtgcgtaacggacaacagaagcagcagcggtagcagccatagcaaagacttctgcaacatgtcaaagcgattcagtaaaccaaatcggtaatccacagaaatcatcaccaaactcgacttaggtttcaattaattcaaccataaatgagaaaagcatccaactgcaatcgagtcacagatctggattcaaatcgaacaataaaaaaaaaaactaacacgtaataaaaggattcgatcagaaatcagaattaaacacgaccaaaccgacgcaatcttagagagaaactagaaattgaaacagagagcttaaataccaaattctaggaatctaagtcaggattgaggaattttgtcaacagataaacgcgtacctgatttgatattcaagagtcgagtttgaatgtggaaaacgaaccagcagattggattaaagactcgggtcaaatctgtgaactcgagcttttgagattcccttttttggtttccctctctataacaatctacgccacaagaagaagcgtagaagcaagagagagaaagttagaccaaaagcaaggatgtccaactttagaccgtctctgttagttaggtttataaaaccatccatcgtcgcaacaaaaatatctgcaccttaatgagccgcctccttcttttgggcccttttgggccactccaattttattcctaggcccattatataatttccatgtaaagaatagaattatttaatgagattagttgaatttaacaaaagttaatagtgtcatgtaaaaacgacatggatgaacaaaaatatcaacatttttcgcataaataataaactaagagcttctatatacaaaattcaagacatttttggatttggtttgacttggactcgtttggctctgctgtacaaatatactccagctagtgcagtcgcggtacctgtttatttaacaagtgattatatattgcttcaataaaatgaacaagtgtaacaaatcctttactaatatatactactagtagttgtttacctatagagttaagaggtgagactggagttttgaagaaaagaatggatgatgtaataaccaccacacgcttcacgcagttccctacagagtgtgttactggagacaccatctccaatatcatatacgatacctacaacaacaaccccaatttttatgtgttgattagaagcctaacactaaccgactttacaaaattcagtacagtttttctgaaacggaggaactagacggaccaacctgttggtagctatgcaagcaaacaccagcaagtagagacatgatgcaaaactcttttaccgacaaaccctggcttgtctgtcaagcaaccacatacaaacacacattagttctttctcttttagatcatctagctatatcggtttatgcttttccacttactgctacttgtaaatgcgaaggagtaaccttgaacccatcgatgaggattgctaaaggaaccagtaagataaaggagataatggttattatagagaaaaggttgatgttgtccaaagcgtcctgtttcaatatacaaacattaatagatttcgattactagtttctttcttgagatcataaggataacttatattcaaactcttttacctttccaaccatgaattttttactgaggacattgcgtgattgattcgtcacattagaagccattgcactgcagaaaccaatcctggtttatcccaataccatgaattaatcaaatcaattaaaacttcatcaaaagtttatcaagaatactattttttttgttcttgttcttgttgttcataccaattgaaagaagcttctgtgaaagatgctaaagagactccagcgacaataggtaacaacgaacaaacaatccacagactcggccactggacattaatcaaaatttcaaagattatgtctgaaaatataactctcttgtataatctaaggttatagattaagtctgaaacagagcgtatctttgttttgcttacctcaccgagcaagagaacagaaagcaagacggtgaagaaaggctccattgctttgatagtgtgggtgaaagagacatttactcttcctaagctcacatttgttaacaagttccctaacgtgtgagctactgctagttgtacgatcaccgtaaactggagaggattacaattgaatgaatctctctgtttttagggtttgacggaatcaatatttgatttacctgagaaggagaaaatttggggcgtggatggagtttaaggagccacattatagcaatcatcaacgttccacaccctaattgaaatgctgttacagtcgctggatatggataaaccctaagtacctggatcgatgaatgaacaagtttcatacttgtatgaagactgataataggttcgagtactgcttcttgcattgaaatggactgtttaattaaatgaagcaaagaaggaacctgtttgttgaaaatgttgtagtagatattgagaaggtaccaaactccaaacatgcctcctagcttcaaccctttaaccaaacttccagattccaaatctcctccttccacattctccggaactgtagctgacttgagcttgaagccattaaatctaaggttcggtctccaaggataagagttagaagatgaaaaagctctgcttcttctgctcaacgctgattcaggagtagacttggcaaggaacaatggagatggaagtcttggatttggatttagaaatgtgagagcgaacataattttttcctcttatcagatgctccaagatgtgcataaatcctccggcatttgttggaatttctcacaagtaaccgactcttgctaactttttcttcttcctctattggtaagagttatgttacatgagtctacctcctcattttcatgtaagaagaaaaaagtttgttttgtttttggatatactgcaaacttgatattagtattatttagaagagttgtctttattatgtgacttttctctcgttctactatctgaatgtttttgagtatgataaaaataactcacatgccgatgccgacatttttttcaatataacattggctcgattttatttatctttcctcataagagccagtggtatttgccggtattgtttcttctcatgttctccattccatgtgtgttctgtaaataatgttatggaaatgatttgacatacttggtcactcatttctttacaaaggggccgtggttttcttcgtttataataatatcaaaaagttggtaacgctataaataattatttaaaataaagtttacgtacgaacatgacaaattactgaccacaacaccaattgatttttagtgtggaatttgaaaatgtcaggggagaattgtatggatgatatgaaaggggccgcgttgaaacatgtggatgttgtattgtatgctcctgagtccacccttttctttccgtgttatttcatactattacaaataaggttggtcccattgctttgatcacattattgattataccatttacttattatgtcagtgttggtacaggtcattgatcacaatttgggctttaaacggagaggatggaaactgaattctaaatacatttcggcccatttagggtccataaccttctacgccaatcagaaggtacgtcgacatgagcaacttggtcaattttatgacataaataaaataaaaataaaaaaataaaaatcgatctgaggggttttagaaagaaaagaagaaattcgggagtcggagaaattgtcgggtggatcgatgaatacttgtcagtttatggataagcagataatggatctatcttcttcttcatctctaccttccactgatttcatcgatctgatgaacaatcatgacggcgatgatcaccagaagaagcaggtgatcggcgataatggattggactctaagaaagaagtgatcgttcctagctatgatttccatcccatacgtcccaccaccgccgcacgattgtctcactcggctttagatctcgccggatccacgactagggttaattggtccgcctctgattataaacccgtttccactacttcgcctaacactgtacttactactacttctcgaatcttcctctcttttttttttttgtacatgattctacatcataagcctataagaggacttgtctatttctgattgatttgtttttttttattcggccagaattttggatctctcgattctattgaaccttccaagttggttcctgacaagggtcaaaatgtgtttaacacgactattatgtccgagattatagataggacaatgaagaaacataccgataccttgcttcatgtaatggaaggtgttagtgcacgtctttcacagctggagaccagaacccacaacctcgagaacctggtggatgatctcaaagtttctgttgacaatagtcacggcagcactgatgggaaaatgagacagcttaaaaatatccttgtagaggtaactttgctgattgcttttcgaaactagaatttatagcttttcctggcaactattgatcttttttatacagaaattttctcatttatgaacatgtcttttcttgaaccaggcttatagtactttctgttgatacttcagttccttctttatgcgaatggtgtgcaggtgcagagtggtgtgcaactattgaaggacaaacaagagattctcgaagctcagctttcaaagcatcaggtatccaaccagcatgccaaaacacactctttacacgttgatcccactgctcaatcgcccgctccagtccctatgcagcagtttcctcttacttctttcccacagccaccatcttccactgctgctccttcccagccaccttcctcgcaactaccacctcagctacctacgcagttttcttctcaacaagagccgtattgtcctccgcctagtcatcctcaaccacctccatcaaacccgcctccttaccaagctcctcagacccaaacgccgcatcaaccatcttaccagtcaccgcctcagcagccacagtacccccaacagccaccaccatcatcaggctacaaccccgaagaacaaccaccatatcagatgcaatcttacccgccaaaccctcctcgtcaacagccacctgctggttctaccccttctcaacagttctacaaccctcctcaaccacaaccatcaatgtacgatggagcgggtggtagatctaattcaggttttccgtccggctacttgtctgaaccttacacatacagtggttcaccaatgtcctcagcgaaaccgccacatataagtagcaatggaactggttacccacagctctcaaattcacgtccattgccacacgctttgccaatggtttcagccgtcagcagcggtggtggctctagttcccctagatcagaaagcagagccccaatcgatgatgtaatcgacagggtgacaaccatgggattcccaagggaccaagtcagagcaacagtgagaaaactgactgaaaacggccaagctgttgacctcaacgtggttctggataagttgatgaacgaaggaggagctccacctggaggtttttttggtggtcggtagccatcggtttagccaactctgtacagtactttatatcagttatcgatttaaggatcacctttgtgaccaaatatcgatttcaagagcttgtaagttgtaacccattgcgacttcatatatgatatcagtttgatgcgtaattctagagaatgtctattactcctttgtgtttgaagcttgaaagcttgcgatgatctttttcgtttcttttcttgtatttgaccatttgttaatcagctaacatttcaaatctattacgcatcaataaaacaaagaactgatagaagcaaaatgtctccgacattattgttacaggaaaaaaaaagaagaggaaactaaacccaaaataagcttacaagcaaatacaaacactcaaaacacatgaacattaagaactaacagtcgattttttttattcaacatggttcactcaaaacacacgctttatgtagtcttggtgtctcggacattatgagtacccttggtggtgtctcggtctcggacatcaaaagtcttggcctctcggacatcatgagctttgtcttctatggtttgtccagcatctttagtcctctgtcccacatactcggccatgtcagccaaacgatgcttcgcttcctcaagctcctccgggatatgctgcccggcccggcggatgtagttgagtacccacgacatggatgatagtccggtgagacctatggcccctgaagccaggaatccagtcatagctagaccgatgacaaaggctgctggtacaataaccggactaaagatgagaaacaacgggaatgctagcattagtcctataaccgaaccggctaatgtcaaaccggctatagtcagcagcgttcctcctatcggtacaccgacaaacacggctagcacctgcatgcacgtgcgtcacgtgaaaaccacatacatatgcataactgagattcgaaggagggatgtaaaagggacctgagtggaagaagggccactctgaggataaaggactttgatgcctccttcatgctggcgttgagggtgcacttgaagctggtgcgagtgtgtgcgaacgtcggccattgatcctccaagttcaagcttaatcgagagcttctcaagagtgttaacttaatcagttgcttctgcctttaaggtttgaaaaatgagatcggttttgagcgagatggtgtgtgaagatgacacgtaatggagtgacgtggcacctgagaagcttgcatgagtaacaagtttcctctgctctttttatttttaccatccgaatccgatgataccaacgagatggacaaagagtgccttagtgtcaggtggtggagccgtaatacatgaaaagtcaattatacccttacaatcggagttgaacatcaagaaagatcatcaaactcgcttcgagtctcctaatcaaactcttctgaattgacataattagcatgcggctttgctcgagaatattcaccagattcgattttacagcttcaatggaacaattaggtttccataagagaatttcagccatggaaataatacttggtgtattgctcctataacagggaataagggattcctctgtttatggctccgaaagcaaacagtcaaagattgagattgttgaacagatgatgcagagactgatcaagatcttatcaacaaacctcagtaaatcgtctgtgattgtattcacatcatgtattgttgagaaccgccttagcccttaggcttaaatctccatattcttagtgttgatcccttctaatagaaagtggttacttgggtaagacagagatcttggcttcaaccttaagcataccagtatcacaagctgtctccctcatattcaaagtacacacagttttccaaatcttctttcatatgcaagtccagctctttcagcaatccataaaccggctctttctcaggatgcaattcatcatccgccacaaatctatgtacttttcttctaatctcaatcaaactctctgccagtcctttcttaattcctctctgcttcaccgaatttctcaacttctccacattctcccattctcccttaaccccatacacattcgacattaacatgtaatagccagcatgattagattccaattcgaaaagcttctttgcaacagtttctgccatctcaccattctgatgaatcctacacgcgcctaaaagagtacccaagatttgaggtgtcggtgaaaaaggcatccgctttgtgatttcaatggcagtatctagatctcctacacgaccaagaagatcaactaatacagcatagtgttctaagttgggagcaagtctatagtcattcaccatcaatttaaatattctcaacccctcatgtatcaaacctgcgtgactacaagcagataatattgagagaaatgtcacttcattaggcttaacttctgagctcttgaccatgtgattaaatgtttccagtgctttagtgccctttccatggatgccataaccagtgatcaaagatgtccaaaccacagtgtcctttaaagcaatcccattgaatactttagaagcattgcctagactcccacacctcgagtaaagctctacaagagaagctccgatgaatgggttactgtcaaatccatatttgataacataactatgaaagcatttagcttgttcgagaaagcctaactccgaacatgacccaagaaccttcaccataagaatagcatcaggcctggtattattttccagcaacatgatggaaaattcctcaattgatctgtgagccattccatttaatgtaaagccacttatcagcgcaacccaagagactacatcttttcttggtatcctggagaatacagcataagcttcttcaggggagaaacacttcatatacatatcaactagagcagtagagactttcacttctgtctctaaacctttcctaatggccaattcatgagtcttcctaccttgctctaaatcatgagcagctgcacaagcttgtaaaacacagagcacggtagctacattaggttctgttccatcatccatcatatcattgaagacaagcaacgcttcagcggcagctccattttgaacgtagcaagcaatcactgtgctccaagatataacatctttctctgctatcatcttgaacaaattaaccgcttccttgaaagctcttgactttgcataacaattcaatagcgaatttaccaaagacaagtcatttgaaaatcctctcctaatcacaaaaccatgcacacatcttccaagccttgaattcgaaagctttgtacaagcagaaactagtgtgattaaagttacccgatcaggagtaacatcggaagccatcaccattctcctgaaaaactctacggcctgatagggagacccgtttttctcaaacccagaaaccatagaagaccatgtcactatatcaggcttctccaattcatcgaacatcctcaaagcttcgatcattcttccacatttgatatacatatatatcagagaagatccaacataaaggtcagacccaagagtgacatccttcttcacgaacccatgaatcatttcaccataattaacttcccgcagctccccgcaggccttgagagcaactggaagcgtgaaattatcaggcttttcttcatcgcgaaacatatgactaaagtgatacaagacttcttcccattgtttctctctggataaactcttaagaagagtattccactggtacaagcttctcttcgtcatttcgccgaacatttggcgtgcatccacggaagaagagaacttccggcaaaaacccatccaaatcccctgaaattgaaaattatctcacattcaaaccttctgtttccgaaaaacttccatcaaaattttctcgcttctacattgcttgagcaacccaaatttccttcttgcagtaaactttgcgagggagagaagagaagagaaggatggattcaacttcaaagcaaaaacatgaagcgcgaatacgtttagcaaaaacgtttgggcctgggctgtatgagttgggctaataatggtccactactcgcttacttacttgtagcttttctattggtcaacatttttctttattatgtgctgtagtgtattaaatgttatttaaatactagcatctctccaggataaacataaccaattagagaacaataaataaagattgattaaggaaataaaagaaaagaaggacgtggcagtatcggagctagtgcctgttattgagaattggaaacagctacaaatagtacgcacaagcccttcttcttcttcttcttcttcgtcgtcgtcctcaacaagctcttctttctgactcataacccaaatttctgagaatcagagccttattcaagagaacaccaaggtcagcattttcttctactctctcgatctcaatttctctctttatccttgtgatctatttctctctcgtctacaatttgagctacttttcttgttattatcgtcacgttgtgtgtcgcgtagtggatttgagtgattggttgattgattgatggattttttcacgaaacgcgtagagtttggtggaagttgttgaaattcgaagccgatcgcggactcgtttgctcttgattacgtcgcaatccgtacgattttccgatcaaacgtaagcttgaatctctttcccttttgttttgttcgcaagcgtgtttgatttctgttaatatttcttgatttcccctttttgcggaattgattccggtttttatattcccatattatttttttattctcatgtactgagaatcatgattctagtttggtaaacggttggtgttcttataaaatgcttgatagatttccatctgggttttggttgttgctgtagttaagagtgaaggagatagatttgtagaaaaaggaagagaataagagtgagcttgtggccaaaaaagggatgcctttgaacttaggcaacgatggcgatgggtcttcccggattattttgactgagcctcgcggatctactgctgaggttttactccttcatctctcttctcttcatcattcctcaatgtttagaccatagcatctcagtggttagttgtttgagcctactactattgtatgtctatacaagatgttgtttatcttggagacgactatgaaatgaaagatgttgttcaactgttctggaacttggattgtgttaagaatactctgttaggggttgtagagttacatattctcggattgaaatctttcaggtgcttctatttggaggacaagtcatttcttggaaaaatgaaaggagggaagaactgctttatatgagcagcaaggtatatctctaatcaaatatcgtctttagttttcatgttttaactagtattttgtttggtacgactcatttaggctcaatataagccacccaaggcgatcagaggaggaatacctgtttgctttccacaggtttggcatctcagatcattttaatatagttgaataaccctttgctctagtttcgtactgccattaagtatactgtgtcatatttgcagtttggaaactttggtggacttgagcgacatggatttgcccggaacaaattctggtcacatgatgaagatccttcgcctctacctcctgctaacaaacaatcatctgttgatctgatattgaagtccacagaagatgacttgaagacctggccgcataggtgtgttttaacttatactctggatctatgatatggatgtcttgtctgtgcctttttttattatcatctctttgtctaactttataattactcggtgctattggcgcagttttgaactccgtattcgcatttctattagccctgggaagcttactttgatccctcgtgtgaggaacattgactcaaaggcattctcctttatgtttgcactgcgaaactacttatatgtatctgacataaggtgtgtgtgccttacaaatttcttccgatctgatttcgtgtacttatgctgcttccttcctctgagtgataaatcatgtggtcaccgaacttgcagtgaagttcgagttgagggtttggagacactggattatctagacaacttgattggtaaagaaagattcactgagcaagcagacgcgattacctttgacggggaggtgagtaatgtcagccattgttttccccttaatagtttcaaagaagagaaaaaaaaccaaagattgatatagagtcagtgtgctgtgcaggtcgatagagtgtacttgaacacaccaacaaagattgcggtcatagatcatgagcgaaagaggaccatcgagttgcgaaaggaaggcatgcccaatgcaggtaaaggataccatttgttcttcgtatttttttttatgaatgaaaccttttgagagttggtttctaatggattgagttggaaacgagcagttgtgtggaacccctgggacaaaaaggcaaagaccatagctgatatgggagatgaagattacaaaacaatgctttgtgtagattctggagtaatcgaacctctggtattgttaaagcctcgtgaagagtggaaaggcagacaagaactatccatcgtctcatcaagttactgcagcggacagcttgatccacgcaaggttctttacggagatatctgatccttttgggggtttatcttacttagtaaaaaaacagtaataagccatgatctcattatcactaccacccagaaacaactctctaagagtcttgtcttgaacttggagattttatccttttgacttgtgttttgagtgagttctgattgttgttgttacacagagaggtcacggtaatattttgtaacgttgactctgtgtttgaccgtcaaacagtgtatcggtttctttgttcggaaatttagtagaatatatcatcaatttagtagaaattttgtgaagtatttctagtcttctctactttcttctttagtattgctactttttaaaagtaataatacttttagatttgttaatttgtaattaacaaatcattattttacactttatagcacttgttttttttgttttttaataacaaaatgcatatagagagcttttttcgtttactgcagatttagtatgacaaatactagagatcatgagtttcttcatttgccaaaggataaagataaaaatgaaaaagggttttacaacgtatagatcataaatagatttgataaaagattccataatgtgaagtctccattatccaacggtaagtggtcttgtctcaactatagttttttaatcattagttaaagacgaaactactgtatctggcttggggagcaaggttagcgggccccacataatctatttattaacaaaattgccactaatcccgatttcccaagctcccaagtgcttcggtgttccgaaccaatttcacagcgaaggtcaataaacacgagtgttcaccgaagctaaggttcgtcaattgtgttccagagaagctttcctcgaagcttagggtcggaacgtacgaccctatggattagctccagtttcccgctcacatagtcttctcggttttgtttttgtcttcacgcgttcactccatttttacttagcctagtgaacaagctcaacaacgctctctctctctctctctccccctctctctgttttgggaatcatggcgaggtaagctttgaaccctaattgatataaagccccagactttcgttgattttttcacacaaatcctgaatcggttttcgtaacgcgattcctcttccatttcgttcactgttcctcgaaagggataaaatttatttttgagtgggttacgattcagcttttcctgggaagcaaaatgtgaaatttcccttacaagtttgagttacaaagattggatttttagagatatttcgtctgatttaggcatttactgtatccgcttgaatctctagtgtgtctctaactcagtagctgcttatgaacggatgatcttatcctcttttgttcttgtcacaaatatacagggcttggattgtcgatggtcgaggaattgcagccaaagttaaaaatgcctctctttcttcagctttgcagatccaagactgtggagctcatataaaatgccccaactgcacttaccgcattgacaatagcaatgtgagtgattatatccacacttctctctcttgtcttaaacttacacacactcacctgtgtttcgttggtttcaggtactgattccatggcctggccttcctaaaggtgtcaagtttgagccaactgatgaggacattatcgaatttttggaagctaaatgtgggattggtggctctgaacctcatgtgcttatcgaagagttcattcgtcctgtcactgaagatgttggaatcaattacactcaccctcaaaaccttcctggtaaatgatcaataaagacctttaaataagctcataattgttgttcttcaactgaaactgtaaatcttgtatcttgaatctctgagtctctccaggtttattgattcctgctgagctttactgtttcaggtgcaaacaaagatggagtgagtgtcttcttctttcacaagacagtgcaggcatatggaacaggacagaggaaacgcagaaagatcacaccgacacttgtgaacgatgaaccagttcgttggcacaagacaggcagaaccaaacctgtgatgctcagtggagtccaaaggggttgcaagaagatcatggtgctctacaagagcgctagaaagggaacgaagcccgagaaatcaaactgggttctgcatcaataccatctaggaacagaaggaaaggagataggagactatgttgtttccaagatcacatatcagcagcagaagcttggggaaaatcctgatgaaggtgagagtagttccggggttagaggtggcccaacaacaccaaagacgaatactcctacaccacctagccttgtagatggtgtcgctggagatgaagaagcttttgatgatttaaagatgtttgatccattttttgaggttggttccacaaaatcattggggaatagtaacttcgttttctagagactaataaagtcggaatttttgttgttggttaaccaggaactggacagcattcctgaagctgctttagggaagatgtggtccaaaaaagctcgaatggatgaggaatttgttgtgaacctaagtgaagataacttaatatgcgacgaaagcatggaagcttcgtctctttgggaaaatcaggttctccccaatcctagccttggaactgttggggacttcgatggtttttcgatatcagatctggagaatgcagatttggggactccccctgatttcctcactgtaagatcctgcttgaaaaaaaccttgtttactttcggaaaattcaatggaacataagattctaaattagttgtcatggaggttttgcagttggcttctcaggagagcttgctgaattggattggatggttgtgattggattcttgctgctacacaaagaagctcttctagtacggcgttttcgctgaagaaggaaaaagctggaatatgtcataaataagaaaactttaaagtctccgcaactgaagtcatatctctgtgataattttacttcaggagaccagttttctctcggattcccggaaagctgcttaaatattccgggaataatcattttcaatctctgaatctgcacttcatcattgtaattcaaatagatattttgacctttgtactctttgctgtcttatgatggttactctgtttttgtttggctcagggtccaacggttataactatttatttttgggtattttactattttcaccttatattctcaaaagttctcattatcaccccaaagaaattaattaatccgatttaacctctttaacattactagacagttcacacaccctctgtctagacggaattagggttttcttaagctattccgcagcagtctacggttgttgtgtcggtggtgggcgcctccaaaatttaccctttagtataaataagttttggaaaattcagactttggttattgaaacgccatctcagctctaattcagtacgatggggaggagaggtcgcggcggcggcggtggtatgggcggaggaatcaatcgtagatatctgagtcaagttatggatacgtgcggcaaggatttatctacggcggaggacatcgttgatgatcttcgttccaggtacggcaattttgcgaggttgactcggcaagtgcttctactcaatgtcaggcaagtccttaatgttagaaacaacaagagggttaaagacgaagatgaagatgacaacattggagatgaggaaggttctgcttctcagaggaagaaacagagacgggttgatgagaaagaggagaaattgcagcgagcggagcagtcgcatttaaggaagaggaatatggaacgttcagtgtcttcttctccgtcttcttcttcttcttcggaagacagtggtgatgtgtcgacttctgaggacgcggtttatggcgagaagctgagtccgccgcggtttgatctgatcaatgacagtctaagagataactacgctaagttgaacagctcctcgaagaaaccaattgggtcgcctgcggaaaagaatgtggaagttgagactgtgagcaacaaaggtagaagcaagttggctacaatgggggccagaaaggaggctaaagtttctctttccctcagtggagctactggtaatggtgatttggaagttgagggtactaaaggacctacttttaaagactttggtgggattaagaaaatattggatgaattggagatgaatgttctattccccattctcaatcctgagccgtttaagaagattggagtgaagccaccaagtgggattctatttcatggaccacctggctgtgggaagactaagttggccaatgccattgccaatgaagctggtgttccgttttataagatttcagccacagaggtgatttctggtgtttctggtaatgaattgcatatccatttgtccagtttgttgtggctccctctctgatcttattatcgttgtactaatccaatatgcaaattttgttctcaggtgcttctgaagagaatatcagagagctcttttctaaagcatataggactgcgccttcgattgtgtttatcgatgagattgatgcgattggttcaaagagagagaatcagcaaagagagatggagaagcggatagtaacacaattgttgacttgtatggatggacctggtaacaaaggcgataaaaatgctcctgattctagtgctggttttgttcttgtcattggagctacaaataggcctgatgctcttgatcctgctttgaggagaagtggacgatttgaaactgagatcgctctaactgctccagatgaagacgcaagggctgagatactctctgttgtagcccaaaaacttagattagaaggaccctttgacaagaaaagaatagctcgtttaacaccgggttttgttggagctgatttggagagtgttgcttacttggctggcaggaaagccattaagagaatcttggattcaaggaaatctgaacagtctggggacggtgaagacgataaatcttggctgaggatgccctggccagaagaagagttggaaaagctctttgtcaaaatgtctgatttcgaggtttgttaatggcaggggttatatggatctacttttctgttcttcaaaatttcctctttagttcctaacttctcttttatataccaggaagcagtgaatctagttcaggcatctttaacaagagaaggattctctatcgtgcctgatgtcaagtgggatgatgttggtggacttgaccatctacgacttcaattcaaccgttatatagtgaggcctatcaaaaagcctgatatttataaggtactaaaaatcacatggcatcgttatatagtcaagattacttgcttgttctattgaggtctgaactgtctctttggatctttttaggcttttggggtagacttagagacagggtttttgctctatggaccaccgggttgtggcaagacattgattgcaaaggcagctgctaacgaggctggagctaatttcatgcacatcaaggtttgactttcacgtcagattttatgaatgttgctttgtatttgaatggtccaaaataatgtgattttctctcttctatcgttgggctttcagggtgccgaacttctaaataaatacgttggagaaagtgagcttgctattcgtacgttgtttcagcgagctcggacatgtgcaccatgtgtaatcttctttgatgaggttcgtttttaacattttgaactatatgacgaaaataagaccgatgtctatatatgcagacaataagatatgagattgagcaaacaaagtagatccatgtttgggttgatgcagcagtaagagctgtccgattcttgtccatgagtaatgtttttgaatttcaggtggatgctttgacaacaagtcgtggcaaagaaggtgcttgggttgttgaacggcttttgaaccaggtaataaacgcttattgaatggtgtagctgcacaatttagtcaggcattgatcaaatgcatttcgatgttccagtttcttgttgagctggatggtggagagaggcgtaatgtatatgtaattggagctacaaacaggccagatgtagttgatcctgctttcttgagaccgggtagatttgggaatcttctttatgtacccctccccaacgcagatgagcgtgcttcaattctaaaagctattgcaaggaagaaaccgatagatcctagtgttgatctggatggaattgcaaagaataactgtgaaggtttcagcggagctgatctcgcacacttggtaatcatcaacctcttttttactgctcttgtcgctgtgtttcttgaaacttgacatgacccatgttctgtaatgtacgtgattctgattgttggtttcataaaatggaaggtgcaaaaagctacattccaagcagtggaggagatgataggctccagtgagtcgtctgaagatgatgttacagatataacgcagtgtacaatcaagacgaggcatttcgagcaagccttgtccttagtctcaccatctgtgaacaaacaggtattctcttctctctgtttgcatcactgagagaaattgaaatttctatcgcctctcgtttagttggaaattaaacctcattttgatgggtttgcagcaaagaagacactatgacgcactatcaacaaagcttcaagaaagcgttgggaggaacactgaacaagtcaccatagggccatcttttaccctcgagtaaaaacactctttacttatagaatgtctgcaaaatctcattttccaagggtagatacggtctttagttaaatataaagactcgtctgtttttctacttcagacacgtaatagaatcaagttatgtttccaactgttcttatcggatccgtaacgctacaaaaattctgatactgtaagttgtatgtacagagatgagatagagaaagcgagaacaaaaagctaaagacaactagagggactgataagtggtaagtagaggtcctttatttatcagccagattctcgtttgcagttcccaggtaataagtacttgtagctatcagcattctgaatcaagtatccagggagatgaacagctgaataagaccgtggaatcggaccaagtttgccgataatctccctgaatgtgtgttcttcaggaagcatatcgaaaagatcagttcctttgcagataatgtcttggattcgtctcgggttcagataatgtaagaatctaacccggtcagtatggctataagctttcatcttgaacacgaagtcattgatgtgtctgaaacagaaactgcaatgccaacctgaatctgtcaaaagattgttgctttgccggaaatgagcgcaccgagttttcccaggcttgtagagatgaaccgaagctctccagcttttgctatcgacatagtactcatatgagtagaggtagtttctcaactgaagatgaaggatcggtgggaacccgtcacaccatctaagcagattgatggtatggccgctcgggatctcatcgacatccgacattatcaaaagatcatcttcttttatacctgcgagcttgatcaactggtcaagtgcaagcctttggaatgattcctccacaaaggggttttcgcctttcttgaaccttcctccaacgttcccataagtcagccttggctcaacgaatttgaaattcttctccctgttgtctgcgaaagccaactgttttgacagtccggtgaaagttgagttagattcgagaagcacaaactgagtaatgtaaggatttaactcattccaacggagagtgagcatatcgatctcgttactgaacaaggcagcatcaaagactcttcttggagattcgcggagtttccagccatgaagattgcagagcaattccatggaagtgttctcgtgatagtaatgcggaaggatgttaaaaggtttaggaggtgattcccatagaggtctcaagaaatatgtgatcttctggccgtgtagatagatgccgaagatgaagagtggcaggagagtgaagagaaacaggaatgttttgaaatcgagtcctcttagaacacatctaagccttgaaatggccttgcctgctcgagaaccttcctgtaacatatatataacaaaagaagagattccattagcaaaagagttgatattactcaagtcactcgaagcccggtgaatatgcaagacttcatataaaacaaaatgcagaaatcatccagtctggtcttaagtgataaacactctttagtaggattaagaatgataagacatcctaagccttgaatcaaaaccagaataggatcagatgaaaaataaagaaacaaaagccaaacctgtccacaaacatcttcgcagatagtatccgtcttcttagaactacgataaccatcggacatgatgatgatgattagttctcaggaaagtcaaattttggacgaaaaaaataagtttttgaataaacagaaaatctacagaaaaagaaaaacaagagagagtggtctagttctcggaggaggatcaaatccgagaatttctgtcttgaaatcgatccttctcctttcaccaaaactgtaacgccaattatagccgtttggtgctttttagcttccatctctacaattatatctgcattcttcaattggccaaataaataaattacattgttcaattcttcttcttctttatagagtaaataatttcatccgtcagatctcgtagaggcggtatgatcttacggctttaaattaaactgttattttctctatttgccaaaatcagaaattcctttttttaacctagttctagttaaaatagtaaaaggaattttgaaccgaacgttaaaaaaagaagtctcgtaactctctcaattatgagacggcgaaatgaaacccccaaagacgttaacgacgacgacggcggaggaggaagaaacaaccatgcggaaacagccgccttcgcctccaaagccaccacgtgtcaattctatgctccaatggtggcggagatggacggtgttggtggccgctatctggattcaagcattcaccggcacgaacttcgatttctctgcctactcttccgacatgaagtcttccatgggggtttctcaatctcggcttaactacatggcggttgcttcagatttgggtaaagcattgggttggtcttctggtttcgccattgcctatttccctgtctccggcgtgcttttcgctgccgccgcaatgggactcgtcggttacggtgtccagtggttatccatcgccgatgtgatcgatctaccttactctctggttctggtttgctgctccttagccgggttaagcatctgctggttcaacaccgtcagcttcatcctctgcattcgacatttcaaagcgaaccactcgttggccctgtctctcgttgtgagtttcaacggaatcagtgccgcgttgtacacgcttggccatgaagccattagtgggaaatcatcggcaagctctgatatttaccttctccttaactctctcatccctctgatcgtctctgttttagccctttggccggttcttactaaccctaattcctctgaaaccgatactacgcgaacgcatgacgaaaccagaatcttcgtagtcttcaatgtcttagccttagttacatgcttttaccttctcttgccttcctcaggcacctacttagcctcatcacctcgttggcatttcctcggagctattttccttctccttttcccattgtgcgtcccgtttctcgactatattcaccgtgctctcgagtcctgtttccaccaccacagctctggctatgcagcggttaacattgaggagcccaagatcctcaaaatcaaaagtcagaagagtaatgcggaggaggaaagtgatcaagtgagactaggagatgaacattctctcggaatgcttgttcgtaagcttgagttttggttatactacgtagcttatttctgcggcggcacgatcggtcttgtttatagcaacaacttaggacagatcgctcagtctctaggacaaagcagctcaaacgctaaatccttagttacactcttctctgccttctcctttctcggaagattgctctcctctgcacctgacttcacacgcaagaagctaaaatacttgacaagaacaggctggttcacgatttcgctactgccaacacctttggcattcttcatcctcgcgtattcacccaagaccaaccagaccgcgctactagaagttgcgacagcacttatcgggttaagctcggggtttgtgtttgcggctgcagtttccataacttccgaactctttggacgcaacagtgtcggtgtcaaccagaacatcctcatcacaaacattcccataggatctctcttctacggctacatggctgggtctgtctatgacacaaatgccagcctcggcaggaaatctgtggtggctgactcggttgtttgcgtaggaagaaagtgttatttcgtaacgtttttgttttggggttgtttgtctgttttggggtttgtatgtagcttgtttctgtttattagaaccagaccggtttatcaccggttaaaattgaacagaatgtaaaactgtgtagagtattatcagctgcctgcttataatggtatagattggtaggatccaagaaaagagtgaccattgccttcacacgactcagccaattatcaaaagtgttgtacaaaacattaatgcttagctctgttccaacttcatatataagaattaacatatactaatacatagttggtcattttaaaacttgctcgtgattcgtaaatttcccatcttaaatgaattagacaaattagccatcattatgaaagagaaaggttaaattagatgattagcgggcaataaaaggttagaattgatattatcatgtcattcgatagtgacacatgtgactagtttgacctttaggagcgccaacgtgtcatatatcagcgtaaattccaaaacaaaacaatctagtgtgggacccaaatactgttataaaaaaggatcattaaaatggatatgttaaaaaaagaaagtaaaaaacgcgtcagggaagagaagatggatccgaattccacggtttccggcgatggtcaggcgacggcggcgatagagcatcggtccttcgctcggatcggatttctcggaaacccgagcgatgtatacttcgggcgaaccatatcattgaccatcggaaacttctgggcatccgtgaagctggagccatcggagcatctcgtaatcaagcctcatccattccatgatctcgtccagttcacctctctcgaccatctcgtacgttctctttccatttcttctcattctcctctctggatctctatttatcctccaacattgttgttattctcctctctttgtttggatgcattttcaatattaatattatgatttcactgaatttcaggctcatcttttttcattagattccaaatcatttgtttattagtttgaattgtgtaaaacatttttcacgcttcatggctctaattctgagattttgtgtagctgaatcgtttgcaaaatgaaggatactacggtggggtaaggttgctaatggcgatatgtaaagtattccgtaactattgcaaagagaatgacattcaacttcaccaagccaacttctctctttcttatgataccaatatccctaggcaggtactgatcattttccttcccctttctctctatgtttttttcttttctctgccaccaacgcttatcttttcaactttgatgctccttccagacagggctttcgggttctagtgccatcgtatccgctgcccttaactgccttctcgacttctacaatgtcaggcatttgatcaaagtacaagtccgccctaacattgttctcagtgctgagaaagaacttggcattgttgctggtcttcaggacagggttgctcaggtctatggtggtcttgttcacatggtcagtgtctcccctcctatctcatacattgccgttggttccatcggttttatgactttttatcatcttcttcactttgcaggattttagcaaggagcacatggataaattggggcatgggatttacactcctatggatatcagtctcctccctcctctgcatctcatctatgctgagaatccgagcgactcagggaaggtacttacacttattcaatgattctggtttatgcatcaatcaagtgaaattcctcaaaaagcatttatgacactagaactcagatctttggggcataactcagtagaatttagaagtatctctctgttagatgtttcataatattagcattgccttctaatgcaggtacatagtatggttcggcaaagatggttagacggtgatgagtttataatctcatcaatgaaagaagtcggaagtctagcagaagaaggtcgaactgcattactcaacaaggaccattccaaacttgtggaactcatgaaccttaatttcgacattcggaggtaaatataattccagacaaaactcgaacctatacacaacttaagattaaactccaagctcacatgatgttgaaatagatgggaatacacacatataatagtgatgtctttttttcccgataggcggatgtttggggatgaatgcttaggagcaatgaacatagagatggtggaagtagcaaggagggttggtgcagcctcaaagttcactggaagtggaggagcagtggtggttttctgccctgaaggtccatctcaggtgaaacttctggaagaagaatgcaggaaagcgggatttacgcttcagccggtaaaaattgcgccttcatgtttgaatgattctgacattcagaccttatgaaagccttgatcaagtcttcttattcacacgatagagccattttccagagaaataaacatgtgagctttaattgggtggttgttctgtttctttttcttgcccatttttgttgtttgttccttggcttatactaatatgtttgttttgtttctttttccacattaaggtccaattttttatattatattaaaagaactaaagaacagatgatcaaaattgaagtagtaatgatatttatttgccatatttgtgctcttttttgttttgttgaaactgtatatacagaagttggcagatatagtgtggagaaaaaaaaagaaatatagaattcagagatcattatttggcagaaaatgaagagaaatcgtgccagacatgttcaatttctaatctatactattactagtaccctacttgatgaaatctgaacaaaacatgtgtgtgtttcagaatcacgaattcgaattgctactagtgttttttacaatcttaatggaaataaaatggttatttgatcgagtaataaatattaaaattttgaaatcggtctggacttggacttggacttggacatggtgggccaataataaacaaatccaactaatcttttccagatttcatgattgaaacgtaaagtgaaagattaaacaagagaaaaaaggttagatagctttctgaacaaaaggagagaatttggggatatagatagaatccgccatttaagatcccttccctttgacctgttgagtgttgacaacctgaaaagaaacaaaaaaagaagaagaccgcttcatcttctcaacaccacctctgtcttattgctctcttttcttcttcgtcgacttctctcacacatacaaaaggtttgggattttttttggtagaatctttttaagttatctatcgaaatcagtttgatctgttttgtttttccctcttctcttctgggttgttggtgaataaatctacttttcatcttaattaggacaaatctctctaattaaaacgcctcagattttgtcttcagttgttttgttttaaaccctaagttacttgtaagttaaatgaaatctacaattcttaatttcttgtttccaaaattgtgaaaaaatccaaacatatatagaatagacacgtaacggctcaaagtcggtaattggaggtaacgtgattgaatcttcttcatcaatcataaatcttctctcttaagaattaagacgccgcctcattacacctgttccataatcatcgtcaatatattcattctgcaaaactattcttcttcttctttcaaagtcgtaattgctctctctcacccctaggttcttaagtcatacccattttcaaggacaccttagaaagtttcgagttttctattaggtaattgcatgttgaatctgttacgttcttcttgtgattccccttttttctggcccaaagaggataagattctaaaaatctgaatctttgtatgcaggtgtattgatcttgaagccttaaagtttgtgtctttttgttaatttgaataaagtttgatgggaggagggaattccaaagaagagtcgtcatcaccatcttcatcatcatgggcttctcatcaaagttatcctcaatatggacctgatagctacaactatcctcctccacccacttatgctcccgctccatctcctgctcctgctcctgctccggtgcctgctccatctccggcttccagttatggccctcagtatagtcaagagggttatgcatcacagcctaataatcctccaccacccacttatgctcccgctccatctccggcttccagttatggccatcagtatagtcaagagggctatgcatcagcagcatcacagcctaattatcctccacctccttcacagagtcaagttgctgacaggaagaaatttgatcggaggtattccaaaatatcggataactactcttctttactgcaggttagtttaagacaatgcatatgctatacacttggattttcccctcaaaggttctttggaaactgaatctagcatgtgtctgaattgattccaggtgtccgaggctctaggccgtgcaggtcttgaatcttctaatctaatcgttggtattgatttcaccaagagcaatgaatggacaggtttgttatattattcttattcttacgttttgaatgtaaaggagaagccaaactaattggttttggtactgcaggggccaagtccttcaataggaaaagcttgcatcacttgagcaataccccgaatccatacgagcaagcaattactatcattggaagaaccttagccgcctttgacgaggataacttaattccttgttatggttttggagacggtatgcactgttttctctcttctcgattctcataagaatgtatatcaatcggatcatcattgacttgctttcatctctttgcagcatcaactcatgatcaagacgtgtttagtttctatccagagggaagattctgtaatggatttgaggaagtattggctcgttatagagaaattgtacctcagcttaagctcgcaggtttatttcctgctctgacctgcactggccaattctatatctccttgtgaaacgcaagttataaacttaaaactgtgtttttttttcctgcgaacttatgtatttcaggaccaacttcttttgccccgatcattgaaatggcaatgacagtggttgagcagagtagtggccaatatcatgtgttagtgattatagctgatggccaggtactgattaatattttgactgcctaagctgtgtatgatcttctggttttgtgtctagggatatcaaagtggacccattttgttgtttcaggtcacaagaagtgtcgataccgaacacgggcggctaagtccgcaagaacagaagacagtagatgcaattgtgaaagcaaggtgcgaatatttcaatcttttgactaatgtttcttccattttaaagttctttactttgagtgtaatgttataaagtgttatggtatgtaatcagtttcatcctctctattacagtacccttcctttgtcaatagtcttagttggggtcggggatggaccatgggacatgatgcaggaatttgatgataacatacctgcccgagctttcgataacttccaggtaagcttctttttttcatatcatgacattgaagattgcttcttttcttcagtttggaaccatttttctaacatgtttgctctgtttctagtttgtgaacttcacagagatcatgtcaaagaacaaagaccagtctcggaaggagacagagtttgcgctgtctgctctcatggagatccctccacagtacaaagcaacgatagagcttaaccttttagggtaagggacccaaatcaaaactctgataggtgtagctgcgagaaactgctatattgttaaacaaaatgctcacctttctctttcccttacatttttgcagggtaagaaatggaaatatcccacagagaatcccacttccgccaccggtgcagagtggatcatcattctctagttcccggataccgaattttgaaccgagtgtacctccttatccatttgagagcaagcaaatgagtagtgcagacgatattcaggtaattagtagaaacttaggaatctgtttgaaatgttaagtgaaataagagctttggaactttttgttgttaaactcgtttgtgttattttccccttgaacagctatgtccgatatgtctgagcaacccgaaaaacatggcgtttggttgtggccatcagacttgttgtgaatgcggaccagatcttaaagtgtgtcctatttgtcgtgcgccgatccagaccagaatcaagctttactaacaacaccattgacatgcagctttgaccagcccaaatcccatttcttccagagattttcagatctttctgtagaaaattaaagtgttcttttgttctttgattgaattcctaaactttatcttgttcataaaatttctttgattggattgtaagaattatgtatttgtctgttggctttctttgatttttcaagattcgattaaaccaaagttgattgcttaaacactttaattttgatttgttttgtcgacataagcaatgagaaataaatggatgaatagcccaatagaagcccattagcctgaaattgggctacaagcaaacataccaaataaatagtagggaagagcagaaataatcacaccactcatcagttatccattcctttctttttacataaattttgtcactttttctacaaacgattcttcgcttctgtgaaatttgataaagcgaaagtttttttcttatggattctcttcgattcaacctccaacaatctccatttcaattgaaacctagaattctccgaccaagaatcaccaacatatcaaaccgaatcgatgaaaccgatcctcgaccatcatcctcggccggtaggatccaaaggttagtacttaacaacgaaggtcggaccaaactaaacgccgatcctgaccgtgaattctattcatatccacggttcgtgaaccacgtagatgatagtttcatatcctccttaaccgaactatacagaaaccggttgagacccggttcgactgtacttgacttgatgagctcatgggtcagccatcttccagaagaagtgaagtacgagaaagtagtagggcatggtcttaacgcacaggagcttgctcgtaaccctagactcgattacttcttcgtcaaggatcttaatgaagatcagaagttcgagttcgaagacaagtatttcgacgctgttttgtgttctgttggtgtacagtatctacaacaacccgaaaaggtacgttaccgtaaaccaaaaccgatttcggttatgtcaagaagattcctaaaccgggtctttattatataaaccgcaggtgtttgcagaagtgtatagagtgttgaaaccgggaggagtgttgatagtgagttttagcaaccggatgttttatgagaaagcaattagggtttggcgtgatggaaccgaatacagtcggatccaattggtggttcagtactttcagtctattgaagggtttactcagccggagatcatccggcaacagcctggagctcagatatcggttttgactcggcttatgggttttatcggtttagcttctacgcccgatccttttaatgctgtcattgcttataaaaatttcaaacctatttatgagtaacacgcacataaaaaaaagtgtataagaattggatgggaagtttttgaagaaaaggaaaaaacctctcaaccaagtccagctggagaaacttacaatacaaatttttaaaaagtggagaatgaaattacagatttcaatcaaattggaagaacctgtattacacaagaaataattgacagaaagattacacactttggaaaatataattaatatatagttttcaattagcatgcattgtatgtgattcgttttgttcgaagattcatggacaatatccaagcaaggtagccttgtccctcttcaaacgagtatcacgagttgcttactttatggtttagattctataataacagtatatatattagaaggaagtcttttatattaaaacaaaaatccattgtatatgtacactatctatgttccatgcatgtgtcttcttaaatagctatgaagtcccttattttactatgtacatactaaatttagttatgtttatcaggataactcgttgtaccatcagtatataaactttgaaatattaaatgtttctcactactagtattagactgttgcagttgcgttagagacgtttcatatttagaaataatattatccaagacctgaaattcttattattatgaaaattatgaaatatcgataagggaaaaactgtatggaagtgtaaaagacaccaaaacagatattgaaccaaaggtgaagcaaagaagttgattcaaagttgccactttatttaaccttttgcaccagtatatatacacacacatggatactaacccaatcattcatcacaacacatcagatccttcaccatatatttctctcaacctcgccaatatggcccaacgctttcaattgaactcacaaaccctcccaacggccgaccctctcaaaagggtctcccttattccaagatccgccgagcagaggctggctgataacgcaggcgagaggcgtcctttagcaccgagatctcacgaagacaacccctttgggggtcatactgatgatcaccatgttgctgctcctgcggaccataataaggtgatggatcataatagcgagaatctcggttccattgtccctaagactgcacattaccctcatccatctgaggaaatccttgatgctaatatccgacattcgatggttccgaaatcattgggtcccaattcgctcggtggaagatttggtccgggaaagaaacaagctttccatagaaatggcagacccatgttttcactttctgatgaccgagtcatggctgatagagtcttgaagactcacagtccagacatgatcttctttgatgtcacatcacttctctccgttgttaatgacatcttcaagtctcatgtcccatccattgactcctctgctcctaaggtttagtttacttgtgcaacaattaatccccatttcaaatactgatttttacaagcgtattaaatttaaaactttttgcagccatcactcgtcttcaaggactacgctgatcatacctcctttgaaacttttgcggatctcattgatcaaatctcttgcgaggtatatatgaagctttcttgttttaagtaacgtttgagtcagtatctaagtatcaatgtctctgacacagatcgactgcaagtgtctccatggcggtgagtctcacggtatgatgacatcagggcttcatttggatagtcgcaacacgacgacgttctctgttctgtctttggtctccaaataccgttgggatgctaagctagtccttgtcctatctgctttggccgtgaaatacggcgtttttctcctcctcgcggagacacacgcaacaaatcagctcacaaaatctctggctctcatcaaacagctccctagcatcttctcccggcagaacgctctacaccagcgtctcgacaagacccgaattctgatgcaagacatggttgatctcaccactaccatcatcgatatctatcaactcccgccaaaccacatcacagccgcgtttaccgaccatatccccactgcggtttactggattgttcgctgtgttttgatatgtgtttctcacatcagtggcgccagtggtttcaagcaggagtaagttgtttttctttctgatttctagggtttcaagtaggagtaagttgagtatgtgcttctcatctatgttttcagtcaaatcatgtcgtttatggaagtttcggagatacatgagaatagcgaaaggcttaggaagatcaatgcttacttgttagaacaattcaagaagagtaaaatgaccatcggtaactacgacgtcgttttaagctctctctctgtttctatatatttaagagtatttttattcctctgttctcaagctctgttttttttactctgttacagaggaaggtataatcgaagaagagtatcaagaactcatccagacgttcactactatcattcacgtcgacgttgttcctcctctacttcgtcttctcagacccattgattttctttaccacggagctggtgtttcaaagagacgcgtaaaacctccttatatctctgcatctgtatatgtctcttgtcagtgactgatctgttttcaaacattaaccaggtcgggatcaacgtgctcacccaaaagcacgttctgcttctgatatcagacctagaaaacatcgaaaaagagctctacatcctggaatcgctctacacagaagcatggcagcagtcattcgagattctttgggttccagttcaagatttctggacagaagctgacgatgccaagttcgaggcccttcacatgaacatgaggtggtacgttcttggagagcctcggaaattaagacgagccgcgataaggtttgtgagggaatggtggggtttcaagaacaggcctatactcgttgcacttgatcccaaaggtcaagttatgtcaaccaacgcctttcctatggtctggatctggcaaccctttgctcacccttttaccaccgcaagggaacgtgatctatggagcgaacaggagtggaatcttgagttcttgattgatggcactgatcctcattccttaaaccaggtttcttgattgaataaaaaaacagagtactaataaatttttctttctcttgtgttacacgtaacctgaaaatctgtgtgtgtttcaaatgttttttatcagcttgttgatggaaaatacatatgtctctacggaggagaagatatgcaatggatcaaaaacttcacgagtctctggcgtaatgtagcgaaggccgcaaacattcaacttgagatggtttatgtcgggaaaagaaaccctaagaatggaatccagccgataatcaacacaatccgggaggaaaatctcagccatactttgccggacttgttccagatctggtttttctggaccagggtcgagagcatgtgggaatcgaagcagaggatgctgaaagcccacggaatcaaggggagagaagggtttaaagaagaggaaaaggaccttgttctgcaagaagtggttgctatgttaggttatggaggagaaggagatggatggggactggtgagtaaagcatcggacatgatggttcgagccaaagggaacttgttttctaggggtttggctgaatttaacgaatgggaagtcaacatccccacaaagggttttcttacagcgctcaatgatcatctcttaatgcgtctcccaccacatcactgcacaaggttcatgcttcctgagactgctggaattatacctaatgaggttgagtgcaccgagtgccgtaggactatggaaaagtattacttgtaccaatgctgccttgagtaagatcccataatactggggaacaagttgatttggaagccaacaacttgttcctataaaaccaaataagtttgcgtcttttttttcctccttgttgtgagtttctctactcttcatgttgttgttgttgttctgctctactaaaagcagagagtctttgtaataaaatttgtgtgtttgagatttcgaaataataaaggtttatttatcggaagcttctagaacaatgaactgattgaacattgcttctttgttgatttcttgatccttaagctcctagaacactagtgaactaatacacaagtaacacaagtgaccgtgacatttttttaatgtgacagtaatatcttttgacatttagccttttgaaatgaaattacttaatgctagtaaaatataggcaaagtaaaaggatggatcaatcaatcaaaagatgaacagtcttttgagtccaaatcacatatcgtaatatatctaatagaaagttaaaagtgttagtctacattattgaaaaaataaaccatgagactgattgctgtattacaaagggggaatacaactttaaacgacaaatcagcggttcctagcctgtagttaatgtaaaagttaaatcttccaaaccatcaaatactttttaaatattgcatatatcggattcgatttcgaagaagctcttatacgtatttctaatgatgagatattaaaatttgttgcgtatagaaacaacaaatttaatcctacctataaacgttatgctaaagttaatagaaaaaaaaaaaaacatgcatagaataaacccaaagcataacaatcttatttttagaaaagtgattgtctttagataaatatatccttggttactcttttattgctttttttagccttatccaagatatatcattgagcttaagaaattctttagttttacccaaaagagagcaaagaatcttaacttcacacccttttgttcacttcactcttgatgctattttctgaggcatgcatgagataaaatcaatgtaaagtaacttaaagtaaatgacagaagccataaattataatattctatggcatgaggtgaagtaacataagaatataagcaaagtagcaaacaaaatgtgtcttatcttttaatgtcctttagtaacataaaaatgcgagaattaattagtagtccagtgatcatcattatgatggagaaaagtgaggaattcgtctccaaacctcccaagaaaatgacaaaaatctgtatattttaggatctaaatttctagttggcaatgaagttaatatcattagtagcaatattaaaatagtgtagtttttgatccacttttagtcttatatgaatttgaattcagtaatacacacataaagaaagagtactagctctaaagatttacgagtaaaactcgcaacatttcagtgaaccattttcttcccattatgatttagttcttatttactatatatattcgtgtaaagtaggcctatactttattgtgctaacgatattcacgtggacgggaactatatatctcattaaaacttctataataagccaccaaaaaaagaaaagcaaaaaagaaacaagattatataattgatattctttgtatgtttaatttaattgttgcagaagcaaagaagtcgattctcaatttccaaccgtaactaagggggagaaacgagtatttaaggctaacctcacatagcaaaactacaaaccaataaagacagcctcttcttctaacaaaagcaaactgaaccaagaatggagtcgctgatcaagtcccagcacgctcagcaactggcgggtcacaagaatacgaccggtaaaactccgtccatggagatgataccggcgacgggacttgcgatgtcatcggacgaaagcatgatgctgaagctgattcaacaaactcactccccagatgctcgcgaagtccaagtgcgtggccttctctctctcgttgaagatattctcgatcgtgccactcttgactctgaagacaccaacgcctccgttagtattcctacacacaatcaatttcgttcttagtacgtacgtatgatcatgttcctttacgtacttgctttgatttttcagatgcttccgttgcccactgaggataaactgatgcagtcaagcatgatgagcgttcttgatagtgtctcctatgctatcgatcgtgttgcctgcgaggtatagctacattcactttttgtttgccacaattcaagtgattctttgtttagacttttttggctcaccaaaataacatccaagttattaggtttcgttcgggctaaattcggtgtgttttggttcagtttcaggatattcagtctaaatataaatatgttgaccatcttggttcggttaggttgcgcagtttccacctacccctagatatcaatctttgtggttatagatgctcttataaaccacactctctaaagattgttgtacacgtaaccagcaataacttgttacagaagcaatacactgtttacgtggttctctctctgttcttcttttcagatagcctataagtctctgacgggatctgattcacacgaaatcacaatgtccgtgttcgaacacctctcgagcttccagtgggacggcaagctcgtgctgactctagcagcgttcgcgttgaactatggagagttttggcttctggtccaattctactcaaagaaccagcttgctaagtccctagctatgctcaagctcgtccctgtgcagaacagagtgaccctagagtctgtgtcccaagggctcaacgatctcatccgagagatgaagagcgtcacggcatgtgtagtggaactcagcgagttacctgatcggtacattacaccagacgttcctcagctgtcgagaatcctctctacaatcccaattgctgtctattggaccataagaagcgtcatcgcttgcatttctcagatcaacatgatcactgctatgggacatgagtatgataattaactttgttttaatcgatctttctattgatcacacgctaacgcgtacactttatttatcaggatgatgaacacgcaaatggatttatgggaaacatcgatgttagctaacaagcttaagaacatacatgaccatctcgctgagaccttgaggctttgttaccggcatataggtttgtttgtttgttccgtcccattcaacagctattcatcaccctgtttctttactgacaaagactggaatttgcagagaagcagaggagctcagagtccttaaaggtgttgcattctctattcgacaccactcacattgataacatgaagattctcacggccttggttcatcccaaaccccacatcactccattgcaagatggtttgaccaagagaaaggttttcgtgttaggtttttttttatagaaaggttcatcaatacaaaagattttaactaagaaatctctgttctgttatatgaatgttgcaggttcacttggatgtgttgaggaggaagacagtgttgctgctcatctctgatctcaacatactacaagatgagctatcgattttcgagcaaatctacacagagtcaaggaggaacttggttggggtcgatggtaagagtcatatgccttacgaggttgtgtgggttccagtagtggatcctattgaagattttgaaagatctccgattttacagaagaaatttgaggatctccgtgaccctatgccatggtatctaacacatttatttcaaaacacacattctagtagttgtaaagaaagatggagaaatataattggaagttatttttttttgtgggggtcaggtattcagtggatagcccgaagctgatagagagacatgtggtggagtttatgagagggagatggcattttatgaacaagccgatacttgtggtgattgatccacaaggcaacgaggctagcctcaatgcgcttcatatgatctggatttggggcactgaagctttccctttcactagatctcgtgaggaagagctctggaggagagagaccttttcccttaacctcatcgtcgacggcatcgactctgtcattttcaactgggtatttcaaaagtctcatccttttttctttttatgattggcctggaaactctagaaacagagcaggcagggtttgacctaaattacattcattcaagaacgaggcgtgattaatgaacaatgatgggtctgatttgcagataaaaccggataattacattttcctgtacggaggagatgacttggactggataaggagattcacaatggcggccaaagcaacggccaaagattccaacgtgaaccttgagatggcttacgtcggaaaacgaaaccatagccacagggaacagatcaggcgtatcagtgaagtaatcaggtctgaaaacctgagccatagctgggccgaacctgccttgatgtggttcttctggactaggctcgagagcatgttgtactccaagattcaactcggtaaagccgatgatcacgacgatgtaagagttgactagctagggttttcaattatttcggttcggttcggttcaattggttaatgaatgattttgtgtgtttgaaaacgttgattaggtgatgcaaggaatcaaaaagatactaagctacgacaagcttggaggatgggcactactgagcaaaggacctgagatagtgatgatcgctcacggtgccatagagaggactatgagtgtttacgaccggacctggaaaacccacgtcccgaccaaaggctacaccaaagcaatgtccgaccaccaccacgatgaggtcctccgtgaaaccggaaaaccttgcggccactttgatttccacatcactgctcggagcggtcggattccggagaagatgaattgcttcgagtgtcagcgtccgatggagaagtacatgagcttctcttgttgtcacgatgaaaagctccacgaagacgagaactacaacttctaaatgatgcaataagctcacgtctcttcccgctgctttttctttttgttttacgtaatttgaattctctatatagtttttcataaataatttctgaatttcaatatctttgtatgagagagaattggtcattccatgtgtgtggtttggcctttgtgggacatgttcgattgaagtattcctaataattttcaataattaacaatttcttctcttaatagcatagataaatgttgaatttattttgttaataaaattaaccctgatgaatacaacaattttgaatatgtcaaattagaccaattcaaaatataactatttgctttctttcttctcataatgtttatatatcccactttagtaaatggacccccacgaagcacaccacagcatactcttttttattctttccagtttctaatggtttacttatatactcttatcattttctaattgatcaatttgtcatttattggcttatcttcttataaatgttttttgtgttagttgttgatatctcattttcttgtccagtgaattatagcatttcaatgtgtccctcatgtcgtcaatataatgttttattttccttgttatgatccatatcttcatgtgtggtccatcttcaaataaagaatggattgttactactcttatcgtttgggctagtttttataattagacacaaaatttgtaactttcattctttttttagtatttaacacaaagtaatttgatggattagtctaaataataaaggcaaaaagttaagtaaatgtcaaaagagatatggcatatgtctaatcataaccaatgaattgcatggttctatctaaatagcaaccatatcatcccacatgccattgtccaccttgtctatcttaggaaaacactttgtttgtaactctattgtactctttgaattatgaaatctatgtaaacccttcttattgtgggggacaaaggctaattttaatggtctgtccacttctgcttgactttgatacataaattaggggtggctcatgtcatatctatgagaattaggtacaaaagagttttcaaatgagcaagttgtatttttattcgattagccgtcgtattatgtcaaatataagttaaaaatatgtaaaagtacaaaatgtagattatgatattagggatgaattgagataaaattacctataatttattactacgcataataaataatttgttacgttaattctcatagatacgttatagccaataccgaacccctatttaagtcaaaagtacttctaagtattttttagcgtaaatcaatttttatgaaaagcaacaattaagattaatgtagtaatctagtaatcgttaaaaaagccactttgttagtattgcttaatactctctctctctctctgttcccaaggagatgaaaagcttcaatctcaaaacatagcagctctctcaataaaccaaacccaaatgcaagctgtgtagagagaaacggagtgaggaaggaaggagatgggaggggtgacgtcatcggtggcggcgaagtttgccttcttcccgccgagtccaccgtcttacaaggtggtgaccgacgagctcaccggactgttgcttctcagccctttcccccaccgcgaaaacgtagaaatcgtaaagcttcggaccaggagaggcacagagatcgtgggcatgtacgtgaggcatccgatggctacctccacgctcctctactcccatggcaacgccgccgatctgggacagatgtatgagctcttcattgagcttagcatccatctcaaggttaatcttatggggtctgtttttctttctctccctttgtaattcgattgattttattattatgatgctgatttaaaaatgttatctttgtatgcttcttttgattgatttggtataggatttgccctgttttgattctcacgtttctagctctgtttctagtatttgctctgtttatgtttggagtgtttattcaccaccccaataaaaaaggaaacttgggctaggatctgcttggaatcaatcagtctttgatattattggttgtgatgttgcagatacgattactccgggtatggacaatctactggaaaggtttgtcctttaccccatcaatctgattggtctgatgatccattatgagttttaggaccaactctcaaaaatctttctttctcttaaatgattgattgtagccgagtgagcataacacgtatgctgatatcgaagctgtttataagtgtcttgaagaaacctttggctctaagcaggaaggtgtcatcctctacggccaatctgtaggcagcggacctacgttagatcttgcttcccggttgcctcaacttagagccgtcgtccttcacagccccattctctccggtttaagagttatgtattccgtcaagaaaacctactggttcgacatctacaaggtagaccacgtaccaattctttctattaatcctacacattctccaaattgtaatgtaagaagcttgttgtgtgtgagtgtgtgtttttccgcagaatatcgacaaaatcccatatgtcgattgcccggttctcatcattcatgtaagtcaggtttcagatagatacattttcgtttgaatttttgataagctttttggatccaaacagtttcaaatatgtgcagggaacttcggatgaggtagtggattgttctcatgggaaacaactatgggaactctgcaaagacaagtacgagccgctctgggtgaaaggagggaaccactgtgatcttgaacactaccctgaatacattagacacctcaagaagttcatagcaacagtagagagattaccatgtccgaggatgagcagcgaccaatcagagagagtgagagatgcgcccccgaggagaagtatggacaggagagtgaagccgaggcagagcacagagcgtagagagaaagagaagccaccaaagagtcagtcgaagatgagtagcagcagcagcaagctcaagatctcgtttgatcaacttgatcgctcgcggaggagcgttgactgccatgaaaagactcggaagagcgttgaccagattgagagggggaggaagagtgtggataggttggatagagttcgctccgagtaaaaaccacacactcacactcacacacgtataatacgtatgtagatgaaaagagtacataactgtttctatttaccgaacaaaataacatgtggatgtcgctcctcatattattgatttgtaatcttttatgcaatttgggatctctctcgccatctccttttgaatcaacaaccttttgtggtgggcttgaatatccatcctctgtttttagatgagtttttagtgtttgtggtaagtaggaaagttccaaaacaaagatcacacatctcatgtgggcctgaactaaattcatggcccaatcgtttgttcttaatagaaatccaatttttaggatctcgctatcttttgctacgtacaaaaattaatatatacaaaaagtagctcacttctaaaataaggctaatggatgcccattttcttctcaaatccatcgattttcctaaaatttctcaaatttcaaaacatataaatccatctcattgtcctcttgttttccttcatctgaagcttctgcagtattcaaacaaataaaatatactgctttagctttggacacctcctcttactaatctctataactatatttaaaaagtagaaaataatggcacgtctatttgtcgtagttgcccttttggctttggccgtgggcaccgtattcgccgccgatgcaccttcagctgcacccaccgcctcaccaaccaaatccccaaccaaggctcctgccgctgcacccaaatcctccgccgccgcaccgaaagcatcatcccctgttgctgaggaacccacccctgaagacgactactctgcagccagccccagtgactccgccgaggcacccaccgtctcctccccacccgctcctacccccgaagccgatggtccctcctccgacggaccctcatctgatggacccgccgccgccgagtcacccaaaagtggcgccacgactaatgtgaagctctccatcgccggcactgtcgccgccgccggattcttcatcttctctctctaagttttgttttttaattaaacttgagacggaatcataagattcacattatgagatgaggccgtatctctttaactaactaactatactatatacagtgatttatattaatcaagagattgaatggagttattattattacgtaccgttgttgtactatgttttttttgattacgtaatttttgatgattgtgaacttattaatgtttatttagaaattaaatgaaaaacaaatttttcaaagagggcatttggtctagtggtatgattctcgcttagggtgcgagaggtcccgagttcaattctcggaatgccccctttctttcttattttgtgttttcaaatcatatataaacaaagtttacaaatattcatacaatgcaatctagtaaaattcaatattccttcttggaataaaaccaaatacagtatgtcaacaattccaaactaatccttttttgaggcaatccggttttgatagttctccccacagccacaggcgctaagtcagcgcaatatctctctgaaagatgatgatagggagtttctgtaagacctctctgctactgtaacagagcctacaaagaccacacagagaactctcagacacagaaacgatggctactatctttttcttttagtacttcacacatacatttggcgattagtgaaagtaagcttactttcttagtttggtctgttgattttggtctctgtttgtagaaatttggaagtggcttcgctttgaagcatagcctttgccttagtttactctcttccttctccacactcctctcctccgccttctggttctgtgtctccatttccttgaatttcccctctagcttctgaaacacaagaaccagttaaatgatggtaagtgacaagacaaaagcgtagaaaccaaaaatatctctattcttgccttttttcttctctctgctctctcctctgttcttaagccaaacggtgtaaaacagctcggtgtcctgcttttgttttccaataacttggttaaaaaggtacgtacacattatacatttttgaattgagtaaactcttatgaagatcagttcttcttactccgcagggaggaaattccatcttcctcgacctgtcttggcagaagaattaggagctatcttccctctgcacttactgtaacacctgattacttctctaaccactcgtgaatgaaggaagtaaaaagaagttttctaagagttaattcagtttttaccttgtgttactcgataaaggtgtggacaaggagtcttcaaccattccctttgcagacacctgcaatcatcacaagagcataagcacttggttgagtgaaacacagtttaaagaatgcagtcaccttgtttgatggtgtccggagaggagttttgcagtctttggttggtttagaagaagctcttgacccatcaatcttccttatgatggacaccaatctattgaactcttttgcaggcgtgaaagtgtacgagctgctcttgttattagactttttacttggagtcctctccgatgaattgtacttagagactcttggtttagtactactctttggttgtgaatctttggatttcttcttcacagactgttacagatcaagaacaatagaaaaaaaagtcagagagaaagaaaactcttaatcaccatctcttaataaatacacatgtataaatatatacctttagtataggtttctcctcatctacttgttcttcagctgtgcggccattgatctctgactcagccatgccacagttctctttctcatcagattgtctattactaaatcggccttctttctctgcaagtaatttcaattgagcagaaacatctaaagatcctcttggaatctcaagatccggttttgagaccatccaatctttcttttctccttcattgatatcttcttcttgaactggagacttctctggttggggtttagggatttgctgctgaagcaagagtgcctcttcagcagcagcttttctagcagcagcgactttcttgtagtgagcttcaaagaaagctttcttctgagcaacagatccgggcttagagtatctctctgcctcagccacgtaagggttctgtgtggagaaagcagaccatttctcccagtcaagtttctccgacatgaatcttccgaaggacacagactgtcctaaagcaccaagagaatctccctaaagaaagaacagagagagcttaatttctaagaaaacatatgattttttaaaagaatatgtaactgaaatagaagagaaagcaactaacaaacctgtggagctgcataagagaatggctgcatgagacaagcagattctcccattcttttggaacaattgtagttcaattccaaaaatgtatttgttaagttttaaagttaagaagaaatataagtgggtaaaatgaaagaaaagaaagtagaaggaagatgtatccgttgtacaaaaaggctttttactgtttaaaatttgaattcaaaaaaaacaaaatgcaggtttctctgtctgtttcttcttttccgttgctttatgagattttattagttttactattaaagtatcctctcagactcacaccacatgagagagaaagtggtccgccaaaaaactgtgtatggaatttttgtagaaataaactatacttttctaaagtgttttttttagttggattacctatagtgaaaaaccagtgatgtcagaaaaaaaataaaaagcagttataagttggcacgaaccacaaagcataaagttcaaaaaccgtctatagcaagttgatcgatcaactttgcctgttaattattatgtgtaacagagattgagattttggttccttcgtgtgtttttgaaaattacaatccgactttataactcttgacaaaaaataatgtttaaaagaatacaaacaaacctatatgactttgggggaagcaaaatgtctcacctttttttggtttagttgtttgtatctacacattgctcagattctaacagaaatgatcatttagtgtccaagaaacctgtgttcgagtaagaagttcgtctcttgtttctgtaacctttccctcttgttgttcctctgcctctacgagtcgagaacaccaatagcatcactaccaagaaccctactccagatatcaaccacagcgcaatcacccataatttcaacgtgctgaatctcccttcagactcggacgaaccacttgactcttttgtttcatcgcttccttgggtttgttttgtttcaatgttaccaacttttctcgaaaccgagatcttctcagtcgattctgatccaggttcagggcaatttcttctcttgtgatgcagaaatagagcttcgtttagcttctgtccacattcaatgctgagaaggtctctttgccgtagatcattgtctgtttgatggactgccgaaggactaggcgggtctggaaactttgcccagcatttgttgatcaaatcagtgttcctccagttcgccttgtcaaagctccaatttccgactttgaactcaagaccgtagtggaaaactcgatagtcagcaccaggttcaggaacatacccgggataaatcataatttctttgtttatgctatgccgcaaattcagctgcacaaatgttgtatttagacactagtcgaaaccaatcattatcattgagctgaaagttcagaataagttttacctctgcagcaccaaatgaataaccatacatttcgctgatccaaccggattcatatatatccccagttaactccttcccgtagtgttctttgtctgctcgaacctcctgggttttaagcaaccagtacattgcaaatttccggagatcctctatgtgcattataatgactccaccaactttatcacaagcctcgggattacgcgtgtgaagtcttgcaaggtcattatcacatccaataagatagctaaacaaaagaaagagagacggtttaaggggacttctgcatcatctataaattggaaaagagagaaaaagaattttgttgtttctcaagattcttactcgtaaggagttgaaactggtcggcctcgagctgccttaaactcccaaggtgtgatgggtccacgaaggatcatgtcagcatcaagaattactacgtactctgcatcaatgttcgtgtggtgaagccaatggacaactgctgctggtttgttaattgccgggtacctgattcagttaagagcatagcaaaatcagacgaagatcaagttataacttggagacctgaggtttaactgctaaacttaccaatcgcctgttagaggatgtctgctcatcgaaggaacataatgcgtcggggccaagtcatgacctttatagtttttaagagcttcatctgtgcaactgagaagccgagtgatatttccaggttggccgctctggcggaaactgtgcatgaagcccactgtttgccaatcgaaataagtcgtgcactcagtagaaaacagtgtgtgaatctttggataagttcctttgaattcatcaatgggtggcggctcgtgttggtctggcaggatatgtacacttcctggtgcaagcagtttaggccttgttaactccatgaaagttttgctcttcagaaagctcaagtatttggtccactttggttttggacacccattttctgcgtgacgcagtatgagtccctcgttcaatgtattcatgcattccaaactcaaaattagacctcttcgtttagacggatcaggttccattattttaacctaatcaacgaaaagtgtttcgtcagtaattgcacccattagagatatatgaaattgagtttagaacttgttaagctaacctctcttggatatggaggctcggggaagaggcgattgcagtcgtagactatattgtcttcgtggtggtccagtttagtgaaagaccagttcccaatggaaaaaggtaaaccataatgcataagaacaggctcaacaccttctcgtggaacatacccgggatatatcatcaagtcgtcattaatcttgtgcttaagtcctgcctgtggatcaaaaacaaaatcacaaagttttataatcgaaaccagacgtactgaggactgtaatagtcagagcatgagcaagagaaattaggaaagtggtgactttacctctgcagcaccgaaggagtaaccatacatctcactgatccaacctttgccgtaaatatctccggtaagattggtggtccagtgagctgtatcttggcgaacgtcttcggtctttgacagccagagaggggccaagacccgaagatcgtcgatatgcatagcgagaagaccgccaactttgtcacagagttcaggatgctttgtgtgcaaccgcacaaggaggttatcgcagcccaccaagtagctaaatcatatagaaaaaaggagtgagcaacaaataaaagaaaggattaagatttatgttatgactgaagaggaggtaggaatacccgtaatgggcggcaaagggtcttcccctttcagcaccgagttcccaagggatgataggacctcgaatgatcatgtcagcatcaagaataacgacccaatccacatgcttggcctcttcactgtgttgaagccagtaaagaactccaactggtttgttaattgctgggtacctatagagttcattcaataaatacatcaaagatccatctaacccatcaccaagattccaaagctagcgaccagtactaaggattaaaccaaattggccctaattgatccaactcaatttcacaagttagcaatggcaaactggtgcaagagacagaacaacgtggttctgtctagcactaatgttccacaacaacaacaagaagtttccgagcagaaaaatagaaagaaaagagagtcagtaatggtgttgggagtttaccagtcaccggtcttaggatgtctgctccaagagggaacttcgaaagtgggagcgagattcatgcctctgtaagtcttcttctgatcatcggtacagctcaataaccgggtaatcggaccgggttggccggatttcaagaagctgtgcatcaaaccaacagtctgccaatcgaagtagttctggcactccaccgagaagagcgtgtggatccgatacggtgccatttgacccgattcatcagccaaaaccgagaccaccagcgcagccacaatcgccgtgatcaaatcccaccgcatctcgattttcgaatttcaaaaccctaactaaatttgcatacttttttcctccgatctaaaaaaagtcaatgcatggaggatgattgatccatggcgatgcgttgcctagttcttctctataaacctgtcgatggttatgattaggtagtggcgaccacgaagaactgccacttgtgactaattaataaataaaaaaagttgagatctttggcatttgaataataaatcaaagattctctctttgaatcgcccaagttttggctgccatggactccggcaaccattttacatacacatacgtccaaaactcggcgacttgcctgtgtttttttttttattctcacaaatattttttttaataaccaaacaaatacaataacaattttcttacaagaattattagtctaaacatgattagtctattttgcacccaaacaaaaaaacatactatagagtattagaccaatccaaattttctatatatccattttatttttaatacaataatatacatttatttctgtcattaggtactatacatttggtatataaatggctttttgattatgtctttcttcttttcggaggagtatactccattttttctgttgggaatctcgcatgaactaatagaaacgtagaataataatatacagacaacatagatcagttcatcaattatcattttttattatttggtttaagatcaattatcacttgttcttggattggaacttataagtaattatcgctttgcctttttgatatatatcttttattactgtgtcgatccaaaaaagatgaaggacatcacgttatggtactcaaaatagatggttagccactaacgtaacaagatctaagaccgtataatcacatttccctcgaattagaatcattctccctcgttgacctttatatataagtactatttcctttgcgatgatccgactgtatcaactaactaaaaatacagaaagagaaattaaaagaaagagaggagatcaaatattgtagcaatgagagctttcagcttaatgatatgtgttctcgtcttggcaacgttgattatggtggccgagtctaagtcttcctatagtgggaacgacgagacactcactcctcctcctccgatggctccttcaccgtcaccaactggtactgacggcggtcactttggtgaacccaagacgcttctaccacctccaaacgccgccactttcaccacttgcccgctgttaatcacctcaacattgattagtgccttggctttcgtcttctaatataagacgtgtttttcttcttctttactttgttttgaatttatttccttgttttgttttcaagttcaactcgtgtatactgatctccaactaaccttcgactacgagtattcacaacgatcagataaattttgcgatgtactgataaacgaaactagtacactatccccatttaatttgttgtcttttattctcatagtattatagactttaattagcaaaaaattattgtttggataattattgtttggttacatttaagaatcgtagattaatttctaaattaaaacaaattagcattgatcatatactacatattactctgaaacattacatttctttttgcgatcagggcagaacatataaacacgaagttgcgtgggaatgaaaatctaattgtggtcctaaaatgagaaatcggaactcgttctaatactattttgaaaatatgagattccaaactcaaaattaattgataatgaataaaatgttttttttttggtaaaagatgaataaaaagttatacgtatattattcataataaatttatcaccttttggttcttatgattaatcaaatatcaacggtttctattaccgtgatgatccaacgatcgagatcaacgcccgttaataataagttgtgttaaagaatttctacttggtcgtctgaatatgcaaaagtacatgtcgctgtttctattattcacagctgtgacagaacattcatgggtttttggtcaccgaaacagattcagacacgtcaacatgttcgcaaagtgcactcattatccctcgttgacttctatttaaaactgacgagtaattattactatcaatattgggctctcgtatatggtatattatcgggcccaacccaaaacatatttgggccggattagaaactagtgagaaaaagggaatgttactatgttagtattattgttgactgttagagtttttttcgctccgcctctctgaaactcgccgctagtaagcttcttcttcacttgtgctcttcttcgacgtaagttttctctctttccttctcaaaggtttctctctcgattgacaatcctaagtttcctcgctcttgtggcaattttaattttatttttctggatttggctaaccctaatttcgtctggaaacaatgatattcaacgaaatggcgatttgtgatttaaaaagttgctctgtttttggtatctaaaatttgtgtaggagatgaaccgtattggattgataaggggatcatcatccaaggatgtagtccggagaacgtttgcagcagcagctagtaaagccaagaaaggtggcaaaggaggtggagccagcgatgctcctaaaggttccagcttgaccaaagagatcaaatccaccactgttgttggtgccaatactctcaaagacggatctgatcccaagatcttgcctgattctgattaccctgattggctctggcatctcctcgataagcgaccagctctcagtgagcttaggaggaagaacgtcgagactcttccctacgatgatctcaaacgttttgtcaagctcgacacacggggtaaaatcaaggagaacaactccatcaaggccaaaaactgagagatgtaagatgttttcaactctctcactgttgctgttttctttgtatgtgggaactatgcttgctaataagtagattcttccagttagattacatttccaaggcgttattatgctcttgtatgttctcagacactcttagtatatccaagaaattgctgcttcatcttttctctgcatgattctctttgaaaagttggaataggtttattcttacttgctctaagtatattctttcagttatcttacttttccgagtcagtaacattatgcccttgtaagttcttgatccttaagactctttattagtgaatccaagaaattgctgcttgtgtgagtgaaactcttggctcttgtttaatctaccgaatgatatgtccagcaagtgtgtaatacaaatccttctccggatagaggagatgagttggtcggttcttaaagacactgcaggtgtaactgatccatttaacaatcagatttattgtttactgtatgggacctggctcattgatattgcatcactattctgttggtggataccaactcttgttgtctatctctttgtggggtttgataccttcaaaagaaaggtaaagcaaatgttgcatcattatctcccctttgtcttccattattgctcttctttgctttgattgttacttgtctcctgtgatttgcccagttacaatttcatattgctttgtgttaatactagttaggataagtttcaatttaaatcggttttgatttaggtcttattggtctgatattatggcttttctctctctctctctatggtattgtatctgacaagtgctgctacttatttgctttatggttatatcctcccatgcccatgaaaggtttaagagtttgaaaaggagacaccactcatcacatgcttttgtgggtataacaaaaaataaagctaacttttttctctgctcacatgcttattttcctcttttgacaccttaacaatatcttgctttgtttttgtttcgttttttgcatgttccttcttaactatatgtactaaatgtatgatttagatatgttatggatataattatccaaatctgtggtcatgattgatagaggccacgagggcggacattttaaatcgctgatccgaatttgttcttatagtctctctactataatgtaatgggacataggttgggtgtagttgcccatccttatttgttgtctgaataaactcttacctatatttatttatttatatataagtgcaacggtactactatttccagaaagaaattttgatggttcatgtttccttctactcttttattttgctcttaagaggctttatcgacatataatataaattcaaacactgctgcaattctaacggatataaatcatccaataaaatctcagaaataaaaacgagtaacgaattttgagatttgcaagaatctcaaaagatgtcatattaaaaaattcttcgatatccaattaaagactcgattatacggacttgctttggagaatccacaccaacactcaattcgattacctcgaaaacaaaagtagttcaacttttgataccatctcaaataatactaaacaagttcttgatatacatttattcccgatgggtgaaaaaggccacttttctccatgtgtctctatcattactatcaagtatcaaccctttttcactttatagaattaggcatttctcacgatcagttcctccttccaattattattctgtaacttttgaagtcatttctactccctaatgttacgcgttaaacatttatttataaaaaaagatctaagattttttccaattattccttcaaatttggtatttaattcgtgtaatgaagacaccagatttttccaagtacggttacatatataaactggggagttttctttgtttaggctgattaaagagacccaagtgcctcctacgctattcttcattttctccggtgaccaatccttttctttttcttctcctctccgtccttaaatagttatataggagcaggcattgttccttgatcaccaagaaatcgctttgacccctatctccttcttctgcaactctttttcagttttcctcaacacaatttctatgcctccgacctactttcctctccgttgggagagcaccggcgatcagtggtggtacgctactcccattgattatgctgccgccaacagccagtacgacctagtccgtgagcttctccgaatcgactccaataacctcattaagctcacttccctccgcagaattcgccgcctcgaaaccgtctgggacgacgattcccagttccacgacgtcgccgcttgcagatcacgcgtcgccagaaaacttctcgccgcctgcgacgaaggcggctcgccgggatccaagaggaacactcttatccgctctgggtatggtggctggctgatttacacggcagcctctgccggagatctagcgtttgttcacgatctcctggagagaaatcccctgttagtgttcggcgaaggagagtacggcgtcactgatatactctacgcagctgccagaagtaaaaacgacgacgttttccgtctcatttatgattttgcggttactccgaggtttggaacaggtggcatcgagcagcaaaccggagagattccggcggcttacaaatgggagatgaagaacagagcggttcactctgcttcgagaggaggcaatctgatccttctcaaagaacttctctccgattgttctgttgaacatgtcttggccttccgagacaaacagggctccactatcctccactcagccgccggaaaaggaaaaactcaggtaagtgtctccggccactgctataactaaaatatcaatcgatagatgaacaaaattacggatcttggtgattatgatgcaggtggttaaagagcttgtggcttcatcataccatttagttgacgccgtggacaaccaagggaacacggctttgcacgttgcagcttaccgtggccacgctgatcttgtggatgttctcatctcggcatctccatctttgatctccgccagaaacaacgccggagatactttccttcacgccggaatctccggtttccagactcctgcgttcgaaaggcttgacaagcatacggagctcatgaaccgtctgatcacttccgcagcctcgaaatcccaaggggattttgtaaattataggaacaatgagggacgcacggctcttcacttggccatctctgggaatgttcctctggagttcgttgagatgcttatgtctgtgaaatccattgatataaacatacgtgacaacgctggtatgactccgcttgatctgatcaggcagaagccgctgtctccaacgtctgatctcctgttccgacgactcgtatcagccggagggatgttcagttgtcgtgatcaaagcatcacaagtgtcgtcgcgtctcacttgaaggacagaggaaacttttacagccctggagctcgtttcaagacatcggacgctgagatgttcctaagcaccagacttgaagttgcgcctgaaaagattggtgttgttgtccctagacacgtgagatccagttcctgttgcattgagattggtcagctaaacgtgatggatgagaatcatcatctcaagaaatgcagaaacgcgtctgttaactctacaacagagagattgaagagcgttttccactggccgcgagtcaagaaacaacctggccattccaagaacaattctgatattagcatcatttcgacaacacttgagacgcaagaaactcctgtccctctccgtcagagattctcaaaaagcagcacttcttcccttgatccgcctaataacaataaaagaacgttggcggtaagaagtaaccagtctagtcccagagccaagaagaaacggtttgggtcggtgcggtcacggtcgagctcattctcgaaaatatccatccactcttcttccacttcttcgacttcgagcatggttgatcttaaacagaagggagtgctgattgatacgagcatagccggaccatctggattgaaacggtcagagccggtgaaaaataaggtaagcgagaagcagggttcggtgaggagtagattgaagagccattacttctgctttggtacttcagctttgtcagtgaaaacgccggctactgtcttggtataaaccaggttattgggtatagaacaaaaccggtttgtatttagtttggtcttctaaggtctcttatgaaataatgaaatttgttgggttatttcaagccacgcgccaacgatgggcgtatgtatttgtaccagggtggcacccactagctgacttggtcatggatcttactttgatcaatcttcctatcattgacttgaagaaatgttttacattgaaaccgtttgttttgttacacggcaaacgtaacaagacaaatcagactaataaaaactttcatttaaaaaataactttcatatgcaattagaataaacaataatcagaattacagaaattgtccaatagtgacataaaatcaatatacaatagcttaaccaatggagtcattatgaacatgtatcccaatcaacgaccatttttaatatgaattgaagaacaacacaaaatttccaggtaatttcaatcatttgcacagctaataaacctcagtgggggtaaaggtcaactttcattctctatctctcttgctcccaacttttggaaccacacaagacaagaaaaacagataggaaagattgcctcacaagtcacaacattcctaagtttgcaatggcgggaatcccagatcatatccaagaccaacatcttgtggaggaggtatatgctttttatgattttgttacattgaaaaactttattcttaaagagtttttgttactctacttacaggatcaaccctttgatctggaagattggcttccaatcacagcatcaaggaatgccaattggtattattcagctttccacaacgtcactgccattgttggtgctggcgttctcggtcttccttacgccatgtcagagcttggatggtatcttccaactgagatttcaaatacaccaaatttatttgaagatgtacatatgtatatattagactttaccaatgatgttttcaggggacctggggttgtggtgttgatcctgtcatgggtgatcacgttatacaccctctggcaaatgattgagatgcatgagatgtttgaagggcaacggttcgataggtaccatgagctgggtcaggcagcctttggtaaaaagcttggtttgtacatcatcgtgcccctacaactacttgtcgagatcagtgtgtgcatagtctatatggtcactggaggtaaatccctgaagaatgtacatgaccttgctttgggagatggtgacaagtgcacaaagcttagaattcaacacttcattttgatctttgcctcttcacagttcgtgctctcccttcttaagaacttcaactccatttctggtgtctccttggtagctgctgtcatgtctgtcaggtagctccttccttttgctattttcatctcgtgaaaacataacatgaacaagagaagaaattatcaaatgtttgtttccaatgcacagctattctacaattgcttgggtagcctcgctgaggaagggtgccaccaccgggagtgtagagtacggctatagaaaaagaacaacctcagtgccattagccttcttaagtgcactgggtgaaatggcttttgcgtacgcaggtcataacgttgttttggaaattcaagcaacgatcccatcaacaccagagaacccatcaaaacgacccatgtggaagggagcggttgtagcctatatcattgtagctttctgctacttccctgtggcacttgtaggtttcaagacctttggaaacagtgttgaagagagcatcctcgaatcactaacaaaaccaacggcacttgtcattgtggccaacatgtttgtggtcatacatctcttgggaagctaccaggtacaccagaaaacgcctctcattagaagcaaaaaaaaacttgtagttccccgccttaactgatctgctttgtcctcctaggtgtatgcgatgcccgtgtttgacatgatcgaatctgtaatgataaggatatggcacttcagtccaacaagagttctacggtttaccatccgatggacttttgtgggtaagtctctgtgatttttgcaaaccaaagaaactaaattcacattcttttcagaggagtagcattttgatgattgattaacttacctctatatcgcagccgccacgatgggaatagcggtcggtttaccgtattacagcgcattgctgtcattttttgggggatttgtgttcgccccgaccacatactttgtaagcgcgaatactctactcttaaactgctcttgatatcatcaaacttcaatcaacatgttaataactctaacaaacataatgatatgttatctttcagatcccatgcatcatgtggctgatcctaaagaaaccaaagagatttagtctctcatggtgtatgaactgggtaagatgtttgtagtcctcagatcaaaagctaaatatgacacttacagctaagttaaatctttttttttggagcagttttgcatcatttttgggcttgtgctgatgatcatagcacctattgggggactggccaaactaatctataatattcaaaagggcactctacctaattcaagatgcaacttacctaaacactgacgattgccttgtaggtaacataaattggttggacgcaacaatttcgctggtactagagtctagaggctctattaccaaactcgagtgtaaatctatagaattaactctgagacatgctccctctctctctcggtgctgtcggtcattggtttattgaattaaccaaaattttactcactacacaaagtgttattgattgtttactcggataaaatgccatcgcattggttaaatatcaatctaactatcattttttacaacaactcatgtacacttgactgctgttatccaagacacaacactcatgaatctcagtcgatttcaccctcttctacttcattgccgggatctggaaacgcaagcatgtcggattcatcttcatcctcctcatgtttcataaatagccccagctgctctagaggattacttcctccaaacccaaatacagccaacccatcagactcagagccaacatctcttagatttcgtaactggtccgtgttaaccgttttgagcagttctaggtccttgagaaaccttgtgttctcatttatttcaaccgacttctccatctggtgtaccattcagtcatggcaatgatcaatatacatgtattgcagtttataaaaccaaactggtacaaggcagcaattttgatttacctcaagcaatgcctgccgggctgcttctctttcaagttccagtttcctcttagcctcttgtgcctcagcttttctacgagcttcttcagcttccttggcttctgcttgtaaccgtgctttttctggtgcacaaaacaataagaggacaagtttatgtacgtatatactacttggtatatatcatcaatcaaaaaatcgaaactagcaaatcaagaatacctttcttcttttgcaattccagttcttccttctcacgttgcagtgtctctgggtctcgtttctcattctgatctcacaaatataattttgaaagtcaaagagggagggctaaccagatataacagctcacacctccacaaacacagctaacctgattaagagttatctcttgagccttcaagattatatccgcaaatcgatttttcaatagagcagccctgtaacgcttttctggaggtagttccttctcttttggagcactatttcctaaattattaatgggtcaagagtgagatgccaccctcagatattagagcacagatatttttctgctacacttctgagcttaccatcttgatgaccatctgccccctcaataagacttagcttccctctggatgcatcttccatctgattcaatccaccgacggaatctgcttttagaaagggaataagaaaaccaaggtttattaattaatatcaacaaaacttaacatcttttgcaccaaaagaggagtaatcactgattagagataatatgatcactatagaaaatagcaaacagcgacctgggagtaaaacaagcagaaaatgtaacaggtctatcactatcatactaggtgtgtaatatgagttgctatcagtaaggtcagtaagtttcactccaaaaaaactacagaagtaacattgagtattctagatggacggccacttctgacaagagggaagtaaaatggttccgagggttaagtacatataagaattgcaaacatcaaacgtctgcaaaagctccatagagaaaaagacaaatacaatgtagcaagattaaacaaaccactgtagttctctaacgccatacctttttctgttctgacagttgagatgtgagatatagggtgctcataattaccaatgtcaacatcctcgtcctccaattcactccctgcaagtaacgaggaggaaatgacagcttaatcatagagtaggacatgcgaattagctcaaacaacaaaaccagtgtatgctaaccatcacagtgttgcgtcaatgaatttcctggccctgacccatgtaaaagctacatcaagaaagttttcgctgtttatcagtcatgttaacaaatggatcaagaatgagatatagaaaggtgattacctctaacacacagggttcaccgtttgaatctttcttttgattttctcgcagaaactcatcaaagagatcccgcaactggaacaaggcatcatgactgagatcattgatgtcaatctctatctcatcatctccagatctctcttccttggagctgtgatctctcaggaaatttattatctgtacagggaattctgtcaaggaccccaaatctctgccaagctttactctatcctcatctgtcataacccgcttagcaggctctaagaggctgttacgtttcacagcattcatctttctcttcttagccacaggctcaggtatcgcaatatctttgtgagcaagagtagccaagttacttggttcagatttggttccggatgacttcttctcgatagttttccatctcacttcaaaaaacttgctgagagtatcagcgaagcgatacacattattatctgacgggttataagtcatagcattgcggaaagtaagacggacatcagcagaaaactctgaagggcttgaatacgtgccggaagttaacttgcttttaacagttcctaaatccataggatgtttgataatggtgaaataatcaggaatgttgagcttgacgacgtccacaggggtattaaagagccaacaatgctgctgcgacatcaatcgtttaaggaggctctcacattgcttcatccgaagcatagtggaagtggtgactggctctggtttggttgctgtgaaggggagcaccctttttccagggccagtagagcatcgtgacattccaaaactcttggggcgagacacattacttgcaggtgtactagtaacaatcttagatataggaagaaggtccccaacactcttctgaaaggaccgtagttgttccagctcctgacgaagcgtatgaatccactttctcctttctgatgatgacaagtcagacaagggtaaaactattctcgggacaccaaaagtttcatcatccttggaagcattggggctatcatcacagccgccgggagagtcaaaactgttacgattataatctcctgggaaaccaccgttcctcacagtcatgatatcgcccaccgaagtgcgaacctgcacaaatcaaaatatttaagtcagttttgagaaaccctaactatgaaaacctgaaagcaattcaattcttagagccctatagtattgctggaggagagcagtgaacactcaatatgcataaaaaaggaaattcggaactaaccaactcgaaacacttagcaagcgatcgaaccggagcagaagtaagagaaccgaggaacaagcgtaaatcttctccagcagaaacagattaacgctagagattggtgtagaagatgatgatgaagaagaagatagagtaaaaccctagagtggagacgaagaagacgaccgagaagtagagagagaacaaaatcgctctctgccctcccttctctagtgtcccgtccctaacgaatgctgcgtctaacgccgttttgctactgggcaggactcaatctggaccgtcggatctgatccctcgaattaaaatcgaatgcaaatacttcggtgcataaaaataatatcctgggcttataatgtaaagcccaatgaactttttaatgtgcctttattgggtctacggatgactcaacacggcacgctgtgaaagctcgaatcgcaggaacggcacgcgcttttttccttcgaaaacaatttcttctccttcttcttcaattgatggtttgatttacacatccttcttcttccagttccatgtcgcatacgtacacagattgacagcgaagctagttagctcagattttggatctcgaatttcagttaattcgatccggttatggacattctttttgctcagatccaggcggacctccgttcaaatgacgcgcttcgccagtcatcggcgcttcttcaggcgctgcagcaatccgccgccggaagagatatctctgtgatcgctaagtctgctgtggaggagattgttgcttctccggcttcagctgtttgtaagaagctggcattcgatctcatccgatctacccgcctcactccggatctttgggacaccgtttgctcaggtgtcaaaacggatcttcattttccggacccggatgttaccgccgctgccgtctccatccttgcggctctccctgccttctcgcttcctaaactcatctctgattgcagctctgagattgcttcctgcttcgattctccatctgacaaccttcgtttttccatcaccgagacacttggctgcatcctcgcgcgtgatgatctcgttactttgtgcgagaacaatgtgggtctcctcgacaaggtctccaactggtgggctcggatcggccagaacatgctcgacaaatccgacgccgtctccaaggttgcctttgagtccgtcggcagactcttccaggagttcgactccaagcggatgagccgtcttgctggcgataagctcgttgacagcgagaactccctcgccatcaggtccaagtgggtctcttccatggttgacattgtatggagaaagaggagcgctttgatggctaggtctttagtccttcctgtcgaaaccttcagagccactgttttccctcttgtctttgctgtcaaagctgttgcttccggtagtgtcgaagtgattagacagctttccaaggcttcctctgctgctgctgcagctaatgccaccgttgtggactccaacgccgagaagctggttggcgtctcagatttggttacccatttggcgccattcttggcttcctctttggatccagctttgatttttgaagtgggaattaacatgctctacctggcagatgttgccggaggcaagccagagtgggcttcacagtccattattgcaattttaacactctgggaccgccaagaattttcctctgctagagagagtatagtcagggccgttgttacgaacctgcacttgcttgatctgcatatgcaggtatgtcgttttttacttcatttaagctcggttagttgtgtacctttgtcttgaagctgtggcctatgatttctgaatcattctttttggaatttgttacgaaggtttcgttgtttagaagactgctgcttatggtgagaaacttgagagcagaatcggacaggatgcacgcattagcctgtatctgtcggacagctctctgtgttcacctttttgccagagaaagtgcccgaagaggtcagaagcctctgcctgggacagatattatttctctctttgaagatgcaaggattaaagatgatctcaatagtgttaccagtaagagcttatttcgggaagagctggtggcaatgcttgtggaaagctgcttccagttgtctctacctttgcctgaacaaaaaaactcgggtatggagagcagagtgattggtgcgttagcatatggtactggttatggtgctctgaactggacagaaccagcccttgaggttgtggaagtttgtaggccttgtgtcaaatgggattgtgatggcaggacgtacgctgtagattgctatttgaaattgcttgttaggctgtgccatatctatgatacccgtggaggagtgaagaggctgaaagatggtgcttcccaggatcaaatattaaatgagacacgattgcagaacttgcaacgtgagcttgttaaggatctccaagaggtaattaagcctcagctgaaagttagaagtaacccttggcaattttcctcgaagaattttagttaggctttcttaagtactatttaatactaaatgtggaggagaactattgcttgtggactgaaacgtggtcaatgtcttataaaaatcttgatctcaatttggcaggtaaataccccaagaatcctcgggcgtcttatatggacaatcgcagaacatattgatctagaaggtctagatccacttttagctgatgaccccgatgatccattgaatattatcatagcaaacatacataaggttctcttcaacttggatgccgctgctactacatcgaataggctacaagatgttcaggcagtcttattatgcgcccagaggatgggatcgcgtcatgcaagagctggccagttattaaccaaagagcttgaagagtataggaaccatgctgctgcagatacagttagcaaacatcaaacccgtttaatattgcagaggatcaaatatgtttcaaatcttcctgaaagaaagtgagctttcccttggcttgtaatccttttattatgtgagttttactgcatttctggattggaactcagacaacctattattttccaggtgggctggagttagtgagacaagaggagattacccgtttagccaccataagcttactgttcagttttacgaaccatcagctgctcaagacaggaaattagaaggtctaattcacaaggccattctcgagctttggaggccaaagcccactgaattaactctcttccttacaaaaggggtcgactcaacttctatcaaggttcctcccacagcatatcctttgaccggaagcagtgatccttgctatatagaagcttaccatttagcagatacaaatgatggaagggtcactttgcacttgaaggttggtatatattctactgtatcatcctgcagttacttgaatacagttttagtggataaagttttagcgtctcaacaccttatactttatgttacctttcagattattaatttgacagaacttgaactgaatcgtgtggatatacgggttggattatctggtgccctatacttcatggatggctctcctcaagcagtgcggcagttgcgtaatcttgtctcacaggttgcatgtcattcttcagtgcttatatactcccatctctttacagttctctaatttcttaagtcttgtcagttggaaaccgtttctgttcttaccaatcaatcagtttcgtatatgttagctgtattatcatggactctgtgatttacttttgtaggatcctgtacaatgcagtgtcaccgttggtgtgtcccaatttgaaagatgtggtttctgggttcaagtcctctactatccattccgtggtgctaggggagaatatgacggtgactacatagaagaggatccacagatcatgaagcagaagagaggttcaaaagcagaactcggagagcctgtgatcttaagatgtcagccttacaagatcccactgactgagcttcttctaccgcacaaaatctcaccagtcgagttctttcgtttgtggcctagcttgccagctgttgcagagtacactggcacatatatgtatgaaggaagcggcttcatggcgaccgccgcacaacagtatggggcttcaccatttttaagcggactcaaatcattatcctcgaagccattccacagagtctgttcccacattatacgcacagttgctggctttcaggtgaacttggttctgttattcttcttgttccttaactggattgatggtctgataaacccctaacttgatgtcactacagctttgttacgctgcaaaaacgtggcatggaggttttgtgggtatgatgatctttggcgctagtgaagtgagcaggaacatggatctgggtgacgagactaccaccatgatgtgcaagtttgtggttagagcatcagaagcatcaatcacaaagcaaatagagtcggatattcagggatggtgtgatgatctaactgacgggggcgttgagtacatgccagaggacgaagtgaaggcaaccgcggccgagaagctgaagatctctatggagaggatagctttgttgaaggcagctcagccgaagaagacttcaaagatagaggaggaatcagaaaacgaagaagaagaagaaggagaagaagaagatgatgatgaagaagtaaaagagaaaaaggagaaagaagagggaaaggacaaggaagagaagaagaaaaaagagaaggaaaaaggaacattttctaagctgacagcagaagaaacagagcacatggcgcttcaggcagcagtgctccaagaatggcacatcttgtgcaaagatagaaaatataccaaagttaactaagagcgagagtacttttttctcagatgaagctacaacaatctttgttttcttttgttgtgtgtggtttcttcgtaggtttagatgttttgtattgttgttggtgaagaaaagaaacaaaccaaggatgttactattgcccttttttacgaattc

SEQ ID NO: 393 - DNA, 89154 bp, Arabidopsis thaliana
gaattctctatatagtttttcataaataatttctgaatttcaatatctttgtatgagagagaattggtcattccatgtgtgtggtttggcctttgtgggacatgttcgattgaagtattcctaataattttcaataattaacaatttcttctcttaatagcatagataaatgttgaatttattttgttaataaaattaaccctgatgaatacaacaattttgaatatgtcaaattagaccaattcaaaatataactatttgctttctttcttctcataatgtttatatatcccactttagtaaatggacccccacgaagcacaccacagcatactcttttttattctttccagtttctaatggtttacttatatactcttatcattttctaattgatcaatttgtcatttattggcttatcttcttataaatgttttttgtgttagttgttgatatctcattttcttgtccagtgaattatagcatttcaatgtgtccctcatgtcgtcaatataatgttttattttccttgttatgatccatatcttcatgtgtggtccatcttcaaataaagaatggattgttactactcttatcgtttgggctagtttttataattagacacaaaatttgtaactttcattctttttttagtatttaacacaaagtaatttgatggattagtctaaataataaaggcaaaaagttaagtaaatgtcaaaagagatatggcatatgtctaatcataaccaatgaattgcatggttctatctaaatagcaaccatatcatcccacatgccattgtccaccttgtctatcttaggaaaacactttgtttgtaactctattgtactctttgaattatgaaatctatgtaaacccttcttattgtgggggacaaaggctaattttaatggtctgtccacttctgcttgactttgatacataaattaggggtggctcatgtcatatctatgagaattaggtacaaaagagttttcaaatgagcaagttgtatttttattcgattagccgtcgtattatgtcaaatataagttaaaaatatgtaaaagtacaaaatgtagattatgatattagggatgaattgagataaaattacctataatttattactacgcataataaataatttgttacgttaattctcatagatacgttatagccaataccgaacccctatttaagtcaaaagtacttctaagtattttttagcgtaaatcaatttttatgaaaagcaacaattaagattaatgtagtaatctagtaatcgttaaaaaagccactttgttagtattgcttaatactctctctctctctctgttcccaaggagatgaaaagcttcaatctcaaaacatagcagctctctcaataaaccaaacccaaatgcaagctgtgtagagagaaacggagtgaggaaggaaggagatgggaggggtgacgtcatcggtggcggcgaagtttgccttcttcccgccgagtccaccgtcttacaaggtggtgaccgacgagctcaccggactgttgcttctcagccctttcccccaccgcgaaaacgtagaaatcgtaaagcttcggaccaggagaggcacagagatcgtgggcatgtacgtgaggcatccgatggctacctccacgctcctctactcccatggcaacgccgccgatctgggacagatgtatgagctcttcattgagcttagcatccatctcaaggttaatcttatggggtctgtttttctttctctccctttgtaattcgattgattttattattatgatgctgatttaaaaatgttatctttgtatgcttcttttgattgatttggtataggatttgccctgttttgattctcacgtttctagctctgtttctagtatttgctctgtttatgtttggagtgtttattcaccaccccaataaaaaaggaaacttgggctaggatctgcttggaatcaatcagtctttgatattattggttgtgatgttgcagatacgattactccgggtatggacaatctactggaaaggtttgtcctttaccccatcaatctgattggtctgatgatccattatgagttttaggaccaactctcaaaaatctttctttctcttaaatgattgattgtagccgagtgagcataacacgtatgctgatatcgaagctgtttataagtgtcttgaagaaacctttggctctaagcaggaaggtgtcatcctctacggccaatctgtaggcagcggacctacgttagatcttgcttcccggttgcctcaacttagagccgtcgtccttcacagccccattctctccggtttaagagttatgtattccgtcaagaaaacctactggttcgacatctacaaggtagaccacgtaccaattctttctattaatcctacacattctccaaattgtaatgtaagaagcttgttgtgtgtgagtgtgtgtttttccgcagaatatcgacaaaatcccatatgtcgattgcccggttctcatcattcatgtaagtcaggtttcagatagatacattttcgtttgaatttttgataagctttttggatccaaacagtttcaaatatgtgcagggaacttcggatgaggtagtggattgttctcatgggaaacaactatgggaactctgcaaagacaagtacgagccgctctgggtgaaaggagggaaccactgtgatcttgaacactaccctgaatacattagacacctcaagaagttcatagcaacagtagagagattaccatgtccgaggatgagcagcgaccaatcagagagagtgagagatgcgcccccgaggagaagtatggacaggagagtgaagccgaggcagagcacagagcgtagagagaaagagaagccaccaaagagtcagtcgaagatgagtagcagcagcagcaagctcaagatctcgtttgatcaacttgatcgctcgcggaggagcgttgactgccatgaaaagactcggaagagcgttgaccagattgagagggggaggaagagtgtggataggttggatagagttcgctccgagtaaaaaccacacactcacactcacacacgtataatacgtatgtagatgaaaagagtacataactgtttctatttaccgaacaaaataacatgtggatgtcgctcctcatattattgatttgtaatcttttatgcaatttgggatctctctcgccatctccttttgaatcaacaaccttttgtggtgggcttgaatatccatcctctgtttttagatgagtttttagtgtttgtggtaagtaggaaagttccaaaacaaagatcacacatctcatgtgggcctgaactaaattcatggcccaatcgtttgttcttaatagaaatccaatttttaggatctcgctatcttttgctacgtacaaaaattaatatatacaaaaagtagctcacttctaaaataaggctaatggatgcccattttcttctcaaatccatcgattttcctaaaatttctcaaatttcaaaacatataaatccatctcattgtcctcttgttttccttcatctgaagcttctgcagtattcaaacaaataaaatatactgctttagctttggacacctcctcttactaatctctataactatatttaaaaagtagaaaataatggcacgtctatttgtcgtagttgcccttttggctttggccgtgggcaccgtattcgccgccgatgcaccttcagctgcacccaccgcctcaccaaccaaatccccaaccaaggctcctgccgctgcacccaaatcctccgccgccgcaccgaaagcatcatcccctgttgctgaggaacccacccctgaagacgactactctgcagccagccccagtgactccgccgaggcacccaccgtctcctccccacccgctcctacccccgaagccgatggtccctcctccgacggaccctcatctgatggacccgccgccgccgagtcacccaaaagtggcgccacgactaatgtgaagctctccatcgccggcactgtcgccgccgccggattcttcatcttctctctctaagttttgttttttaattaaacttgagacggaatcataagattcacattatgagatgaggccgtatctctttaactaactaactatactatatacagtgatttatattaatcaagagattgaatggagttattattattacgtaccgttgttgtactatgttttttttgattacgtaatttttgatgattgtgaacttattaatgtttatttagaaattaaatgaaaaacaaatttttcaaagagggcatttggtctagtggtatgattctcgcttagggtgcgagaggtcccgagttcaattctcggaatgccccctttctttcttattttgtgttttcaaatcatatataaacaaagtttacaaatattcatacaatgcaatctagtaaaattcaatattccttcttggaataaaaccaaatacagtatgtcaacaattccaaactaatccttttttgaggcaatccggttttgatagttctccccacagccacaggcgctaagtcagcgcaatatctctctgaaagatgatgatagggagtttctgtaagacctctctgctactgtaacagagcctacaaagaccacacagagaactctcagacacagaaacgatggctactatctttttcttttagtacttcacacatacatttggcgattagtgaaagtaagcttactttcttagtttggtctgttgattttggtctctgtttgtagaaatttggaagtggcttcgctttgaagcatagcctttgccttagtttactctcttccttctccacactcctctcctccgccttctggttctgtgtctccatttccttgaatttcccctctagcttctgaaacacaagaaccagttaaatgatggtaagtgacaagacaaaagcgtagaaaccaaaaatatctctattcttgccttttttcttctctctgctctctcctctgttcttaagccaaacggtgtaaaacagctcggtgtcctgcttttgttttccaataacttggttaaaaaggtacgtacacattatacatttttgaattgagtaaactcttatgaagatcagttcttcttactccgcagggaggaaattccatcttcctcgacctgtcttggcagaagaattaggagctatcttccctctgcacttactgtaacacctgattacttctctaaccactcgtgaatgaaggaagtaaaaagaagttttctaagagttaattcagtttttaccttgtgttactcgataaaggtgtggacaaggagtcttcaaccattccctttgcagacacctgcaatcatcacaagagcataagcacttggttgagtgaaacacagtttaaagaatgcagtcaccttgtttgatggtgtccggagaggagttttgcagtctttggttggtttagaagaagctcttgacccatcaatcttccttatgatggacaccaatctattgaactcttttgcaggcgtgaaagtgtacgagctgctcttgttattagactttttacttggagtcctctccgatgaattgtacttagagactcttggtttagtactactctttggttgtgaatctttggatttcttcttcacagactgttacagatcaagaacaatagaaaaaaaagtcagagagaaagaaaactcttaatcaccatctcttaataaatacacatgtataaatatatacctttagtataggtttctcctcatctacttgttcttcagctgtgcggccattgatctctgactcagccatgccacagttctctttctcatcagattgtctattactaaatcggccttctttctctgcaagtaatttcaattgagcagaaacatctaaagatcctcttggaatctcaagatccggttttgagaccatccaatctttcttttctccttcattgatatcttcttcttgaactggagacttctctggttggggtttagggatttgctgctgaagcaagagtgcctcttcagcagcagcttttctagcagcagcgactttcttgtagtgagcttcaaagaaagctttcttctgagcaacagatccgggcttagagtatctctctgcctcagccacgtaagggttctgtgtggagaaagcagaccatttctcccagtcaagtttctccgacatgaatcttccgaaggacacagactgtcctaaagcaccaagagaatctccctaaagaaagaacagagagagcttaatttctaagaaaacatatgattttttaaaagaatatgtaactgaaatagaagagaaagcaactaacaaacctgtggagctgcataagagaatggctgcatgagacaagcagattctcccattcttttggaacaattgtagttcaattccaaaaatgtatttgttaagttttaaagttaagaagaaatataagtgggtaaaatgaaagaaaagaaagtagaaggaagatgtatccgttgtacaaaaaggctttttactgtttaaaatttgaattcaaaaaaaacaaaatgcaggtttctctgtctgtttcttcttttccgttgctttatgagattttattagttttactattaaagtatcctctcagactcacaccacatgagagagaaagtggtccgccaaaaaactgtgtatggaatttttgtagaaataaactatacttttctaaagtgttttttttagttggattacctatagtgaaaaaccagtgatgtcagaaaaaaaataaaaagcagttataagttggcacgaaccacaaagcataaagttcaaaaaccgtctatagcaagttgatcgatcaactttgcctgttaattattatgtgtaacagagattgagattttggttccttcgtgtgtttttgaaaattacaatccgactttataactcttgacaaaaaataatgtttaaaagaatacaaacaaacctatatgactttgggggaagcaaaatgtctcacctttttttggtttagttgtttgtatctacacattgctcagattctaacagaaatgatcatttagtgtccaagaaacctgtgttcgagtaagaagttcgtctcttgtttctgtaacctttccctcttgttgttcctctgcctctacgagtcgagaacaccaatagcatcactaccaagaaccctactccagatatcaaccacagcgcaatcacccataatttcaacgtgctgaatctcccttcagactcggacgaaccacttgactcttttgtttcatcgcttccttgggtttgttttgtttcaatgttaccaacttttctcgaaaccgagatcttctcagtcgattctgatccaggttcagggcaatttcttctcttgtgatgcagaaatagagcttcgtttagcttctgtccacattcaatgctgagaaggtctctttgccgtagatcattgtctgtttgatggactgccgaaggactaggcgggtctggaaactttgcccagcatttgttgatcaaatcagtgttcctccagttcgccttgtcaaagctccaatttccgactttgaactcaagaccgtagtggaaaactcgatagtcagcaccaggttcaggaacatacccgggataaatcataatttctttgtttatgctatgccgcaaattcagctgcacaaatgttgtatttagacactagtcgaaaccaatcattatcattgagctgaaagttcagaataagttttacctctgcagcaccaaatgaataaccatacatttcgctgatccaaccggattcatatatatccccagttaactccttcccgtagtgttctttgtctgctcgaacctcctgggttttaagcaaccagtacattgcaaatttccggagatcctctatgtgcattataatgactccaccaactttatcacaagcctcgggattacgcgtgtgaagtcttgcaaggtcattatcacatccaataagatagctaaacaaaagaaagagagacggtttaaggggacttctgcatcatctataaattggaaaagagagaaaaagaattttgttgtttctcaagattcttactcgtaaggagttgaaactggtcggcctcgagctgccttaaactcccaaggtgtgatgggtccacgaaggatcatgtcagcatcaagaattactacgtactctgcatcaatgttcgtgtggtgaagccaatggacaactgctgctggtttgttaattgccgggtacctgattcagttaagagcatagcaaaatcagacgaagatcaagttataacttggagacctgaggtttaactgctaaacttaccaatcgcctgttagaggatgtctgctcatcgaaggaacataatgcgtcggggccaagtcatgacctttatagtttttaagagcttcatctgtgcaactgagaagccgagtgatatttccaggttggccgctctggcggaaactgtgcatgaagcccactgtttgccaatcgaaataagtcgtgcactcagtagaaaacagtgtgtgaatctttggataagttcctttgaattcatcaatgggtggcggctcgtgttggtctggcaggatatgtacacttcctggtgcaagcagtttaggccttgttaactccatgaaagttttgctcttcagaaagctcaagtatttggtccactttggttttggacacccattttctgcgtgacgcagtatgagtccctcgttcaatgtattcatgcattccaaactcaaaattagacctcttcgtttagacggatcaggttccattattttaacctaatcaacgaaaagtgtttcgtcagtaattgcacccattagagatatatgaaattgagtttagaacttgttaagctaacctctcttggatatggaggctcggggaagaggcgattgcagtcgtagactatattgtcttcgtggtggtccagtttagtgaaagaccagttcccaatggaaaaaggtaaaccataatgcataagaacaggctcaacaccttctcgtggaacatacccgggatatatcatcaagtcgtcattaatcttgtgcttaagtcctgcctgtggatcaaaaacaaaatcacaaagttttataatcgaaaccagacgtactgaggactgtaatagtcagagcatgagcaagagaaattaggaaagtggtgactttacctctgcagcaccgaaggagtaaccatacatctcactgatccaacctttgccgtaaatatctccggtaagattggtggtccagtgagctgtatcttggcgaacgtcttcggtctttgacagccagagaggggccaagacccgaagatcgtcgatatgcatagcgagaagaccgccaactttgtcacagagttcaggatgctttgtgtgcaaccgcacaaggaggttatcgcagcccaccaagtagctaaatcatatagaaaaaaggagtgagcaacaaataaaagaaaggattaagatttatgttatgactgaagaggaggtaggaatacccgtaatgggcggcaaagggtcttcccctttcagcaccgagttcccaagggatgataggacctcgaatgatcatgtcagcatcaagaataacgacccaatccacatgcttggcctcttcactgtgttgaagccagtaaagaactccaactggtttgttaattgctgggtacctatagagttcattcaataaatacatcaaagatccatctaacccatcaccaagattccaaagctagcgaccagtactaaggattaaaccaaattggccctaattgatccaactcaatttcacaagttagcaatggcaaactggtgcaagagacagaacaacgtggttctgtctagcactaatgttccacaacaacaacaagaagtttccgagcagaaaaatagaaagaaaagagagtcagtaatggtgttgggagtttaccagtcaccggtcttaggatgtctgctccaagagggaacttcgaaagtgggagcgagattcatgcctctgtaagtcttcttctgatcatcggtacagctcaataaccgggtaatcggaccgggttggccggatttcaagaagctgtgcatcaaaccaacagtctgccaatcgaagtagttctggcactccaccgagaagagcgtgtggatccgatacggtgccatttgacccgattcatcagccaaaaccgagaccaccagcgcagccacaatcgccgtgatcaaatcccaccgcatctcgattttcgaatttcaaaaccctaactaaatttgcatacttttttcctccgatctaaaaaaagtcaatgcatggaggatgattgatccatggcgatgcgttgcctagttcttctctataaacctgtcgatggttatgattaggtagtggcgaccacgaagaactgccacttgtgactaattaataaataaaaaaagttgagatctttggcatttgaataataaatcaaagattctctctttgaatcgcccaagttttggctgccatggactccggcaaccattttacatacacatacgtccaaaactcggcgacttgcctgtgtttttttttttattctcacaaatattttttttaataaccaaacaaatacaataacaattttcttacaagaattattagtctaaacatgattagtctattttgcacccaaacaaaaaaacatactatagagtattagaccaatccaaattttctatatatccattttatttttaatacaataatatacatttatttctgtcattaggtactatacatttggtatataaatggctttttgattatgtctttcttcttttcggaggagtatactccattttttctgttgggaatctcgcatgaactaatagaaacgtagaataataatatacagacaacatagatcagttcatcaattatcattttttattatttggtttaagatcaattatcacttgttcttggattggaacttataagtaattatcgctttgcctttttgatatatatcttttattactgtgtcgatccaaaaaagatgaaggacatcacgttatggtactcaaaatagatggttagccactaacgtaacaagatctaagaccgtataatcacatttccctcgaattagaatcattctccctcgttgacctttatatataagtactatttcctttgcgatgatccgactgtatcaactaactaaaaatacagaaagagaaattaaaagaaagagaggagatcaaatattgtagcaatgagagctttcagcttaatgatatgtgttctcgtcttggcaacgttgattatggtggccgagtctaagtcttcctatagtgggaacgacgagacactcactcctcctcctccgatggctccttcaccgtcaccaactggtactgacggcggtcactttggtgaacccaagacgcttctaccacctccaaacgccgccactttcaccacttgcccgctgttaatcacctcaacattgattagtgccttggctttcgtcttctaatataagacgtgtttttcttcttctttactttgttttgaatttatttccttgttttgttttcaagttcaactcgtgtatactgatctccaactaaccttcgactacgagtattcacaacgatcagataaattttgcgatgtactgataaacgaaactagtacactatccccatttaatttgttgtcttttattctcatagtattatagactttaattagcaaaaaattattgtttggataattattgtttggttacatttaagaatcgtagattaatttctaaattaaaacaaattagcattgatcatatactacatattactctgaaacattacatttctttttgcgatcagggcagaacatataaacacgaagttgcgtgggaatgaaaatctaattgtggtcctaaaatgagaaatcggaactcgttctaatactattttgaaaatatgagattccaaactcaaaattaattgataatgaataaaatgttttttttttggtaaaagatgaataaaaagttatacgtatattattcataataaatttatcaccttttggttcttatgattaatcaaatatcaacggtttctattaccgtgatgatccaacgatcgagatcaacgcccgttaataataagttgtgttaaagaatttctacttggtcgtctgaatatgcaaaagtacatgtcgctgtttctattattcacagctgtgacagaacattcatgggtttttggtcaccgaaacagattcagacacgtcaacatgttcgcaaagtgcactcattatccctcgttgacttctatttaaaactgacgagtaattattactatcaatattgggctctcgtatatggtatattatcgggcccaacccaaaacatatttgggccggattagaaactagtgagaaaaagggaatgttactatgttagtattattgttgactgttagagtttttttcgctccgcctctctgaaactcgccgctagtaagcttcttcttcacttgtgctcttcttcgacgtaagttttctctctttccttctcaaaggtttctctctcgattgacaatcctaagtttcctcgctcttgtggcaattttaattttatttttctggatttggctaaccctaatttcgtctggaaacaatgatattcaacgaaatggcgatttgtgatttaaaaagttgctctgtttttggtatctaaaatttgtgtaggagatgaaccgtattggattgataaggggatcatcatccaaggatgtagtccggagaacgtttgcagcagcagctagtaaagccaagaaaggtggcaaaggaggtggagccagcgatgctcctaaaggttccagcttgaccaaagagatcaaatccaccactgttgttggtgccaatactctcaaagacggatctgatcccaagatcttgcctgattctgattaccctgattggctctggcatctcctcgataagcgaccagctctcagtgagcttaggaggaagaacgtcgagactcttccctacgatgatctcaaacgttttgtcaagctcgacacacggggtaaaatcaaggagaacaactccatcaaggccaaaaactgagagatgtaagatgttttcaactctctcactgttgctgttttctttgtatgtgggaactatgcttgctaataagtagattcttccagttagattacatttccaaggcgttattatgctcttgtatgttctcagacactcttagtatatccaagaaattgctgcttcatcttttctctgcatgattctctttgaaaagttggaataggtttattcttacttgctctaagtatattctttcagttatcttacttttccgagtcagtaacattatgcccttgtaagttcttgatccttaagactctttattagtgaatccaagaaattgctgcttgtgtgagtgaaactcttggctcttgtttaatctaccgaatgatatgtccagcaagtgtgtaatacaaatccttctccggatagaggagatgagttggtcggttcttaaagacactgcaggtgtaactgatccatttaacaatcagatttattgtttactgtatgggacctggctcattgatattgcatcactattctgttggtggataccaactcttgttgtctatctctttgtggggtttgataccttcaaaagaaaggtaaagcaaatgttgcatcattatctcccctttgttcttccattattgctcttctttgctttgattgttacttgtctcctgtgatttgcccagttacaatttcatattgctttgtgttaatactagttaggataagtttcaatttaaatcggttttgatttaggtcttattggtctgatattatggcttttctctctctctctctatggtattgtatctgacaagtgctgctacttatttgctttatggttatatcctcccatgcccatgaaaggtttaagagtttgaaaaggagacaccactcatcacatgcttttgtgggtataacaaaaaataaagctaacttttttctctgctcacatgcttattttcctcttttgacaccttaacaatatcttgctttgtttttgtttcgttttttgcatgttccttcttaactatatgtactaaatgtatgatttagatatgttatggatataattatccaaatctgtggtcatgattgatagaggccacgagggcggacattttaaatcgctgatccgaatttgttcttatagtctctctactataatgtaatgggacataggttgggtgtagttgcccatccttatttgttgtctgaataaactcttacctatatttatttatttatatataagtgcaacggtactactatttccagaaagaaattttgatggttcatgtttccttctactcttttattttgctcttaagaggctttatcgacatataatataaattcaaacactgctgcaattctaacggatataaatcatccaataaaatctcagaaataaaaacgagtaacgaattttgagatttgcaagaatctcaaaagatgtcatattaaaaaattcttcgatatccaattaaagactcgattatacggacttgctttggagaatccacaccaacactcaattcgattacctcgaaaacaaaagtagttcaacttttgataccatctcaaataatactaaacaagttcttgatatacatttattcccgatgggtgaaaaaggccacttttctccatgtgtctctatcattactatcaagtatcaaccctttttcactttatagaattaggcatttctcacgatcagttcctccttccaattattattctgtaacttttgaagtcatttctactccctaatgttacgcgttaaacatttatttataaaaaaagatctaagattttttccaattattccttcaaatttggtatttaattcgtgtaatgaagacaccagatttttccaagtacggttacatatataaactggggagttttctttgtttaggctgattaaagagacccaagtgcctcctacgctattcttcattttctccggtgaccaatccttttctttttcttctcctctccgtccttaaatagttatataggagcaggcattgttccttgatcaccaagaaatcgctttgacccctatctccttcttctgcaactctttttcagttttcctcaacacaatttctatgcctccgacctactttcctctccgttgggagagcaccggcgatcagtggtggtacgctactcccattgattatgctgccgccaacagccagtacgacctagtccgtgagcttctccgaatcgactccaataacctcattaagctcacttccctccgcagaattcgccgcctcgaaaccgtctgggacgacgattcccagttccacgacgtcgccgcttgcagatcacgcgtcgccagaaaacttctcgccgcctgcgacgaaggcggctcgccgggatccaagaggaacactcttatccgctctgggtatggtggctggctgatttacacggcagcctctgccggagatctagcgtttgttcacgatctcctggagagaaatcccctgttagtgttcggcgaaggagagtacggcgtcactgatatactctacgcagctgccagaagtaaaaacgacgacgttttccgtctcatttatgattttgcggttactccgaggtttggaacaggtggcatcgagcagcaaaccggagagattccggcggcttacaaatgggagatgaagaacagagcggttcactctgcttcgagaggaggcaatctgatccttctcaaagaacttctctccgattgttctgttgaacatgtcttggccttccgagacaaacagggctccactatcctccactcagccgccggaaaaggaaaaactcaggtaagtgtctccggccactgctataactaaaatatcaatcgatagatgaacaaaattacggatcttggtgattatgatgcaggtggttaaagagcttgtggcttcatcataccatttagttgacgccgtggacaaccaagggaacacggctttgcacgttgcagcttaccgtggccacgctgatcttgtggatgttctcatctcggcatctccatctttgatctccgccagaaacaacgccggagatactttccttcacgccggaatctccggtttccagactcctgcgttcgaaaggcttgacaagcatacggagctcatgaaccgtctgatcacttccgcagcctcgaaatcccaaggggattttgtaaattataggaacaatgagggacgcacggctcttcacttggccatctctgggaatgttcctctggagttcgttgagatgcttatgtctgtgaaatccattgatataaacatacgtgacaacgctggtatgactccgcttgatctgatcaggcagaagccgctgtctccaacgtctgatctcctgttccgacgactcgtatcagccggagggatgttcagttgtcgtgatcaaagcatcacaagtgtcgtcgcgtctcacttgaaggacagaggaaacttttacagccctggagctcgtttcaagacatcggacgctgagatgttcctaagcaccagacttgaagttgcgcctgaaaagattggtgttgttgtccctagacacgtgagatccagttcctgttgcattgagattggtcagctaaacgtgatggatgagaatcatcatctcaagaaatgcagaaacgcgtctgttaactctacaacagagagattgaagagcgttttccactggccgcgagtcaagaaacaacctggccattccaagaacaattctgatattagcatcatttcgacaacacttgagacgcaagaaactcctgtccctctccgtcagagattctcaaaaagcagcacttcttcccttgatccgcctaataacaataaaagaacgttggcggtaagaagtaaccagtctagtcccagagccaagaagaaacggtttgggtcggtgcggtcacggtcgagctcattctcgaaaatatccatccactcttcttccacttcttcgacttcgagcatggttgatcttaaacagaagggagtgctgattgatacgagcatagccggaccatctggattgaaacggtcagagccggtgaaaaataaggtaagcgagaagcagggttcggtgaggagtagattgaagagccattacttctgctttggtacttcagctttgtcagtgaaaacgccggctactgtcttggtataaaccaggttattgggtatagaacaaaaccggtttgtatttagtttggtcttctaaggtctcttatgaaataatgaaatttgttgggttatttcaagccacgcgccaacgatgggcgtatgtatttgtaccagggtggcacccactagctgacttggtcatggatcttactttgatcaatcttcctatcattgacttgaagaaatgttttacattgaaaccgtttgttttgttacacggcaaacgtaacaagacaaatcagactaataaaaactttcatttaaaaaataactttcatatgcaattagaataaacaataatcagaattacagaaattgtccaatagtgacataaaatcaatatacaatagcttaaccaatggagtcattatgaacatgtatcccaatcaacgaccatttttaatatgaattgaagaacaacacaaaatttccaggtaatttcaatcatttgcacagctaataaacctcagtgggggtaaaggtcaactttcattctctatctctcttgctcccaacttttggaaccacacaagacaagaaaaacagataggaaagattgcctcacaagtcacaacattcctaagtttgcaatggcgggaatcccagatcatatccaagaccaacatcttgtggaggaggtatatgctttttatgattttgttacattgaaaaactttattcttaaagagtttttgttactctacttacaggatcaaccctttgatctggaagattggcttccaatcacagcatcaaggaatgccaattggtattattcagctttccacaacgtcactgccattgttggtgctggcgttctcggtcttccttacgccatgtcagagcttggatggtatcttccaactgagatttcaaatacaccaaatttatttgaagatgtacatatgtatatattagactttaccaatgatgttttcaggggacctggggttgtggtgttgatcctgtcatgggtgatcacgttatacaccctctggcaaatgattgagatgcatgagatgtttgaagggcaacggttcgataggtaccatgagctgggtcaggcagcctttggtaaaaagcttggtttgtacatcatcgtgcccctacaactacttgtcgagatcagtgtgtgcatagtctatatggtcactggaggtaaatccctgaagaatgtacatgaccttgctttgggagatggtgacaagtgcacaaagcttagaattcaacacttcattttgatctttgcctcttcacagttcgtgctctcccttcttaagaacttcaactccatttctggtgtctccttggtagctgctgtcatgtctgtcaggtagctccttccttttgctattttcatctcgtgaaaacataacatgaacaagagaagaaattatcaaatgtttgtttccaatgcacagctattctacaattgcttgggtagcctcgctgaggaagggtgccaccaccgggagtgtagagtacggctatagaaaaagaacaacctcagtgccattagccttcttaagtgcactgggtgaaatggcttttgcgtacgcaggtcataacgttgttttggaaattcaagcaacgatcccatcaacaccagagaacccatcaaaacgacccatgtggaagggagcggttgtagcctatatcattgtagctttctgctacttccctgtggcacttgtaggtttcaagacctttggaaacagtgttgaagagagcatcctcgaatcactaacaaaaccaacggcacttgtcattgtggccaacatgtttgtggtcatacatctcttgggaagctaccaggtacaccagaaaacgcctctcattagaagcaaaaaaaaacttgtagttccccgccttaactgatctgctttgtcctcctaggtgtatgcgatgcccgtgtttgacatgatcgaatctgtaatgataaggatatggcacttcagtccaacaagagttctacggtttaccatccgatggacttttgtgggtaagtctctgtgatttttgcaaaccaaagaaactaaattcacattcttttcagaggagtagcattttgatgattgattaacttacctctatatcgcagccgccacgatgggaatagcggtcggtttaccgtattacagcgcattgctgtcattttttgggggatttgtgttcgccccgaccacatactttgtaagcgcgaatactctactcttaaactgctcttgatatcatcaaacttcaatcaacatgttaataactctaacaaacataatgatatgttatctttcagatcccatgcatcatgtggctgatcctaaagaaaccaaagagatttagtctctcatggtgtatgaactgggtaagatgtttgtagtcctcagatcaaaagctaaatatgacacttacagctaagttaaatctttttttttggagcagttttgcatcatttttgggcttgtgctgatgatcatagcacctattgggggactggccaaactaatctataatattcaaaagggcactctacctaattcaagatgcaacttacctaaacactgacgattgccttgtaggtaacataaattggttggacgcaacaatttcgctggtactagagtctagaggctctattaccaaactcgagtgtaaatctatagaattaactctgagacatgctccctctctctctcggtgctgtcggtcattggtttattgaattaaccaaaattttactcactacacaaagtgttattgattgtttactcggataaaatgccatcgcattggttaaatatcaatctaactatcattttttacaacaactcatgtacacttgactgctgttatccaagacacaacactcatgaatctcagtcgatttcaccctcttctacttcattgccgggatctggaaacgcaagcatgtcggattcatcttcatcctcctcatgtttcataaatagccccagctgctctagaggattacttcctccaaacccaaatacagccaacccatcagactcagagccaacatctcttagatttcgtaactggtccgtgttaaccgttttgagcagttctaggtccttgagaaaccttgtgttctcatttatttcaaccgacttctccatctggtgtaccattcagtcatggcaatgatcaatatacatgtattgcagtttataaaaccaaactggtacaaggcagcaattttgatttacctcaagcaatgcctgccgggctgcttctctttcaagttccagtttcctcttagcctcttgtgcctcagcttttctacgagcttcttcagcttccttggcttctgcttgtaaccgtgctttttctggtgcacaaaacaataagaggacaagtttatgtacgtatatactacttggtatatatcatcaatcaaaaaatcgaaactagcaaatcaagaatacctttcttcttttgcaattccagttcttccttctcacgttgcagtgtctctgggtctcgtttctcattctgatctcacaaatataattttgaaagtcaaagagggagggctaaccagatataacagctcacacctccacaaacacagctaacctgattaagagttatctcttgagccttcaagattatatccgcaaatcgatttttcaatagagcagccctgtaacgcttttctggaggtagttccttctcttttggagcactatttcctaaattattaatgggtcaagagtgagatgccaccctcagatattagagcacagatatttttctgctacacttctgagcttaccatcttgatgaccatctgccccctcaataagacttagcttccctctggatgcatcttccatctgattcaatccaccgacggaatctgcttttagaaagggaataagaaaaccaaggtttattaattaatatcaacaaaacttaacatcttttgcaccaaaagaggagtaatcactgattagagataatatgatcactatagaaaatagcaaacagcgacctgggagtaaaacaagcagaaaatgtaacaggtctatcactatcatactaggtgtgtaatatgagttgctatcagtaaggtcagtaagtttcactccaaaaaaactacagaagtaacattgagtattctagatggacggccacttctgacaagagggaagtaaaatggttccgagggttaagtacatataagaattgcaaacatcaaacgtctgcaaaagctccatagagaaaaagacaaatacaatgtagcaagattaaacaaaccactgtagttctctaacgccatacctttttctgttctgacagttgagatgtgagatatagggtgctcataattaccaatgtcaacatcctcgtcctccaattcactccctgcaagtaacgaggaggaaatgacagcttaatcatagagtaggacatgcgaattagctcaaacaacaaaaccagtgtatgctaaccatcacagtgttgcgtcaatgaatttcctggccctgacccatgtaaaagctacatcaagaaagttttcgctgtttatcagtcatgttaacaaatggatcaagaatgagatatagaaaggtgattacctctaacacacagggttcaccgtttgaatctttcttttgattttctcgcagaaactcatcaaagagatcccgcaactggaacaaggcatcatgactgagatcattgatgtcaatctctatctcatcatctccagatctctcttccttggagctgtgatctctcaggaaatttattatctgtacagggaattctgtcaaggaccccaaatctctgccaagctttactctatcctcatctgtcataacccgcttagcaggctctaagaggctgttacgtttcacagcattcatctttctcttcttagccacaggctcaggtatcgcaatatctttgtgagcaagagtagccaagttacttggttcagatttggttccggatgacttcttctcgatagttttccatctcacttcaaaaaacttgctgagagtatcagcgaagcgatacacattattatctgacgggttataagtcatagcattgcggaaagtaagacggacatcagcagaaaactctgaagggcttgaatacgtgccggaagttaacttgcttttaacagttcctaaatccataggatgtttgataatggtgaaataatcaggaatgttgagcttgacgacgtccacaggggtattaaagagccaacaatgctgctgcgacatcaatcgtttaaggaggctctcacattgcttcatccgaagcatagtggaagtggtgactggctctggtttggttgctgtgaaggggagcaccctttttccagggccagtagagcatcgtgacattccaaaactcttggggcgagacacattacttgcaggtgtactagtaacaatcttagatataggaagaaggtccccaacactcttctgaaaggaccgtagttgttccagctcctgacgaagcgtatgaatccactttctcctttctgatgatgacaagtcagacaagggtaaaactattctcgggacaccaaaagtttcatcatccttggaagcattggggctatcatcacagccgccgggagagtcaaaactgttacgattataatctcctgggaaaccaccgttcctcacagtcatgatatcgcccaccgaagtgcgaacctgcacaaatcaaaatatttaagtcagttttgagaaaccctaactatgaaaacctgaaagcaattcaattcttagagccctatagtattgctggaggagagcagtgaacactcaatatgcataaaaaaggaaattcggaactaaccaactcgaaacacttagcaagcgatcgaaccggagcagaagtaagagaaccgaggaacaagcgtaaatcttctccagcagaaacagattaacgctagagattggtgtagaagatgatgatgaagaagaagatagagtaaaaccctagagtggagacgaagaagacgaccgagaagtagagagagaacaaaatcgctctctgccctcccttctctagtgtcccgtccctaacgaatgctgcgtctaacgccgttttgctactgggcaggactcaatctggaccgtcggatctgatccctcgaattaaaatcgaatgcaaatacttcggtgcataaaaataatatcctgggcttataatgtaaagcccaatgaactttttaatgtgcctttattgggtctacggatgactcaacacggcacgctgtgaaagctcgaatcgcaggaacggcacgcgcttttttccttcgaaaacaatttcttctccttcttcttcaattgatggtttgatttacacatccttcttcttccagttccatgtcgcatacgtacacagattgacagcgaagctagttagctcagattttggatctcgaatttcagttaattcgatccggttatggacattctttttgctcagatccaggcggacctccgttcaaatgacgcgcttcgccagtcatcggcgcttcttcaggcgctgcagcaatccgccgccggaagagatatctctgtgatcgctaagtctgctgtggaggagattgttgcttctccggcttcagctgtttgtaagaagctggcattcgatctcatccgatctacccgcctcactccggatctttgggacaccgtttgctcaggtgtcaaaacggatcttcattttccggacccggatgttaccgccgctgccgtctccatccttgcggctctccctgccttctcgcttcctaaactcatctctgattgcagctctgagattgcttcctgcttcgattctccatctgacaaccttcgtttttccatcaccgagacacttggctgcatcctcgcgcgtgatgatctcgttactttgtgcgagaacaatgtgggtctcctcgacaaggtctccaactggtgggctcggatcggccagaacatgctcgacaaatccgacgccgtctccaaggttgcctttgagtccgtcggcagactcttccaggagttcgactccaagcggatgagccgtcttgctggcgataagctcgttgacagcgagaactccctcgccatcaggtccaagtgggtctcttccatggttgacattgtatggagaaagaggagcgctttgatggctaggtctttagtccttcctgtcgaaaccttcagagccactgttttccctcttgtctttgctgtcaaagctgttgcttccggtagtgtcgaagtgattagacagctttccaaggcttcctctgctgctgctgcagctaatgccaccgttgtggactccaacgccgagaagctggttggcgtctcagatttggttacccatttggcgccattcttggcttcctctttggatccagctttgatttttgaagtgggaattaacatgctctacctggcagatgttgccggaggcaagccagagtgggcttcacagtccattattgcaattttaacactctgggaccgccaagaattttcctctgctagagagagtatagtcagggccgttgttacgaacctgcacttgcttgatctgcatatgcaggtatgtcgttttttacttcatttaagctcggttagttgtgtacctttgtcttgaagctgtggcctatgatttctgaatcattctttttggaatttgttacgaaggtttcgttgtttagaagactgctgcttatggtgagaaacttgagagcagaatcggacaggatgcacgcattagcctgtatctgtcggacagctctctgtgttcacctttttgccagagaaagtgcccgaagaggtcagaagcctctgcctgggacagatattatttctctctttgaagatgcaaggattaaagatgatctcaatagtgttaccagtaagagcttatttcgggaagagctggtggcaatgcttgtggaaagctgcttccagttgtctctacctttgcctgaacaaaaaaactcgggtatggagagcagagtgattggtgcgttagcatatggtactggttatggtgctctgaactggacagaaccagcccttgaggttgtggaagtttgtaggccttgtgtcaaatgggattgtgatggcaggacgtacgctgtagattgctatttgaaattgcttgttaggctgtgccatatctatgatacccgtggaggagtgaagaggctgaaagatggtgcttcccaggatcaaatattaaatgagacacgattgcagaacttgcaacgtgagcttgttaaggatctccaagaggtaattaagcctcagctgaaagttagaagtaacccttggcaattttcctcgaagaattttagttaggctttcttaagtactatttaatactaaatgtggaggagaactattgcttgtggactgaaacgtggtcaatgtcttataaaaatcttgatctcaatttggcaggtaaataccccaagaatcctcgggcgtcttatatggacaatcgcagaacatattgatctagaaggtctagatccacttttagctgatgaccccgatgatccattgaatattatcatagcaaacatacataaggttctcttcaacttggatgccgctgctactacatcgaataggctacaagatgttcaggcagtcttattatgcgcccagaggatgggatcgcgtcatgcaagagctggccagttattaaccaaagagcttgaagagtataggaaccatgctgctgcagatacagttagcaaacatcaaacccgtttaatattgcagaggatcaaatatgtttcaaatcttcctgaaagaaagtgagctttcccttggcttgtaatccttttattatgtgagttttactgcatttctggattggaactcagacaacctattattttccaggtgggctggagttagtgagacaagaggagattacccgtttagccaccataagcttactgttcagttttacgaaccatcagctgctcaagacaggaaattagaaggtctaattcacaaggccattctcgagctttggaggccaaagcccactgaattaactctcttccttacaaaaggggtcgactcaacttctatcaaggttcctcccacagcatatcctttgaccggaagcagtgatccttgctatatagaagcttaccatttagcagatacaaatgatggaagggtcactttgcacttgaaggttggtatatattctactgtatcatcctgcagttacttgaatacagttttagtggataaagttttagcgtctcaacaccttatactttatgttacctttcagattattaatttgacagaacttgaactgaatcgtgtggatatacgggttggattatctggtgccctatacttcatggatggctctcctcaagcagtgcggcagttgcgtaatcttgtctcacaggttgcatgtcattcttcagtgcttatatactcccatctctttacagttctctaatttcttaagtcttgtcagttggaaaccgtttctgttcttaccaatcaatcagtttcgtatatgttagctgtattatcatggactctgtgatttacttttgtaggatcctgtacaatgcagtgtcaccgttggtgtgtcccaatttgaaagatgtggtttctgggttcaagtcctctactatccattccgtggtgctaggggagaatatgacggtgactacatagaagaggatccacagatcatgaagcagaagagaggttcaaaagcagaactcggagagcctgtgatcttaagatgtcagccttacaagatcccactgactgagcttcttctaccgcacaaaatctcaccagtcgagttctttcgtttgtggcctagcttgccagctgttgcagagtacactggcacatatatgtatgaaggaagcggcttcatggcgaccgccgcacaacagtatggggcttcaccatttttaagcggactcaaatcattatcctcgaagccattccacagagtctgttcccacattatacgcacagttgctggctttcaggtgaacttggttctgttattcttcttgttccttaactggattgatggtctgataaacccctaacttgatgtcactacagctttgttacgctgcaaaaacgtggcatggaggttttgtgggtatgatgatctttggcgctagtgaagtgagcaggaacatggatctgggtgacgagactaccaccatgatgtgcaagtttgtggttagagcatcagaagcatcaatcacaaagcaaatagagtcggatattcagggatggtgtgatgatctaactgacgggggcgttgagtacatgccagaggacgaagtgaaggcaaccgcggccgagaagctgaagatctctatggagaggatagctttgttgaaggcagctcagccgaagaagacttcaaagatagaggaggaatcagaaaacgaagaagaagaagaaggagaagaagaagatgatgatgaagaagtaaaagagaaaaaggagaaagaagagggaaaggacaaggaagagaagaagaaaaaagagaaggaaaaaggaacattttctaagctgacagcagaagaaacagagcacatggcgcttcaggcagcagtgctccaagaatggcacatcttgtgcaaagatagaaaatataccaaagttaactaagagcgagagtacttttttctcagatgaagctacaacaatctttgttttcttttgttgtgtgtggtttcttcgtaggtttagatgttttgtattgttgttggtgaagaaaagaaacaaaccaaggatgttactattgcccttttttacgaattcttccgtcttattcacaaatttcacacgtttatggaaccaaggatgcatttacccattttccatcagtaacattctgtagtcatgcagtgtttggcgtgagattgctctgttttttgcaacgaagaaaactgaaagataaccagaaacagatccatgtttaaggaagatggttttggcttcatttgtgatacagtgtttgagatccagaaacaggtttattgtctgagaaacaagaaagccttaaaagcttatccacgtctgcattatgaactttgcttacaaataaaaagacagtcacatcactagctttcctctgaagtaattcctctacgcaggtacttcagagagggtcctcttctttcctttctttacctctgttccctcattttctgcctgctctgccttcttctgcgcacggatcattgctcgccttgcgcgcggtcgcatctctctaactctacgaggcggcatcacaaatggctcaagtggcttgtccccaaaaggatgctcaccgccttcaaatatcctcagcttccgatccctgtcctatacccacacaaagcaacaaaacctcagcacattcttgttttaagcaacacatcctaaactatgcgagcaattcatttaggagctgagaagcgagaatgtatcagtacaaacaagccactattcccaccaaagataaaggacaaataacaaaatggtaaaaccaagagttcagaacaatcttccttccaaacctaaatgattttcaaaacaagggtatatcatctcattcgataagaccgatttgtgaggagagacaacctttctagacataggacaccaagaatctcattccacacaactcatgatggatatcaacaagtaagagtaaagccaaggtgtggggtaatatctgtagccagaaagtcagggatctaaaagactgaggattcaggtgattagaaaatgtttcagtttatagtgtactcacatcacgcaaattgttacttggaagcatgcgccagacagccttacgaatgacctctgtgggatctttggccatctgatctttcagactccgttccttcaggtgtccgatgtacctacaaagagagattaaataaagtagatgaaaatgggagatactaaaagatatgataaaacacttgtagtagctgaagattcacaggagcattaaaagaaagagtgcaacttgcccagtatgccaacggtagaatttgtcagtgagctttcttcctgtgaagccgatttccttagcattgagaacaatacaaatatcgccatcgtcgcggttaggacaataagtaggcttatctttggcttgaagcacggttgatatctgggaagctagtctaccaagaacctagagtagacaagttatattcacaaatgaaatcctagcaattcaattcagatttaatacaaagacacaacaaagataaggcatcctatctaaaatctggaaatgtttgccactgtagtcatgtaactaaccaagcataagaagaagaaagtggtagaagaaagagagagtagattggaagagaggtagaagaaagaaaacctggcctctggcatcaaaaacacgccaacgaagaccgtcgagattgatacgctttatacctgccacagctttctgcacaaagacatactcaagatcagcaacaaaacataatacaaagagtagattggaagtttttttttaataatagaaaggggtccattttcgaataagtttgtagcatctactcaatttctaaattgcatagcataggtgtgacactctctgaccgtaatggagaatagatgcaatgggaagtgatcattgttccaaatgattttaagtagaaaatgcataacacgtagaagaagacctaaacgtgggaatcgctcactggttgatagtaatctaaggtgatttggctaaaactgatcaaaaagctggagatatggaaggaagaagtaatcattttatacctttaagttgcccttgaatgaggcagcagcagcagcctgagtcgccatcgttcttcagctgtttgttagacaaaaaacaaaaaacaaaactgagaatgtgatttcagttatacagattcgtatggagaagtctgcaacgaattgaccagaatcaccagagagatgactcaccggttaccggagacagtgccggaagtgacagcggcggtggaaatgggaagatctaggagggagctgtataacaaagggttttagaaggcggagggctattttggtattttctcattaaaagaaaaggaaatgactttatatatgaaggaaactaaattttttttattacatttcagtcgtcgattcgaggtcgagggttttagctctatacacggaatcaatcaaaaggtacttgtttttcttgcgtgtcttcctccttaaacctcagaaaagaagaagaagaagaagaagaagaaagttgaagtctttagggatgatggctatgttcgtgagacgagctctatctagtcgtaacgcgattgggtttctcagaagaagctccgttgttgttcaatctcgtgatttctccttcatttcttcacccaatctcatgatgatgggaggccgagatctgcaattcgatttgtccatgcccgatttcctcagagattctcgtcgaggctttgcaaaaggcaaaaaatcaagtatgttgtttattcctcatttccatttatcaatcactcgctcgtgaatcttattaacatgatttgtagacttttcaagtagagggattgatagattcttcttgtactagttgtagttggtatcaaaagagtttcttttttcttttgttttttgttgtatgaacaacggcatttctgccttcttcttcagaggacgattcaggaacagggatggtcgacgcagctccagatatcggacctaccgtgaaagcagcagcctcttctcaaatggaggcagccattgatgcattgtcccgggatttaactaaattaagaaccggaagagccgctccaggtacttctcacctctttctttcgggtttaggttaagcctctctgtgtctgtgcttattgtgtgcatttgcaggaatgcttgatcatattgttgttgaaacgggaggagtaaagatgccactcaatcacttagctttggtctctgtcttggatcctaagactctctctgtcaatccttatgatcccgatgtatactgattctttctttctcttttactaagaaaaacttcgactacattagagtgtcatttttctccaacaagccgccattgacgctttgtttgtctctgcagacggtcaaagaacttgagaaagcaatagtcgcgtcgccattaggattaaacccgaaactggatgggcaacgactggtcgcatctatcccagcgtatgaaagttcttctctgtcaaatttcattgtttatcacagccgtaattgactgactttgtctgatttccgctctatgtttttatttcgtgagcagattgaccaaggagcatatacaggtaaagcatccaagtcatgtgttattgtttagtcactgaggttgagccttgaccctatctatctatatgaactccaggcaatgtgcaagattgttacaaagtccagtgaagttgtcaaacaaagcataagaagagcgaggcaaaaggtagtatgaatggtgtagagcacaaccatagaagctgtttgttgtaaactctctcctacacgtcagaacatctaatgatcagagacttttttttttggtcaggcactggacacgataaagaaagcaggctcgagtctaccaaaggatgaagtaaaaagactggagaaggaagtgagtgtcattgtatgatctttctgcaaatatgcatcctacttcagttactgaaaataatggcctttgtgtgaacaggtagatgagttgacgaagaaatttgtgaagtcagcagaggacatgtgcaagtccaaagagaaagagatcaccgaagcctgattcatcattcctatacatcactagtcttttcacgctaccttgaaagaatcttttattcattaccaagatttgttttcaacttttgaatgtttgatttggggatcttggaactgcaagaaaattgatgatgaatagcgatggaaggcccttcaaagggcccaagaaaggccttgaaagaattccaataattatgatgttatttttcgagtttcatatatagtagtactaattggcttttgtagttgaagagaagtttccaaacttgaaaaccaaggcaaggggggaagaggtaggagatgagtcaattagtttaccaataatttgacatgatagtgaaattgatgtgtttggtaaatttgttacaaccccattaatctaatctttttttttgtacttgttgcaaagaataattcaatgatatttcttaaagaggaaatttctatatacatataaacgataagcttatctcagcattccaaattgatagtgcgctttcaaacatattataaaatttcagacatagtttactctaaactcggtccatctctgcaacaaaattaaaaataaaaccgtcctcaccaaccacaaatcttatatttaaaattgaatgcatttaatttttaaaattgatcactaacaaagaaatgtaggtaatataacaagctgtataatttgtcggcaaaaagatataacaaagaaaaacatgtacatatacatttatctaaaatgttgagcaataacaatattgaagacgcaataacgataccatttaatctttgcccactcgcattggtgacggagactaaggcaaaatctatcgaaagtggtgaccattaaaaagcgcgtcggtgttcactttttttagtcagggaccaggagatcaccgtaacgtcgccgtttcgatatttgcacgatcaaactcctttttttattcttttttggtcatcttttttttctttcttttctttatggcatcataattttttttagtcgtaatctatagaggagactaaagattcttcattctgtgtcagtggctcacatcctctgattaactaaaacgcacacaaacaagaaaaaaagctatgaaaacaggaaaaaaaataggaaatatcagtcttgtctaaaacgacgaagaagaagaggaagaatcgagacaaacatttcacattcccagagattgtggtgtcgttgggtattcattctctctctctctcacattactttgacgagttcttagtgtgttggttctccaaatgctctgcatattacattaaatctctctctgcttttttttgggctataatatatgttgggttttcttcaacttgcttggatctgttgtaataagcgagttagctcaaaatctctttcttaatgaatgagctttcaaagttagctgttttttcctcttcttcttctttatcttggatcttgatcaatcgaatcagtaatgtgtttggaatagaattagttacatacatttacctttctggttcatgcattgtcttagcatttgacggtttcgctgtttcagattaaaagttgaattcttagggtttagacaaagctttccctgttttgttacttaaatgtttgctttgcattcggatgatgcttgtgcaggtacttacttcttagggtgattcaggacttgctaattataggcaaaaaatggttttgggtttaagctcaaagaacagaagatgctcatcggtacaagttgattacctgatccacattcatgacatcaagccttggcctccttctcagtcccttcgatctcttcgctctgttgttatccaatgggagaatggtgaccgcaattctggtaccacttctgttgttgctccttctcttggttctgtcattggcgaaggcaaaatcgagttcaacgaatcatttaagcttcccctcaccttgttgaaagatgtctctgctcggggcaaaggtggtgatgtcttcttcaagaacgtcttagagctcaacttatacgagcctcgcagagagaaaacacatcagcttttggctactgccaccattgatttggctgtgtacggtgttgtcaaagaaagtttcagcttgactgctcaaatgaacagtaaacgaagctaccggaatgccactcagcctgttctgtacctcactattcaacccgttagtagacgccgggccagttcttcatctatgaacagcttgaaggatgaagccaagaatgggggtgaatctgtttctgccttgatgaatgaggaatactataaggaagctgagattgcttccatcacagacgacgacatttcctcccactcctccttgacagtctcatcttcaactttagagtctaatggtggtttttctgtgcgaaccgaagaggtaagagatggcaatagctcgacattcttctgataagttatgaaaatgaaatgtttctcaatgctttgatgtcttatttgcaggaagaacatgagcgaataaacaagaatcccagagggaatggccacgagagatcaaaatcagtgtcagagagcagacaaagacaaattgctgaccagattccgtcacgttcctcgtcagtagatctatcttctgtgtttcatctcccggagggcatttctgattctgcacccaacacttctttgtctgggctggagcactgtgctaatgtgtttataactgataccaatgagagctcgaagctggcaagtaacggtcagcacaataatggagaggccaagtctgtgcctttacaaattgacaatctttcggaaaatgcttcgcctcgagcctctgtgaatagtcaagatttgaccagtgatcaggaaccagagagtatagttgagaaatcaagaaaggtgaagtctgttcgatcatccttggatattaaccggagcaatagccggttgagtttattcagtgaaagaaaagaggctaaggtgtatccaaattctacacacgacacaactttggagagcaaaatcaagaacttggaaagtagagtaaagaagcttgagggtgagttatgcgaggctgcagccattgaagcagctctctactccgtggttgcagagcatggaagttcatcaagtaaagtccatgcgcctgctagacgtcttttgaggctgtatcttcatgcttgtagagaaacccatctctcaagaagagccaatgcagctgaaagtgctgtctccgggttagttcttgttgccaaagcgtgtggaaacgatgtccccaggtatggtaatatctttctttgcataattactattctgagtgaactttctcagagttaaattttgtctgtgaattgcagattgacattttggttgtcaaacactatcgttctgaggacaatcattagtgatactagtgcagaagaggaactgcctgtttctgctggtcctggaccaagaaaacagaaggctgaaagagaaaccgagaaacgatcgtccttgaagtggaaagattcccctttgagcaaaaaggacattaagagttttggtgcctgggatgaccctgtaactttcataacagcgcttgaaaaggtcgaagcttggatcttctcacgcgtcgtagaatcaatttggtggcaggtaatgttgctctgttctccctgtttcatcttttcattctctgaaccaattataattcacatgttctttttctttggttgcagactttgacaccacgtatgcagtcttcggcagcatcaactagagagtttgataaaggaaatggctctgcatcaaagaaaacttttggtaggactccgagtagtacgaaccaagaactaggtgacttctcattagagctttggaaaaaggctttcagggaggcacacgaacgtttatgccctctgcgaggtagtgggcatgaatgtggctgcttgcccatacctgcgcgtctggtaaacatttctcctgttgagtttgtcacttttggaccttactcttgatttcacaaacgaatgtccacgatttgtaacgcagataatggaacagtgtgtggctcggctagatgttgctatgttcaatgctatccttcgtgattctgatgacaatttcccaacagaccctgtatctgatcccattgcagacttgagagtcttgccaattccttctagaacatcaagttttggttctggtgcccagctgaaaaactcggtcagtgtactcaactcaatagcttggcaatgcttattatactgtggtctctgtaaagctcatgcatttctaatttcaaacagataggaaactggtcaaggtggctcactgatctattcggcattgatgacgaagatgatgacagcagcgatgagaatagctatgttgaaaaatcgttcaagacattcaatcttctcaaggcgttaagcgatctaatgatgcttccaaaagatatgctcctcaacagttctgtgagaaaagaggtgcaaatgcaacataaaactcacaacacttttttttatctagtcttctttctcttacttgatgtaatatatttcttctcattgtgaaggtttgcccgatgtttggtgccccgttgattaagagagtgttgaataattttgtcccagatgagttttgccctgacccagttcctgatgctgtactgaaatctcttgaatccgaggtgagaccatttttataatgatggatctaaggctaagcagctaattttgctaatggaaacgtgatggcccttgtaggaagaagctgagaagagtatcatcacaagctatccatgcactgcaccttctccagtgtactgtccaccttcacggacttcaatctccaccatcattggaaactttggacagcctcaagcgccgcagttaagcagaatcaggtcttcaattacaagaaaagcgtacacaagcgatgacgagcttgatgagctgagttcaccgttggctgttgttgttcttcaacaagcaggttctaagaagatcaataatggtgatgcagatgagacaatcaggtatcaacttctcagggagtgttggatgaacggcgaatgatcagacattgatgtgttttgtcttttagtttccacttgtgactgtttgtaaatgtctctgatgtgtcaaaaatctttgtcagttggttgtttttggtgttgccgccatgtatagaatgaagacagtagtaacagtactggagtttgagcttgacatatatacaatttgaataacacgcagattgaccactgaagaatcaaaaacggaggccacttagtcaaaaaaaactctgaaactccataaacgaatcccactcttcagctatcctttgttccttacacaatttcacaacaagacattacaatggtgtttattagaagtaaagtttcaaaatccatgtaagccattgattctatagaggtaccttgtaatactcctcgagtcctcgtcctcgaaaggaagcatcggatttgaggaacattctcttggctatttcgagttgatttctcttccaagttgtgtcgtctccatttttgttgttacagtggccgagctttttgttttcacagcgattggtttacattggttttgaaaattcaaattgatctcggttcggtttacttttggtttagagaagaaaaccaaaagaaataagacacgcgatggatttttgagaatgaggtgcgtggatcaaaaaaggaatgatttttgtggattaacccctttaaaaatcgtagacacgcgctcaacgcgacatgggtgagagtggccgtaaaatcgagtcattgataaaagtggagtatgaagtggagctctctcattggctaaaaaaataaagatagtagggaagctcctcctctcatatattgaaaccaataataaacacttacgaattttctgcgttttcagagtgaatttttattgatgtgcatagattttgtttcatattttgtgtacttgtagtttatcaacacttatggatcattcgaaatgtataccaaccagtaaggggaaaccttcaagaagaagatcagaaccaaagtatcctctgcgatggaaccagttaggcttgtgtcaggttcacaaggagattatgatacttttggtgttgccgccatgtatagaatgaagacagtagtaatagtactgaagtttgagcttgacatatatacaatttgaataacacgcagattgacatgtattgcagagacgtgcgctagattgttgcaagtgaagcaaatcatgcacgtcttgttgtgatataggaactatttttcatagatggaaaatctttgttgtatatataatagactcattacaagctttagtggtatcatcctcatcacgtttgatctctcgcaaaactttgaattacagaaaaagaaaacaaaaaaaaagttgcatattaggggttaagaagacccataaaatgagagagaaagatcaaaatttataaagcaaagctctgttttgtagttcatcatcacagagttagcttctgtgaagtcgtcaaattcacctgcttcagatgtaaagctgccaacaagccctgccatgtgtctgctgatgtggcaccgccaacatgaaagtctagcagtttcctctgcttcctatagtattcttccacctgattgaatcaccaccacaagattttcagctgaaaccaccttgtaaactagatatataacaaagacattgatcagaaaagtacctcctgtgcgtagacaccgacactctccctccgagcattgattgcaacaggtgagtgtaacatagagccgaggaactcctgctgaggcagagctgtttcattccggtttaccagatggtcttcagagcatttgagattgacaacgaggtcaatctgagcgatttgatcaagagtttcctgcaaaacattcagaacaacttgaagaatcactaaaacacaattcaattgaggatctctattaaatgttagtatgtaataagagcttcccacattaaaaaaaaaaaagactgttgtaagtaaatatatatgaaaagaaactaacggcttgaaaacgagtgcgaggaatgccatgaagaatgaaaccagtttcccctcttgcatagccttcttcgagcctctttgatagcaacgcaaacacaacactctttggaaccagctttcgttcatttacagcacttgcaatctataccaccagaaattttgattagttcaacaaccataaaccggaacaaatgttatgttctctctttacaagttcctttcattacctattaggctaagttatgtggattagtcaacaacattaaatgaatcattaaagcacacttggaatcaaactctataaacagcaagaattcccattaggtgatcataatctagacaactaactctaatcaaacatcttatgaatcaaaataatcaacactaacaactaagaacataaaaaggtaatgtatttaaacattttcaaagatggcttttctaaggagaaggtcttagggaatcaatgcaaatttagagagaagacaagagtagcacctccttgtagagagaagatctagggttgagttcttgacggacaagggaccccatggaaatgtgaggaacttcaagcagtttggagagcctctcggcgaagacgtgcctccatgctccaggggctcccataagcacccactgcactcctctatccggccccgatccatccaacccaagcctcggttccgcgaggcggcgatcatctccgtacaagtactcgtcatcggagtcgtagtcaaactccaacgcggccgctgatccaaaagatcgacgaatcgctgcgagccttgtcaccggcgaaactcctctcacgcggctaagccaggccatggtgaaggcgtggcggcggattcagagagaaagagagaaagagaatagccacagaaagagagagagcttaaagagaggggtttgaacggagacggagggccgaggtttatgggacagctgacactctctcttttctttctttcttttttaattgattgccactcctttactcacgaatccacgaaattgccactgcccacatgtccgcttcctatttgtcgctcagataattatttgagtgagaattgaatggacaacactgaaacacgtttaataaggcccaaacgtctcttagcccagacttggcccacctaattatattcaacgaccgaaattgtcaaccattgttaaccacccaaagaaataaataaaaagtaaagatacttattcacatgaagcctgacaagtttctttttatagaagactagtcaacgtcaacggaaacttcgtcgtcatataatattttagtaacgaaataacgatgaactttacttgttgttcataataaaaacagaaatagaaacttgtcaacatagaagccgcgggaacaaagcgtttcttcttttgtacgtagcgccgtaaacaaatcaacaagtccacaatccgcatgtgttaaaagtacggtcttatatttcaacgtttttcaaacgtctctccttcatcttctatatattttgccaaactgaacaagtaatagtcttcaaactataatcattttctcctatctctcgctcaagtcttcttcatcgatcttctatgaagagtgagaacgttaacaaacgtgatgagtatcaacgagtctttagctgctttgacaagagccaccaaggcaaggtatctgtttctacaatcgaaagatgcgtcgacgctattaagtctggcaaacgtgcagtagttgatcaagaagatactacaaatccaaatccagaggagtcgactgatgataaatcgttggagctcgaggacttcgtgaagttggtggaagaaggagaggaggcagacaaggagaaggatttgaaggaagctttcaagttgtatgaagagagtgaaggcatcacaccaaaaagtttgaagaggatgcttagtttgttgggtgagtccaaaagtctcaaggactgcgaggttatgatttcccaattcgatattaatagggatggaattatcaactttgatgagtttagggccatgatgcaataacatattcattagttacaaatatcatttttaatctattatactactcttctttaccaaaggcttgtatgaactctctgaaattaaggtactctctctatctattactgcctcatcttcttcatcttcatcgtcatccaccaatcttgaaaccctctctgcaatctcaaccgcgctcggccttgactcggcttcttctgcagtacaatctcttgcaatacttgcgatttcaaacgcagaatcaaccgaatagctctctcccaatgtgctgtccatcacttccctcagcttttccttgtccccgagaagccttcttaatctactccattcggaaacaaaagtttcttgtgtcccaagggatgttgtctctacttcttgcaatccaagcaacatatctggggtttgtccagacaaaacctccattacgattatcccgtaagcaaatatgtcagaagctggagacagtgaactctctataaggttctcttctgtggctaattcattggttacgcactttgacatcccaaagtttccgactttacctctgagatcttcgttcaagaagatgtttctgctcttgatgttgccgtggacgtagttgatccgatgcatatactttaacgcgatggcgacatcgtgacatatcttgatcctctgtttccatgccaagaaacagtaacaagactcgatgaattgattcttgatggccaatttgttctgaatccaatcccacagggacccattccttgcatactcgaaaaccagataagaatcttgatcgatttctctaaaacatgttccaagaaccctaatcacattgtggttatagtagtgtgactgatcattgagaagcccgaaatcgaatcttttcatttcatctgcattgacttgctttatagccaagtctttgcctttgagcgaaccgaaataaaccgaacctttgatgtgattgcttgaactgaaattctccgtggccttctctaactcttcaaacgcgtaaatctccagaacgggttttcggggcgttgtggtgccgacggtgttgtgagaatccaagatggaaccgtcctgcgacccttcaaacgagattttcttgtcactcgtggttcggatgctcagactcagctgccgcgtctcggggtctttgttgctaatccacttttgcgtttgcgtttgaatctgcgtctctttcttccagtgtaagtaaccaaacaccatgagagtgacaagaccgcaaactccagcaatcgcgctgctcacagcgatcatgagcttcatctttgaccgtttcttcttggatggatttcttttccgggatccttgtttctctggtttgtgatcaagagggatgagagcaggcttgagtggaaccacaccagatttgttgtttgcagagacaatggcatcctctgttgtgttaaacctaaccgccaggcttgaaacgctgtcgcggacgcccaccggatacgtaacgagaaaactagcgtttgaaacgccttcttgtggacaagagcacctgatcgccaaacgcagtttaatgttgtcgccaagcttgtcttcggaaatatgtggattcttctctctgatagatctgcagtgaatatagcagtactgaatcgataaacaaaaacaaatttcagtcatagacaacttaattggaaaaagtgtttggctctcacaggcaggtggtcaagccttgcagagactgagagacagagcgaaaggtgtctcctttaacgcaatttttaatgagactggcctcgtagatgcttccattacacctgcactctattgggatcaagagtaactgacctttcggaacatactcgtcgtctgcgtcgagaccaagatggcgactcaggtccgagagggaatagaagggaggtttggctctgagaatggcgaaagtgtggcacttttggaggtttgagtggcaaacgtaaccgaaggaggaggcttcttcttcttcttcgacagggtcacagctgtgtgaagttgaagttggagagagagatgataaggagatgaagagcaagatcactacaagacttgtcatgtactgcttactaactgaaacagccatgtctgacttctagagctcctccattacaatctattgcatgtatttatatatattggcaaacatgaggaatcatggattgaaaagttttttttaatcattttattgaataaaatataaggtatgatttccccttctcttcttaaaaatgtcttatgttaattgttaggtaaagtaaacatgtattaaacacacacatgactgccactttttttgtttggggataaagaaagttcaaggccttgtaccataatctctcttagtttgggaataaaaaattgataatatttgtctacacgtaaaccatcctttttccaacgtatattcgaacttgggaacaaagactcaacattccccattatatttaaacagtagattagatggttaaattaccataaaccatactattgttaatgatatatattttttttttaaaaaggaaaaaaaggggtcatcggagccgtggaggtttgtcgacaagagggggtggctatgaatcccgaagtaagactataattaaattataaaggacttcttcttgtgcttgggacctgttcttcgtaaactgaacaacattgacaaagtgcaaagtccaagctaagtgaatcgaaaatggtacaaactcactttgtcctaagaagattgtattgtttcggaacaagttttaggccgagttaggacccactttttagtttttgttgtggtatcatcttggagtcatggcctatgtatctttctctttatcataaacgatttgtatcgggtctcaacagcatgtgctatagtttatttgagtacggagatctagactctcagaattgactcacacctaaattttactaatttatatctacagtagcttgctaaagtaataaccacaagtccaaaacgtatccattttatcctagtctagtaatattggttgagagacctgataagtgaacattgtagttgataccaatttggacttttgacataatgacaacatactttggtaattatcgtcttcggccaagatcattttaaaattgaatcaacgttttaggaaacgtgataagtatacttgaaaggctggctttaagcgaacaaatccaaaaaaaataccaaaaacttaagatccaatggctcggtcatgtaaaaatccaaaacatagtgtgtggagaatgatttgggaatttgatagtaggggaaaaacagaaaaacattatcaagaaactgaaaagacatgccatacaaagcaacgacaaggtgctaaaaggctaagtactcttaggtccatcttgcaataaatacctatgttgaccccgaaaataaaaacaagggaatcttaagagaggtaactacaaaattactacttaacactggaatgttcatgttgtatacttgtattcataattataaccattccaaaatgactgaacctaatacgtttattaaattactaattatacattgcacactactcttggtacccaactcctatgaaataatctgtgtggtgagggaattaataactcaaaatgacgttatacagttcttggaaccaagactaagtatcacgattcacgagatgattttaaaacataaaggaccagctttttaaccttgagagaaacgaagaggtaccatcttccgatgagaatacaacgccgtctcagcaccaccgccaccacgtgcagcttcttttgaaaggaaaaaaaaaacaaaaactattaacaaaaagaagacttgtaaaaagcttttttggatgtataatatacctattctcatcttacatttagaaaatgggtactcactcaagtggtgggttgggctttctcaacactggtcctcagaagggagatgacatctcctggctccggagctccaaacactgaacttccagcaacaatacagttggcgcctgctgcagccgctgtgtcgatcgttgaagggcctaagccgccatccacctgatccatgatgacatgtagatggactcagtttaaggaaagatcaaactctgactgaatagaaggagaggccttacctgaatatcaagtgttgggtatttttgcctcaatgcccggacctatcacgttcacatccgagaatatcaaaatatgagattatgaactgtagaatcattttttataggtaagacccaaaataaccttgtccatcatgtcaggcataaacttctggcctccaaatccaggttctacagtcatcacaagaaccatttcaaccggagttgtcccttcaacctgtcacggaccaagcatgataacctgatcggaccgtggaacaagcataatgccaaacagaagatgaaactcataccagaggatagacttgttcaacaggtgttccaggctttagagccacgcctggtctcatcccagtagacttaatcttctcgacaagttgttgccaattatctgaaataagcaatccaagtcaaaaccattaaaagatgaggaatagtttggaaaggtggtagaataccttgggccacctcgacgtggaatgtgaaaccagaagccccagctttagccatctgtgcaacgtaatccatggggttcgtcaccataaggtggcaatcaagatatgcactatgatgaaggaaaatggataaagttttttagtttcagacatcacttaacttgaacatgatgcaaagccaaagagaataagcaaaggagagcgttacttagtgtgctttcgcaaactctcgatgacaggagcaccaatcgtaagattagggacaaaatgcctgcgggagcaacacagagttattataccaaactatcttgaaacaaaaatgttacaagctgggtttggatgctaataagaatccacaggtaaggcagcaaattttacccgtcctgcaaatggaataacaaatgaattataagcatcttatataagtagagagaagaacaaaataaggtccttgtatgattgtatcgttgtaagagcagatacaagtttctttgccatcatgaaaagatgaaattgaataacatgttagtaaattgtaacgtaatatacacaagactcgatagtaaaacaacaacaacaacaacaagtgtagtttccattttgttaaaagaaatcatgattcccgcaagaccaaaataacgagccttgtgtaggatgatttcacgaattgtgtacgatgcaagttttggactcgaattcagagattgatgctacctatcgaaaaatcacccccagagtaaagaataaaaggtgggtaccataatatccatgtgaagccagttggcgcccaaatcgatcatccgattggcctccgccgctagatttgcgaagtccgatgacagcatcgacggtgctattttcggcgacaccatcttcttccgccgactttggggactgaccgatgatggatggatagttggatacctctaagaaccccggatctctccaccaaatctcaacatgcgtgatgacgtggcatcagccattatgttgacgtggaggtaccgtcataaattcataataattaaatcgcagggtaattttgtcttttggtgtgggggtgattttgcaatttgagagagacgacttctttttttaatggatcttattactacaacgacccgacccatttatataccacccaaaacagttggcccaattgtctctttttctttctttcttttttgtttgtgggtcaacgatctaatgatcttttttcttcctttaattatggaatttatttgtcatgtcccttcaagttcaatctatactaaacaaaacttgatgaaatttaacttaatatttatctgaacctcaaaaaaaaaaatctagatatttccaattagatgcgattgcgacatacatttgtgagacctgagagcatgaaacacaacaacatcatcaaaatgactaataattaatcagaaaattaggaagatttgattattatttatttttaaaggaggggagcccacaatatgattgtgaggaccaataagaagccataacctaaataagaattcactgaagagacaattaagacacataccaaatcggaaactgctcctttttgggtcgtccatttacttcacttccaagccctcccattccaaagctactctctctctttcctctcatctttgcttcttcgtcttccatctctctatgccttttagattctctaaacccatatcttcacttcttctcctaaaccacaggaattctctctctttcacatcatcatcatcatcatatgggttcgtgtgtctcctcttctcaaagcaagagctcatccgcctctgattccgtcgtgaagcttgcctctttcatctctaaaccagactccacaccgcccctcaagactgacgtcatgatcacttcctccaccatcaacggcaaccctcccatcgattccggtcgttgggattcaggtttattattacgataactattctttgcgtttagtttagttcatatcggcctttattttattttatatgatttatttttgttttgtctctagaaacaataattaaaggtctaattaacgaatggtagaagtatttatatagtaattaaagttgttgatgactgtaagctttagtgccgacaaatgtaaagtggttagctttttcagacccaatcaagatgtaggcacaaatgaggtatttagtactgatgaattacaaaatcgtatacttatatattaagtcaagatttgattaaaaaagttgttatgacttacatatgaaatggatcatggtcatgcatcataaataaacatgggtgaatgtgcaaccgggtcttctatatatctgctacagtagcatttagcagcacatggtggacaacggtggcgtacgatataggttagaatgtcttcaaggcatatatctttgcgagagatgtgtgatggaccacacttcaagttgctacttccatttgcttatttatcttaatgttaataaatgcatatgctcttaaaaattttatcgctagaaatttacaaccgtatatttaggtgtgtgcaactaaaagtatactacattcacatacataacctaccattttaatattagtatcttcttatttgcaatacgttacatgagataacaatgatttggattatgtcttaaggtaacaaagaggatatgatatttttcgattcacgggggtggcttgattccgactgcgatgatgatttcatgagcgttggtggtggtacgtttgtttttcttcttcttttttcttcttattttgtaattttaacaaatgaattgacagaatttgagtttacaacacagaatttacgccgtcgcgaggaacaacaccggtgcatcacaaattctgtgaccaaactcctcaccaaggagaggagaacaaacacggagaagaagaagaagaagcgtctcctaccgataacaagaagaggctcctcgaactctttaaagagacacaagacgaagaggatgaagaggaagaagattacgtggcagaaggcaaagcaagagcatgtctctggataagaacacctgttagatcttctgcgccggccactccttataataacaacaaagaaagacagcaaaaattcaagagagtgagatcagctgctcttggtcgctgcgttccgcgtttggtttcctgtagtagcttcactgatcggcgacggaatatgatgactagtcatgcccctattgacgtccaacgctaaagaagacaaaaagaaagaaaaaaaaaactttaaataatattaaattactatacattatgtttcttaatttgtccttgattgttgttttccaaaggatcgaacaatgttgtctcgtaatgcttatgatgcattgcattatttgtaaaggatcaagggaaagagggggaacctccgatgaaaagtcgaaatgccttttagtgtgaaatactgaaatgtatgtggaggatatgtggaaagtattaatcgtcagattttagttaactggttaatgtgctttcttattttctgacgtatggaaaacacatttatatacaaatcttgataaaataataaaatcaaaagtccagtattataaaagtttccccaaattagtgtattactataaacctttatttaggggattgagacaaatattagacgtaactataggatctagtctatttcaaaaagagactgagaattaattgttaatatatactataagagtttattcattgttgtaattaaaagtaagtgtcaaatttagatttttaaatttctagctaattaagattcatgcatggagtcacttaatgtattaataaaagtcagatattgaaaacttatatttgtaaaaaatcaattgtattctataaacatgtaatgtattcaacaaaaaatagtcaaactaaccccttgctgatcgtaaatgatcgtaaactaaccctttgaaaatttggtgctataattagatggttaccattataaacggacaaatttaaaacatctataaatatttctgactgaatttaatcaattcccattttacatataccttactaaaacactctttgactaaaaaacttaaaactataatagtacctatcttggggaacatagaggttgaaggttacacacacctaaatcctaaatgttgcaatctattgttaactaaagaaagagtagaatgcattcatctattggaaaagcctttgaacttttctgttttcttgttattttaattgttaaccatgtgtgttggatccaggcacaaggcaactccgatgtgaattctacagcagtgagcagatctacggatacatttctttcttctacaagcttacctgtggagacagccttcacgtttccatcggctttacctgtcatcccttcgggtggtggaaattttgggaaaggaaggatagatctcggaggtcttgaggtgatccaagtctccatctcaacctcaacatcacaaagagtatggaggacatacgagggaggtcccgacaacatggggctctctatcttccaaccaatcaatcttcctcccagcttctccactcttggcttctatgggcaacccaacaaccgcctgctttttgggtgggttcttgctgcaagagacgtgtctggaaatagcttgaggccacccgttgactacattcaagtcataaacactacatcaatgaatatcaaccaagaaggggctgcttttttttggcagcccctatgtcccaatggatatcaagcggttggtctatatgtcactacttctcctataaagccatctttaagtcaagaatctataagctgcgttcgatccgatcttacggaacagagtgaaaccgatacatgggtttgggggacagaagaaatgactctgtctagtttgagaccggccaacagaggaacagaagcaacaggtgtacacacagggacattcagctgccagccattgaacatccctcctccccctcctctgttttgcttgaaaaacacaaaatttgacttgtctagcatgccaagccataatcaaactaccgttttgtttcaatcgtattctccttggatatatttgcatccagatgaagattttatttcttcctctgtcgactggtttttctccaatggtgccctgttattccagaaaggcaacgaatccaaccccgtccctgtgcaaccggacggttcaaaccttccgcagggcggttcggatgatggtttattctggttagactatccggctgataagaacgcaaaggaatgggttaagaggggagacttaggacacacgaaagtgtatctacacatcaaaccaatgtttggaggcactttcactgacattgtcgtgtggatattctaccctttcaacggtaacgcccgcctcaagtttttattcttcaagagcctgtcgctgggggatatcggcgaacatattggagactgggaacatgttacgttgcgcatcagcaacttcaacggagagttatggcgagcatacttctctgagcacagtgggggaactctagtggaggcatgcgatcttgagtttcaaggtggaaacaaacttgtgagctactcgtctcttcacggacacgcaatgttttcaaaaccaggacttgtgttgcaaggcgatgacggaaacggcataaggaacgacatggcaagaagtaacaaattctttgacgcaggtgttgcttatgagctggttgcaggaccggggattcaggagccaccgtggctcaactatttcaggaaatggggaccacttgtcccacatgacattcaaaagaaccttgaaggtatcgcaaagtcattgccgggacttttgcggaaaaaattcagaaatctgattaacaaaatccctcgtgaagtgcttgaagaagatggtcccactggacccaaagtcaaaaggtcttggaccggtgatgactaatttttcattcatgtctgattaaggttaacaatttattacaattgggtacacttttctttatttagttattacatattacatctcagtttttgcccaaaaaaaaaaagttattacatctcattttttcaagaattaaagattggcataagtgttttttaaaaaggactcgaacccaaaaataataattaatattatatggatatcttgtcttattaattccataatatatatatgatgtggttgaaaattaataagtgaaaatgattaaaaatctgatgtgattacttatttaagaaacaaattaatctcctctaaaaatcaaattcagaatttgtgggagacattagtatccccttttcctacaaaaaaaaaacaagacaaattaatctcctctaaaaatcaaattcagaacctcctcgtagccatctatggtatcatgtttctttgactatcacaaaaaatataatacattcagattttgtttttaagcttatgaaatcaatttggaaatttggtataaatatttatattcaatgtatatgtataggttaattatggaattattttcatattgcaaaatatacaatattttgtgctctgatcatttgttgattttttgcataattgttttttgtagtcatcaactgtttcatgtgttccttttctgacagaattataattatatatatgtaatatatatgtagggaatgaaggttgctcacctaatcttaaaatgattaactgaccaaagaaaatgcaactcttgtatgaaacctacttaaaatttctattgttttttgtttttctatttgttaagcaattgtcatgggcagaaactggaactaaccctttgaccaacatttcctacgtaaattctttagggtatccattcaaatatccttatctttcgtctaatggtttaccggtggaaacaagctttaaatttcctagtcctttgcctagtatgccttccgatggtggaaattttggcaaaagaagcattgatatgggaggtcttgaggttactcaaatctctatctcaaactcaacatcacacagagtgtggagaacttatgaaggagggccggataacatgggagtcagcatctttgaaccaactactattcctcgtaatttcttcaaacttggcttctatgcacaacctaacaaccgacagctttttggttggattcttgttgcaaaagacgtatcgggaagtaatttaagaccaccagtcgactacactgaagttggaaacactacaacattgcttatcaaacaagaggggcctgcatatttttggcagcccctatgtcctaatggatatcatgcggttggtctatatgtcactacttctcctatgaagccctctttgggacaaaattctataagctgtgttcgatctgatctcacagaacagagtgaagccgatacatgggtatggaggataaaagatatgactatttctagtttgagaccggccacgagaggagtagaggcgacaggtgtgttcacagggacattcagctgcaaacaactaaactttcttcctcatccccctcctttattctgcttaaaaaatacaaaatttgacttgtcaagcatgccaagcgaaaatcaaactagagttttgtttaaaacgtattctccttggatatatttacacccaaaagaagatttccttccttcctctgtcaattgggttttcgctaacggtgccttgctacacaagaaaggaaacgaatccatcccggtcccgatacatccaaatggttcaaaccttccacaaggaggttgcaatgatgacttgttttggttagattatctagtcgataaaaaggctagagaaaaggttaagaggggagatttagagagcactaaggtgtatctacacatcaaaccaatgtttggagctactttcacagatattgtagtatggctattctttccctataacggaaatgcacatttaaaatttttgtttatcaagagcctgtcgctaggaaatattggcgagcatgttggagactgggaacacgttacattacgcatcagcaacttcaatggtgagttatggcgtgtttacttttctgaacacagtggaggaactttagtggatgcatgcgatctagagttcatgcaaggtggaaacaaaccagtagtatattcgtctcttcatgggcatgcaatgttctccaaacctggagtcgtgttgcaaggtggcggcaaaagtggaataaggaacgacatggcaagaagcgacaaatgctttgacgcaggtattggatatgaagtgattgcgggacctggcgtggttgagccaccgtggctgaattattttaggaaatggggacctcgagtccattacaggattgacatatttctcaactctgtcgcaaagattttgcccatctttttacggaaaggtttgcgaaaactcatcaacaaaattcctttagaaatgcggggtcaagatggtccaactggtcccaaagttaaggtgacttggaccggtgatgaacaatattcttagtgttttattgtgaattattgcattatgttatatatcaataaggtttacatttgtcgaaaataatcattgtaatttctaattagtaacaataatactatagaatctgttaagaattaagatgtagatgtgctaattaaaaattttagagttatttgggaaaaaaaaaggttgtcatgatcttagttttagagttaaaaaatagtatttatctggaaataaattggtgtagattattaagagtttttttaaaaataatttggattagatttaatttgattttttacctatagtcatggaattagatttattgccgagaagcaatattgatccatctaaatatggacccacgaaccatggccgttgggcctttaactaatggttgggttttgacccggttgaagaattcaggtgggcattgataggtccgccgtgtctttttttttttttttttttcgaagaagaatcatcttcatcttcttcttccagagggaattgaatttgttttctttctcctggagttgagattatacgctttctgctgtattgaagaagaagaagttgtgtcctatatcttactatttagatttggggggaaattgattagggctctatcctcgcgcagcactaaattagggttacgttcggcttagaaagggcaaaattcgatagagtgtgtgtgttgtgattttgatgaggttcttctagccaaaattactgagtaactactgtcgacaccaatttgggattgtattcaattttttgtgatcagcaatgtctgggaataacgagttgaacgcactaaaagggcctcaaagctctctgccttggccatttggaatggcctctgcatcgtttgctccctcccacatggcccctcctaactttcaacctcagtttcagctctctcaagaccaagggattagtgctcctggaagaaggttcccacataaacctcccattggaggacctcctgctgttcctcctagtatggagttgactccagcttccaggaaaaagaaacataagcttccagacaagtcctccttgcaggagcgcgttgctgccgtcttgcccgagtctgctctctacacacagcttcttgagtttgagtctcgggttgatgccgctctcttcagaaagaaagttgacatccaagactcccttaagaaccctccttccattcagaagacccttaggatctacgttttcaacaccttttccaaccagatccctggtcctgaccctcccacatggactcttaggattttcggcagggtcctggatcctgaccacactggtggattagttcagaattcaaacccactttatcccaagttctcgtctttcttcaaaacgttaaagatatccctggaccagagcctgtatcctgagaaccatctgatcgaatggaaaagggatcgatcgcctgctcctctggaagggtttgagataaagaggatagggtgtcaggagtttgcagctactatactgttggagatgaattacgtccctgagaagttcaagacttctcctgctttgatgcaagttttgggcattgaggttgacactcgcccaagaatcattgcggcaatctggcattacgtgaaagtcaggaaactgcaaaacccaaacgacccttctttcttcaactgtgatgctgctctccacagtgtttttggggaagagaagatgaaattcactatgctctctcataagatatctcagcacctatcacctccgcctcccattcagcttgtacacaagatcaagctttcggggaacaatccagccatctcagcatgttacgatgtgcttgtggacataccagcaccggtccaaacggagctttccaatctgctcgctaatccagagaagaacaaagagattgaggcatgtgatgaagccatatgcggagccataaggaaaatccacgagcacagaaggagacgggcgtttttcttagggtttagccagtcaccggtggaattcaccaatgccttgatggaatctcagaccaaagatctgaagcttgttgcaggagaagcaagtcgaaacgctgagaaagaaggccgatcagagttcttcaatcagccatggtaataatctctactgttctgcttttcatcacttgtcttacaatcactgagaattctcttgcagggtggaggatgctgcaatacgttacttgaaccggaagccagcaggcgggtaagatgcagatgggccaagaagttcatgagttcactacttttacctagaagtcacttaggtccaggacacttgatcagtgtcgttccttataggttttttttctaagtgaaacattgttactcaagtttcaagagtttttactttggtttgtagctcgtgcatcatatgcgacaaaatataagaaagataaatacttgactttttcactttcttttgtagattccacgtactgacttccaattggctcgatctagtcttgtagaataataataacgtacgtattattatggatagaaaaagaccaaggcattgtgctctcacgttgaacttttaatatagtcatcatcccaagatgataacaaatgcaaaatgggtcattttcaaacaaaaatataataactgagctaatattggttgaattttcttcaaaactcaaaaatttagtagagactttatgacttggattgaaaaaaaaaaaaaaaaagttgagttgtttacccaaaggagaaaataattttgggtatgaatgatcatagagacgttttacataaaataaaaagccatgataattgactttgtttgtatattcaaggggaaagagaaggatctctccgatgaacgcggacttgcatcccaccagccatgtgagccgtgagcattggcacaaaatccggtttatccgtagggatcggttcaatctcaaaccggtcaagtatggaagccacaatatacttcatctgcacgtacgccatctcttccccaagacaaacccttgggccggcttggaaaaccggaaacttgaacggattcacctttttcaaaactctgcagcaggttttatcataagactcagcccaccggtttggtttaaactcatcccaatcttccccccatagctcttccattctccccataccatatggaaaatacgttacccggtctccggcacgcaccaacgtaccgtctggtaaccggtcatcggttaaggcgtgtttggagtcccacggcaccggaggatacaatcgcatcacttcacacaaacacgctttcaacaaactcagtttcttcaatgattcgtaatcaaaaccccccgttatctcctccttgaccgatcggatttcactaaccagatcgtgctcggtttcctcgtgaccggtgatcaaccaaaacagccgtgtggctaccgccgacgtggtgtccctccccgccattatgatacttattaccatatctctcaccgtctcgtcgctttctccggcgacgatcaaccgcgagagaaagtcttggttggcaggcttcctcttcttatcccgaatgatctcatcgacgcagttatggacttctccgacggcttttctgagctctttctcagatccaaaaccgaccagtctcttaaacttccacacaaaagacagcggtgcggaaccgcgtccagcgctgaccgcagaagctgtctgaaaggctctgtcgaactcagaaacgggggaggaagggtttaaagtgcaacgatcgatcccgaggaaaacaatgcaaacaatattgaaagtgaatctacggagaagctcctgaagatcgaagggttgtgaatcttccgcagctgcgtttagaaacgctaagagctccttctccacctcgtttctcaaaacggtgacgtattctctcagcgactttggggtgaagtcgtgtgtagcaagtctcctctgctttaaccagaggtttccgtcaacgttgaagatcccgttgccgagaaaatctccgaggatctccgtaaaaggtttgcctttgggatagttgtcgaagtttgttttgaggatatactccacgttcgaggggttcgccgtcactacggttctccgtgcagctaagcggcgaatgactaccgtccgactcggggattcggttaggagctctgtataccaatccagtaaccggtttcggttggtatagaatgaaattaagcatccgataaccgggtatgttttcggtgtagagttgcggcaagaatatatcacatgttttcccgcagagacaagcaacagcacaaggacaagaagaagaataaaagttgaagcttccattgttgatgagcttcaaaacgacaaaaggaggcaggaggaaataatggtcaatactcaatagagatttgacgcacgagcttgaattcatcatcttcatggatcccattcatataatattttagtatatgctttgatatctatgtataaactactcctattttcaaagactttcctcaataatctctagttactttccattattttttaccacccaaacttcatctcatttgtttttttttcttaaataatcctcttgcttcttcaatcttctacacactaaagtatattatttcatcgaatgataaaagtaattgaggttgtaacattacgttcgatattcgacaagtgtatgaatttaaatcattcttcaagatcatattctactaaattagtttttttaattttattttataaattggatagattaacgcgaaaattgcggtgacacatgcaaatatctactctaataaaatatgagaggaggaggagaagcataaaaatagatgtcgcatattcgagaaaagagaatggacaatgaacaaaataggcaggtaacacgagatgtatataacaagttaatattgtcttctcgacgttctcgtgatgcaataactcggattaaaataaaatgtaaaacgtttttccgtcaaatatgatttaaaaaaaaaaaaaaattgttactaacggctagtttacccccaaaaaaaaatgattttactaacggaggagaagtgtttcgaaaattcgacaatgattaagaagaaagttagatcaaacgaacaggatcacaggaagaaggtacaacgtgaagcaatcaatgaggctaaaataaaatattgagaaatttgctcaaccatatgatttcattaatatataataatgaataacagttctatcatataaataaataatttataatccaccacatgacaacagatgggttttcccattttatttaactataaacagtattttgctctcacagatccacaaggacaagcatattcaaggatgttttagttcttaaagaaaagataaagagagaccagacgcatagtggtaacttggtctacaagttagagtggccaagccggagaaggacacggtgccacgaagtgttgagaacccctcttaggttccacaccgactccacattttccggttgaacattcgccgccgaatcaacctgcacatttccacagttttctattaactcttgtcagaagccatttatattagctgagcaagatgttgaggctttaccgctttggcgatgacctctgtagtctgtgaaacatcaatggtggcttcaaacaacacccatgcccatttgtcactggagctgtgttctgagatgtactgctttcctggttcctgcgttctagaagcttccacccagtttttgcctccatccagggatatgtccactctttctatcccgcgtccacctcctgaaaccgcatatcctttgatacttacctgcaattttttttttttaattgaattagctcttgctttcctacattggtcagatcagattaggtagtgaattccgcgttctaacctttccaggcttcaccatttgcacatcctccacagagcagattgcactctgttaacaatgataaacgagtatggggtcaagactcaagacaaactaatgttcatttacaaattctactatctgatcaaattcataaggcaactggtccaaacaagtaaaattttcagtataccagtagaaaatatgatcagtcgattcatcaccatcatcaactgttttcatggaagaatacagaattacgaacttcgcaagaaaattggaaaatcttaattttgtagcgcatataaacgaaaaacgtcattacaaagtcaagtattctgtaagaaagaagggaaagttgtatttacctgaacagggaaatccatttgcggtctcctagaggaccagttgatattatcccaattgacagagggtggaaacattttgtaatctttttgcatgaagaatccctacatcacattttgatccaagtcccttacaatgttagaacagtttctgattgctaaaaagagggtaaaagccggacactttagttgagacctggctttcttcagcgatgacattgatggaatcaagccatttgaccgaacgagcaccaatcacaccagggacaaccacccttaacggaaatccgtgatccctgttcagggtcttcacagaagaaacacgttttccaacaaataagcacatttccgagtactcactcatactcacatgtcaaacaagtgatgatttaaacacaagtgagactaatttaggagagcgatatcaaacctctccattcatctcataagcgagtagaacatccgcttcaggatttgtggcttgacttagagtgattgacgccttataagggcccccattttcctcctagagatatagaaagagcatagacttttcatgggaattcataacaaagcataaaaaggtggaatttattaatatatatctaccttacagcgatcaacactaacgaactcaacatgtctggctcctaaattggtagaagcagtcagctttggtatccccacaagctcaagaacatcggccagtttcgccccaccccagacagctgaaaggcaaattctttcaagacaagtatgtattgaaagcatgggaatgggagaaagagagacgaaccgttgccaatagcagaaacatcccatccaacacctctaacattcctaactttgctcatggcagtccttctgttaccggcacactgcattgaaacaaaagtgatgttaaattaaatgtggagaaaaactaaaggtagaagatttactcaaaggaagaatgaacctgaagagtagcagtaacattgtactttgggagggacctgcaattttgaggaggaaacaagagtggtgcttgatggagagatacaagatcaaagttggagaatgtaaagagaggcaaataaataaaggtacctgatgtctttgataaagagctttctcgggttctggatcaatccagtaagggtgacggagtagctggtttggcaaaagaaatagcagaaatgagcggaggaggcaaaattgaagatgaatgagagtgagagagagacctttgaaggtgatcaacaatggggatgggaccatgatttcgcttgtagaaaaggtcgacgggagtgacataagatgagactaaggccgagcggggaggctcggcgttgaaaggttcctgcggatcacccaaatttagatgccatgaagaaaaaggctatatcagactagtgactgattcgattggaaagagagaagaagaagaagaagaagcttaccttggcgttgaccttgagagaagggtgacgaggtggttcctgcgagtattccgaaggacctctaattccaggcattcttctttcgaggaggagataccgaggaaatgacgattgagtgctttcctttgtgacgtctctctcttcttcaaaggaaaactatggaacggcgtcgttttaggtttgcgtctcttaatttgtggataacagacagagcccaaattgagcccaaacaaaaacaaattgtgagagatggcggtggccaaacttcacggcggaggtatggcggcgatgcgtcttcttctacttccttccccgatgacgcaccggcgaccatcaacgcttccgagcactgcctctttatctccacggagatacatcgtcgcgttggcggccaagagaagccctaagcgtctcaaatactctactcctcgtttcaccaaggagggggaattggtgtacatcgaggtcgatccttgtggtgttgattcctggaaactccaacctgtcattgaccttctcaaacaaggagctgttggtgttattcccactgataccgtgtaaacaagctcttcctctcctctttacttcttcttcttcctcctcttttgcattttttttgaatttctgtttctccgtagatatgccattgcttgtgattgtaaaaaccattccgctgttgagcgtctccgaaggttagctacctacctctcactcttgctgcttttctattccaatccaatcctttgagctgactcgtgttagcccgtgtgtgtctctctctctctttcttaggattaaaaagattgaatcctccaaggtaagcaagcaaggaacacttgttctatatttctgctttgctcaatttgaatcctccataggtttgagtttgattattccatctcaacttatgcagccacttagcatcttatgccgttccttacgagatattgacacttttacaatgggctttcctcgtggtgatggtcatggtcatgctaacgtttttcgagctgtcaagcaatgcttacctggtcctgtgagagcctcttcttctcttgttttctaatggatactcaacatattcgcaatatccaaacagttttcttatcaatgatctttggcattttttttttttttaacagtataccttcatcttgactgcaagcaaggaactacccaaacagtgtgtaggttatggcaccacaagtgtgaaatatgcatctaggaaaaacgtgggtgtccgcatatctgatgatgctctctgccaagctattctgcagcagatggatgccccattgatttgcacaaggtttatttcttctttaaaatctcgtcactagctacagagagactgtggactcttcgaccaagttgtgtaatgtatggtaaataatgacagtgtgaaagggcctaaagaaaatgaatggatgatcgacccaaccgcaataggtgacatatatggaccagaggtatttatagctctcactctttctcagcgactaaagaacatctttggttgctctattctctgtttcggtttccttttacagggtctggattttgtggtagacggaggtatacgagtggctgaaccatccaccatcgtggatatgacaggaccatatcccaaggtcataagggaagggaaggtaatatattatctaaacattctgtgcttcatccatccaaggaccttaacttgaccgtgtggttggtttgtatagggacctatattgccgtggatggtggttgaggacgacgagtcttccctgcgccaagatcttatggcgtctggcacttaaaacagagacagacacagattaggtctttgtttgacatctacacacaaagacaccttgtagctggagaatatgaataatgtgaatacaattattacaaatgcgaattcaaaatccatacacaacaccggacacaaaaaatcgttacataaccaaatacacatgtatggggaagtggaagaccaagccaaagaataagatgatgaacacaatcatatatataggtatgaaactcaaagaacccagcttcttttcttggtgggatattttcgtaatatggtatcttaaaatcagttgcgggttttgccgtagagatttgtgtaaaccggcttcgtacgttgcacaaggatcatactcaaggcggccgcaatgaggcagaatccagacattatgagtgacgtcaagaagtaacagatggaacctcggcatctcaggacatcgtcaggattgaacaaggatccttgtgcttgcctctctgcttcgcggtcataaatggaacttgcgatcagccccgaaaagactaaggatcccgctgggttggccagcgtcaggaaattgtataaagctccaaacttctttagaccaaagagctcagaggcagtggctgggacgatggcccagtgagcaccatagccaagtccaatcaatagtgtgccgatgtgcatagctccaggccatccgtatgcaaagaagatgtgtcctactgacattacaagctgagccactgctatagcaaccggtcttgggtacgcatagtccctgcaaatcatttcgaaccacaatcaattccacagccaaatgtcattgtcattcttctgggacagtatcatacctgacgatgagttcggagaaataaccgcctccaatgcgtccaaggaagttccaaatgctaatcatggacacaaagacgtgagtgttatcgtaaccgagagactgactcatctgcccaaggttatctatgaccgttagacccgaaccagatccgagcaagagggagaagaagatgagccagaaatcggctttaacgagtgcttgagttaaagtaaaatcctcgcctctgtgagggcccctccgtctcttgacccgaacagcaccctctgcagctgcttgcatcagctttgcttgcaactgagcaattctcttatgtctctccactgcaggaagcaaatctacttcttttggtttctcgtcttccacttcactaaatataagctcaggaccatggtcaggggtggtggactgtcccggatcctgaccttgctgatcgccaaggagaggttcttcgagcgtgtcacaggggtcggttgatgctgtgaagcaactcgttgcgattggtatgaagatgggtacaagaagaatggcaaacaagacaacggtgaaagcaatgatgattgaatggctaagatcaatgaaatcttcaacaagcatcactgccatgagataggcagcaagtagaatgcagacggcatagatgacggtgaagctggtggcatcagaagaacggatctgtctgtgaccaccgacgggtctgatgaagaacatgagaggaacaacaacaactgaaggggcaacagcaaccatgaagatgagggatgcacggtcagaggagtggatcattgtgtatacctgggagaggatggcaccgccgaggccagcaaaccccttgaggataccgacgacaggaccacggctcttgggaaagttctgaacaccagaaactaatgcagcggtgttgaagtaggtctccccgttgttcccaacaaaaatgaggatacacatctgaaagatgacaaagagattcagattaagttgatgaattgcttgtaaaaggaacgtcgagcaaagaccaaaaaggatcccaggagatattccaattgcactttcacaatcttgaccagaaagattaatagtcaactggttttcttatagaaacagtgaaggaattcaatttccaagctacagaaggatcactctctctcacacagatttgacagccatttcataggaaccaccaaacaacaaccttaaaaacgcaaactttgggagattcgattctccaaacagacatcattaaaagaaggaagagaaaaaagcaaactttagtccaaaatagaaacagaaagctggagaaaaagaaaggaaacaactcacagcccataaaggaagaatgggagcacgaccggtgacgataagccaaacccagccatagccgacaaggttctggacagagccgacgagaagagcggcccagagaggcaagatctcggagagagtaccagcgaggaagccgacactatcgccgagatctttggcgacaccgagcctggagagctgtttctggttgtagttgagggagctcttgatgacaggagagatgctgccgaacaagtaaccgatgccagcgcaagactgaatccacatggccgcaacaaacactagccatctattgtttatgaacgatttcactctttctcgcgtcgtcctcgccattttttcgatttctttgtacgatcaaccttgtatttctttcttggtctcttgatgaattgatgatgatctttagatccctttaatctttctttcacaagaaattaactaggactgttgttaatcagttgttgttttttaataaaaaaatgtattagtcgaacttagagtaataattagacaaaacattaaacgaaatatttcccattatgttactagtattttattcggcggcgatgcatgccctgtcatacttacattttgggaccacattcaaaatcatttttccaggtctcatttagtaacttaccattcaaagtttaacttaaatctgataactaacaaatttagtatactagccgacaaagaaaaaaaaaacaaattgattagtataatactagccgacaaaaaaaagattgactgaatatatgatgatctctcttattctttaaatttttttataaaaaaaatctcactcagttgatagatcacacacaccaccaatgtttactggtagcttttaaatagaaactattttctaacaatagcttattcctctatatacaacaatcaacatttgcctacccaaaaaaaaataaaaaacaatcaacatttgattcagaaaatatctatattcaaaatgtctactgggcctgggggagtctttttctgtatgtgtacccttttttttttacaatacaggttgcgtttaatcgaggatacaaagaaattaccatatgcagccacatataattgattgggtgatgtatgcatttgatagtattttttaacctcgtttatgtcattagtttctactgtatatatattttggcttcattatcgatagcgagatcagatcattattccgacggttcattttctatattattttataataaatctttgtcatttttatgttttatctgatgtaattaaagagatagaatcagatattaatgtctgattatttacggcaatgattcatttcgacgaaagaattttcaaaagaaacagaataaaacacgttttacaggaggcattaataatcgcaatcatccgccataaatgctgatacgaatgcaatctttcgttttaattattttctcttgaagggatcgatcgtgggaacatcaagaagtgataacgaggcaaaccaaacatttatttattctcaagtattttatactactcttactctatttttgattttcttcagtaaagtttcacaagctaacttgtacacttttatcttaaaaatgaaaagaaaaacaagcacatgagagatgaatagataacaatattataccaagctaggtttatactacaaacataagccggtgattaaaataaagatgttagatgtgaatgtgaatttgaatggcgatgaccaaaatcgtgataatagcaaagaagagaatggcatgaaccaatattgagatcccgcttgtggtcatgttgccgcactccaacactctcctcctcgccggcaactgaaacagaagccccggcgataacactacgaacagcaccaccgcaaccgccaccggcccccagtccgctcctcccatatctacctcaattagagctccaaaaagatttgatcgtcttattaggtgtcaaagcactacttggaacaatattacatatacacacacaagtgtattaatgcacttggtatatatatattgtacgtgtgataataggtgtgttttgtgtacttttttgaaattcagaaactattgagattatttaaggatgacaaaagaaggcagattgagacttgaccagtatctttctttcttgttggatggatatatacatttagtggctatgtatataaagttaaagtgtttgatacttgattgcgtttattggtttggtttcgattcttttgctttcctcatgtggatcttatccctatttcattactaatactacgtgatttgattaataaccgcgttagtgcataataaaattatggtgttaaaaaaataaaaattatggcgttaattagtgtattgtgtattatttttgcgattgacgttttaaaattacttcagtatatatatgacttatatatgttgcatgaatattattacatccgtcagaagcggatggacttcccttaaactcagaaccggagcaagaacgtaaggtgttatatgttggcttatgaattgaaatgccttaagaggagaatcatatgcttgcttatgaattgaaatgcctgaagaggaggagaatcatatgcttggccttcaaaacaagcaaaatactatcgatctagatatttaattatttttttgtacagataatttaaaatactatatcagagaatagttctttccttcatcccacaaacttgagaagaaccctccacttttgtccagcccaagccacatatatattattaattaatcgtattgacatcaagttcattctcacatttacgcgtacattataaatataagcacataataaagtggtagatgtttatagagagacgtatattatagctagagaagaaacagaaaacaaagatggggttggactggggaccggtgctaatgtcggtaattttcttcatcgtgttgagccctggagttttgtttcagctgcccggaaagagcaaagcggttgagttcggtgggtttcagacaagcggcccctccattgtcatccacactctcctcttcttcgccttcatcaccatctccctcatcgcccttcacatccacatctacgccgcctaattaaccctaccttccccttcacgtcatggctccttttcttcatttcttgatttctgattttcttgtggaatactgttagttccttcttttatggttggttcatttatcaagaataatcatttttatgaaccatgtatattgtcataattaagttcccactttttattttggttttgagatttcaaagagtaagagtaacttatctcgcctacttattacagaccccaaataaaagctttaattcccactaatatcttatcttgaagcaacgtagaacagaacttatgacttacgtataatataactaggtcaacgtacgtaactccacttaaatcctaaaagtcaattttcatcatctaagctaataacagtcgtcagtttctcacaatattggtccgccttaaacctctctcgaaccgaagagatataagaagcggctctagcgtcaacgcagtcgtccactccgttaatacctctgccgatcagcttctctgccatcatgttcagcttcttttccatatccttaccctcaggagccaaggctgccagtcactaattatagacatgtatatatgaaagatagatagctataattagctaaactagatttaaaagaaaggttaattacgtacatggttgaaggaggaagctaactttaggagggagaggcgtagtggcagttacgtagttgttgaaatcaggttgacgagcgtaggaagtcgtagtggaagaagtgtaatgaacattattataaaggtcttgggaaggagttggagatttcacagctttgcaaaagggcattagcttagctatcatgaaccctcttgatctccttctgttcatctccatgatattacaactctttttttctttcccgatcgagatctacctgtagctggtgtttcatgcattcaaacatagtgtgttgttgcgtagatatatatgggagggtttcgttatgttgtgacgaatacatgcagggagatagagaggtatcaaagacgcgtggtccttcgtcttgcaataatatcactcagaagcataacatgttgatgacgagatctcaactttcaggctcaaacagccacgacgacacatctcattttacaatttaaaatatatgatatatgtgtaattatacagtacagggttcaatccttacgcactatatttacgctccttaattatctatcttccgcggtagacagatgatacggacgatttatgagaaatatctcggagaaaatttataagatatatcttgtagttcaattaatagatatattattctctaagttctatatgaaataatggatggcgcaaagccgcaaactctacaatttctcattgcaaaacatattttcccaattgctatataaaaaaagaacataacatttttccattcaatgggttcggaaaaaagtgaaagtgttgagattaaggaaccgttattttatccgtgtttaataaattttgtgtaactaactttttcgtataacttttgaaaagaatcaagaaaatgtggataagtttcgatttatgtaagaatgtgaattaatttattcgtgagagattaatataaagaaattcacaagcgaataacattatcttcgtgcggtattgtggcggcggtaaattaaaacgcaacaatttgagtttgataattattacgaaagacttaattagctaaatctgtaaaataacattatcttcgtgccgatgtcatcaaaacactctagaatagaaaaggaagaaagcatatcttttgagaagattctgactgttatgtgatctatatatattctgttgcatatttgcttttgtgttaaatggtccaatggtataatccaataatatcaccatattccggatgacatggtccttggttctttttgtaaagatttgggcttgttgggctgacttgacattatgaaaaacacgagagcccaggctaatgggcctaacaaagaaagcgtcctccgttctaaagcgaaacgtgaagcatattcgcaattggatccaagaagaaacctcaaagttagctttcgtactctttctcatcttcatctccacaatatccttagcttgtcactagttttggaataatcggtaggtttgggatacataacattgtttttgtagatgatagactcatcattgcttctttatgtttggtaatttgatgatgaatatactttcgattacagggcagccgagactaagacaccaaagcagatggattcaaaggtcccataaagacaaagataaggattagtatttttgagatatgtgagttgctgctagtttaaaagtaaaggtctgatggtgtgagcccaacgtttttgggaaagtaaatattacaatccaattcctctaatcattccttcaagcaaaagggagggaagatgtgcatttgtgtcaagatgtggtggaaattatcagagggtttatcaacggcatgtgtatgaacaccttggtatgtcgtcaccaccactccttcgtctccccattgcctctgcacttgcttcttcactctgcatccttcttctgtgcacttataatagctcctatatatatatatattcatattttacatgtatgtatatgagtctcttatttgatcaccatagcaagcatacagtatcattcattgatgattaagtacgtacctggggaatggattgttcttgactgctttttggccgtacttcctccacctgtatccatcatccagtatatcaacctggcttcttgtctggaacgcgtacctcgcttctctctctttcttcttcttcttactccttggcttctcttcggatgatgttgtcggctgagcagagttgtcgaccccatgaaactctgtcaagcgaggatcaaccgatgatgaacatggaaacaacacatcacacctcctatcctccatttcttaactccctctgcgtttatggtgggaacttgaaaaaagccaaggaggggagggagagaaagagagacgtacacggtagcgaagatgccagagaaagtgatatatattgaaaatatggctacattagcggatccatcacagaaaaagagttttgtggaaacaaaaaggtgtggcggctacatcattctgatttatattattatatatgcaactccttcaaattttggttcaatggattcaaatttcaaacatatttcttggtcaagaatcaatatgcatctagatctctgaggtaatcattcttttcttatttgatttacaatttggattagcaaggtttccaagataatatccaatatcacgtgtatttgaggttcacctaccaaacttgattgaattcaataaacaatgagctcgaatgatgttgagattgttgactattttggctctttgctttcttctatacttgtcaaaagtatataatcattgattccatggattattcatccctccatagttattcaaacttgattcatattcactttttacacacaacatagaattataataatactaggcattgatcacatgtaggatttgagacggggtcgcgtaagggactgcgctccatccaccaagacagtggtgcctgtcatgaagcgtgagccatcgctgatcaagtagataacagtggagtagaggtctgtgtccgggttgagccactggccgaggggtgcagcgtccttgaccagcttctgcgctcggtctcttcccacagaagctgtatactcatcatccagatgcagccctctagagatcatgttgacccgtatcttgtgcttcccgagactcatggctgatgcctgaaacccaatcatcaacaaacatattcaagttacgaacgcgatgtgtctaattaggagctaggatgcatacccggacgagctggtgaatagcggcagaagttgaagcgtaggcatcagcgccagggtaaagcgccctctctccgctggcgatagtggccatgaagacaatggagcctcctgatccatggtccttcatccttgtggctacagccttcaagagaaaccatggagcggtgagattgatctttgtgattctgtggaactcatcttgagagacttgaagaatgtcctgcacctttcctgcaagaaagaaagattgttgaataaaggaatgatcaacacacaagagcatcaaaggcagggtagtgaaaaacaagaagcaaattaaaccttggtaggtataagagttgagaaaagcatcgaaatggccggaaagttcccatgccttttggacagcggcatgaaaagcaacttcagagtcagattccatgtcgagtgctataacatcggcagggaaggctccctcaatggaatctctaatcttgtctacaatgctccttagggaaccctcatttcccatcattaccaacctagcaacagtacattgcattttttgaaggttaactatagacaccaaagtcaaccacaacacaaatcggggctagaagaagaaacacaggataggaggaaagaagacaaaatgagagactcacttgcaaccgtgtttggctagatggaaagcgatgtttcgggacacctcgtcgccgttggatgtcatcaacactctcttcgccggattttccattttgccaaagtaactctttataaaacaattcagcagattcaacaagacttaagggagggagggagtgagattgattcgatcgccaattctaaataactataaagagtggctgcaaaagctcttaccggaactgtgtctgtgtgttaccaaaacggcgaaacaaagcaaataattaatgcctaaccacatgatccaccacgttctgttgttaccttctttaatttgtagatagaagaagatggtgattgataacggagatgtatttttttctttaataaaaagcccacttcaaggcccagatccatttctgtactttgtaggttttccaactttcccggcgccggaagcaagcgtaagttatcactgttccccaaccaaattccatcatatcctattatcctactactaatggatccatctccaagattcctaatttcactttgctacaaacttatttcgtgtttttggtttataattaatagccgttgttggttatgaatatgtaagcataaaaggcatttgggagctccagacagacaatgaatcatcaacatcaggtactctgtctttcgtttatgtttctgttccattcttttgaaatatatagaggaggaacttgttattagctagtccattgatcaacacacaaagagtgagaatgaaagcaattcctccaaccaaaaggatgctttcccttattgatttagttggaccaatatataaagagaacaaaggagggtgttggtaggtaacaaaagattctaggtggtgggagggtagtggatttttgaaaaccgtgtgttgacttaatgaaagaggtgtagagtaatgggattgtgagagtgttaaataataaaagactaggatacgaaatcattgtgacatgtcaatttttcaagtgggtggtggaatccgcaacaaaatataaaataagaaaaatgctttgcttgcttgcttgctctactttgccttctttttgcaaccaacatgacgttatgctggaaaggaatcaaattgttacttggtcatgcacctgtgaacgttacggagaggtctacctcaagataacgaatgatctattatactagtaaataccacatcttgcttgagaaggagaatataatcccctttatgatcatcaaattgaccccaaatcttcacccgacttttggtagtattcgaacaattataacagaatctaaaagttgctgtgcccgtgccacgtcatctctaagaatctttagtggcacgtgctcgatcaactaatgaaaacaaggttcggttccggtggcctaccatttttatcctccttcaacttccctctccctctctcttttaggaattttcctcagaaattggaggactcacactcttctgggtttctgctgcagccaaatcaccaaggagatacatactacaaccatggatgatgatgaatatgccaagctcatcaggagaatgaatcctcccaggtttttctctttctctccatactcttttattgttttctaggtcctctgtttctccatgctccgtttgtgagcctctatacccttgtaaagattccagctgctaaaacattcatctttatttatgtatgtttcatggtggatacagagttgtaatagacaacaacgcaagcgacgatgccactgttattcaggtaaataaatctgtctcttcaaattgttcaagtggttctgtaccaaacaaagagattttgagaaaacagagttccctgtttgtttgtggtgctaaataaaaggttgatagtgtgaacaaacatgggactctattggaagtagtacaagtgctcactgatatgaatcttgtgatcaagaaagcttacatctcttccgatggaggttggttcatggacgttttcaaagtcatcgaccaagatggcaataagatcagagacactcaagtccttgactatatccaaaaggtttctaatgtatttcatcactttttttctttcattttcaacaggtttttttctttgtgtaaaacgtttgttgaattcattgcgcagaggatagagagcaacgctgggtggttcattccacctttgagaagctcagttggtgtaatgcccactgacgaatacacatccattgagctcgctggaactgacagacccggtctcttgtctgaagtatctgctgttctcacagaccttcactgcaacgttgtgaacgctgagatatggactcacaacaccagagctgcagcggttattcatgtcacggacaattcaactcattctgccattactgacccgattcgcctttccaccatcaaggagctgctgtgcaatgtagtgaggacaaacagcggctcaagagctgcgaaaacagtcttctcttgttctgatacacacagggagagacggttgcatcagatcatgtttgatgatagggactacgagggagtcaaaagagcaaggacatcggcgtcaaggcccagtgtcacactaatgaacattgagaaggattataccgttgttaccatgaggtccaaagatagaccaaagcttgtgtttgacgtagtctgtactttgactgatatgcagtatgtggtgttccatggcatggtcagcacagaaccagtggaggcttatcaggtaactactcaacggccgtctgttgggatctctcttctaacaataatatgagtgttttgctgcaggaattttacatccgtcatgtggatggacttcccataaactcagaagcagagcaagaacgtgtcatacaatgtctggaagcagccattgagaggagagcatcggaggtaaccaattaggaatgtgaaaattctctgtcttggctcaaattacattctgttctgcatcgatttctgatatactcaagacagattgtgcatatgaaacatactttcagggtttagagctggaattatcagcagaagaccgagttggtcttctctcagacataaccagaacattccgagagaacagcttaaccattgtgagagcagagatatcaacgcgagagggtaaggctaaagacacgttctacgttacagacgtgactggaaacccggttgaatcaaaaatcgtggagtcaatcagacaacagataggagtaagcaagctgaaggtgaagaagaaggagaaggagcattgctctgttcttggtacaagcaggccttcgcacgaaacaactacaatggggtatttgctaagtaacatcttcaaacccaagtagcttcaagcttcacctatctcactcatagtcatagagtgtgtgtgtgctttgtataggttagacagagtagggcatcatttaagctgatcgtagcgatcccctctcaacaagtcccttgtgtgtaaatttgtgtgaacaaaataacaggaactgcctttgaatagatacggcgtcagttaataccgttgattaatggatccaggggacattaataaagatgcaaagtgtttactattatgatttaatgagagcattcgaaagatcaataagagatgaagaagaggaagacagagaaaggtgagcttaaaacaactctctctctaattacaaactataatctaaaacctgtcattacagccattgactagtttcctaatcttcctccaccacattctcttacaagaaaacttcaaatagaaaagaaaaaagaaagcagaggaagggatcagagccagagagcgccggcgtctttgagaagaggaacgagagagccgtttatgtgagaagccatgactctgtccatagctccaaccagtttaccgccgatgaagacgaccgggagagaccctggagaagaggagccggagcagccgaggagacgaatgagggctcgctggatgtcgccgccgtaggggtggaggtcgagctcgtggacggcggggctgacgcccattcctctgaagagacccttcacggcgtggcacatgcagcacgtgctcacgctgaagatcaccaccgcgctctcagaagccagggactctatacgaagcagaccagtgtcagccaccatccccaaaccgccgaatcctaagctgctcatcttgtatgatccccacgattctgtctggtattgcatctttgatatctcttctctttctcttgttacacttttgtttggaaagaaactagattaaacacgaataagagagaaagagggattggctaaagtttgttggtgagaagagagtgagagccatgcagagtatttatagaggcctactacacctctgagtctaactctgttttcctctaattattagtattattgtttctttctttattatttgtgtataataacatgacctctatttacttctccatgaaaaaaagaaaaaaagtaacaaaacatatgaattaaaaccgatgacatcaagatagtgattgctgttgaaaacaaacaccgataatagttatcggaataatttcatttttttgtaaaaaaaaaaaaaaaggcaaggagagttgaagaacaggcttttatcagaagggagttgttggtaatagacggctccgtctgtccttcttgtcggctcttaccgctctcaccattaattttcttaccacttaattctctctttttctttctttgtattttcagatacatgatcataaagtaagaaaccataatttccacgtagataagctccctcaatctgtacaatatggattttggcagggtttttcttttattccattctactctgtaaaatatataattccatacgaccgagtaatcatcaatccagcaaatgtgtaatcatcacatcataatttgttaaggagtcagaatcttatgtttcttatccagattaatagcatcctccttatatatatagaaaaagaattatgactcgagaattatgatgtgtacatattttataagaacagcacccatgaattaatttggatgggtttaattataacaatattaaaatttgaacaattttatatagaaaaagccttttttttttttcttcaaagtttacaaagtttgtagtttgtgacatgcttttggcttccacgcttgtgtcctttatacacgaaatgccttttttgtgtgtctcaggtttgagctccacaataaattaaatcttaaaatgagatttaaaacgaaggattgatggaagagaagattttatatgtatattgaatatagtaagagaagtccgtacagttatgctccctctagctgaaaaagaaagttacttcttttagtgtttaaactcatgtatttcttttctggaaaaaaatctttgcatgagaaatcgtaaaagataaataatcttgtcggattgtggttgtcggatcgctttacctttgatttttgattttttttttaaaaatctagttttcctgacagaagacttacgtaacacttgtcatacaatgtttgatctgttcaaccgattctccgatattaaccctttcgagtagcgtatgtacatgcttttcaataagggtattttgaacatttctgaagttcgtattcaacgcctgaaacttgaaactttgaacattccttattcctttgtatattgatctagctcttttctgtttttggcttttttttttattcttcaaagtttaaatatgtatatacaaggctaacattatacaaaactttaaaaatctttcgttttatgattatcaataaaaagatgattttcttcttgtaaaaaaaaacattttagagagaaaaagaaaaaaaaaaaagagattttgatcgatcggacgggtagggttagatggcaggaaacgagagccctctggcctatattaattagtacaacaaaatatataaattgatatcaaaataaaaaatagaaagaatacgagcgtgatgctatcttttcagctttatctggtctttgccatttataaatatctgtgtgtatgtctctctttgcacaatattaatgttgtgctttgttataaatatatcttcatttcatatttttatattttcaaatttcgttttttttttacctcttacggtgaaacaaagccgatagggagatgaaaggtggggtttgaactaaaccctaaaataagctttagagagttctatcgtcgaagtataatggtccgagtctgattccaacacctgaccaagatatgtccctacgggttataaaacaatgtatatattatatatatacaaacagctggctcatatatatctgtaatacactgatacagaggaaggtacatatctgtgcctatgtatgcgcgtggtgtagctgtatatgctatggaacatgtatatatgttataatgtatattgaatttccaaaaagctttagttagtaaaaaaataaatggaaaacgtaaaaacaaaaaagaaggcaaaagaaaaaggaagatatcgcatgtcggtgtcgcggcgaaaaggcggtgagggtattgtgggagtgctcacgaattcccctaaaaatcctcatttataattagtatataaccctaagcccatgcaaactgcaatcccactcatctttatcactaacactaactatcttattatttcaccaaaagataaaagtatttcatcgagatatacgtcgatatgttgttctgcatgcaggtgcatggccctctattattttttgtcgaccacaagtttttgtctgtttacaacataagatttcacttattattgtttttttattttaattgtttgtttatcgcactgatagtctgatacacacattcacgaactgcgtttatccctcattgccacctaataattaacttaggcttcacaacatttgtatatcccaattcatttattatatacagttgtttaccgctacatatatgtgcatagttaatctaggaaattaatgttctaagcttttatcgtagttaatattggaacaaaaatatataaccgagtaacaaaagtcgtagtaaatagttttaaatataatatttaacaaaaaaatatagtataaatataataatgccgatcgacaccaaagttataactatatatcaatccaagcctcctcattcagaaagctttcttttataaaactgaaatattgtttagtataattagtactaaacaatggtcaaactgaatattcacaattgtgtttagtatatttcgaagtaatttatcgtgtaaataaaatattaattgtatatatcgttgtaaaatataagaggaacaaaaaaagaaatggaaatagagtaaataaatcagtgattaaggaatgggatagacacaaatgaatcatacggatttaaattagaaaaaaagaaattcaaaataagagagagggtgattgaccatcgggaggaagagagggacattggcaacaaagtggtaaatagaagtagaattaagaagacaacaacaataaaagaaaagaaaaaaaagagagagagaagaagagatgaaacagagttttgtgccccacgcgagccgcctcgcctccccctataccctgaacctttttttctctttctcgcttaaacagacctaaacccaattaatcatcccttagcttatttattagggatcatattgatacggaatttgcagtccccactgataactgaaaggcttttatgtagtactagtcgtatttacgtgaacacattattctttgagtattatcttccatacaagaggagtatattaatagacttttaccttagcactccgaatgatcctcgactattgtttattaatacacaaaacactcctctctttttttattcgtacacaaaacactcctctcttcttttattcgttattttaagaactgaattggtgttcctttaaattttttttaacacgttccacgcgtactttttgtgtgtttaccttttttaatttactaattaataatgtagtacgtactatatagttaaagaaagagggcaaaatggtaaataagagaagagcagctttaagaaaagaagagaagcaatattaactctctctatatatcttaaagatgtactgtaataaataaaaataaaagaagaagaagaaggagaaggggccgttaaaggagtaaccgacaagacggctttactttttcaggctttgctcctttgattgcctcatctcgctgctgacgttatcctcccgttgactgtctacgcactcccttttttttttttttttttttccctaaatatatttactcattattatgtcatagttttacaaggtcgaggttttgtagttttgttaatgctgcaaatactactaatgtatactaatgctgcaaatactaatacttttttttgtttgttccattttttattggtatataactataaattataagaacgtatagagatgtctagcagttttggtcaaataatttgtaatattacggagtatataatatagaaatatatggtacgttgtaaatgtaatgaagggatatatgcaaaatagtactaatatatagcttcgtgcgcgtgacaagcatgagagcatctgatatacctccttgtcttctttcactttcaaacaacagtcaacggctgctttcttctgtttcttcttcattctttggaatttgaaacgtattactattactagtattttgttatgctgcatagatattgcgtcaaaagttatatcacatcacgatattgtctgttatgtttggttgtttatcgatttcactaggttcgttatttttattttttgcaaatttcaatatacaaattattcattttagagtagtaatttacccatggtttttattttattgggtcaaacaggaactttgatcgacgcgtggcgtgggaatataacgtatcaatattttgggctttttaagtgatgattgttttgtaagctttttgagtgatgattgtttgatgggcttattaggcgactgttttatgggcttttagttaattgcaccctttgggcttatgtactctgatttttttgtttggttttttagttgtatttgtaatttctgttcgagcactaaaaaaggggaacattgtcccaattgttctttcgccattagtaccaaactaaactggagatcaatatatagtattagtatgattgattgtatattggggtttcgtaatcatcgcgaaactgcagtataaaattcgaaagtttggtttaggcgtatgaaactttattgcaactctaatgaagtccgctcacgaactcttgccactttacggcagctccgacaaccgtcaccggcgacatttctcgacacacgacgtgttgatgctcgcatcattaaaactggcttcgacacagatacgtgtcgctccaatttcatcgtcgaggaccttctcaggagaggtcaagtttctgctgcacgcaaggtgtacgacgaaatgcctcacaagaacactgtctccaccaataccatgatttccggtcacgtgaagacgggtgatgtttccagcgcccgagacctttttgacgcaatgcccgacagaactgttgtcacgtggactatcttgatggggtggtacgcccggaacagccacttcgatgaagctttcaagcttttccgtcagatgtgcaggtcttcttcctgtaccctgcccgatcatgtcacctttactacgcttttaccaggctgcaatgacgctgttccccagaacgcggtcggtcaggttcatgcttttgccgtcaagttaggctttgataccaacccctttctcactgtctccaatgttctgcttaagtcctactgtgaggtaaggcgactcgatttagcctgtgtgttgttcgaggagattccagagaaagactctgtcacgttcaacacccttattacagggtacgagaaggatggcttgtacacggagtccatccatctctttcttaaaatgcggcagtctggtcaccagccttcagatttcacattttctggggttctcaaggctgttgttgggctgcacgattttgctcttggtcagcaactccatgctctgtcagttactaccggcttctccagggatgcttctgttggcaatcaaattcttgatttctactccaaacatgaccgtgttcttgaaactaggatgctttttgatgagatgcctgagttggattttgtttcttacaatgtggtcatctcaagctactcacaggctgatcaatacgaggcatccctccacttctttagagaaatgcagtgcatggggtttgatcgcagaaacttccctttcgcgacgatgctgagcatcgctgctaacttgtcatccttgcagatgggtcgacaattgcactgccaggccctcctggcaacggctgattcaatccttcatgttgggaattctttagtagatatgtatgcaaaatgcgaaatgttcgaggaagctgagttgatattcaagagtttaccacaacggaccaccgtttcctggactgccttgatctcaggttacgttcagaaagggcttcatggagctgggcttaagttgttcaccaagatgcgaggatcaaatttacgagcagaccaatcaacttttgctactgtattgaaagcttccgctagtttcgcttctctgttgctggggaaacaactccatgcattcataatcagatcagggaacttggaaaatgtgttctccggaagtggcctggttgatatgtacgccaaatgtggttctatcaaagatgcagttcaagtattcgaagagatgcccgatagaaatgcagtttcctggaatgctttgatttcagcacacgctgataacggagatggagaagcagctattggtgcatttgcaaagatgattgaatctggtctccagccagattcagtcagcatcttaggcgtcttaactgcatgtagtcactgtggatttgttgaacaaggaacagaatatttccaggcaatgtctccaatctatgggataactccaaaaaagaagcattatgcatgcatgctggatttgcttggcagaaacggaagatttgcagaagcagagaagttgatggacgaaatgccctttgagccagatgaaattatgtggtcgtcagtgttgaacgcatgtcggattcacaagaatcaaagccttgctgagagagcagcagagaagctcttcagtatggagaagctcagggacgctgctgcttatgtaagcatgtcaaacatctatgcagcggctggggaatgggaaaaagttagggatgtgaagaaagcaatgcgcgaacgcggaatcaaaaaggttccggcttatagctgggtagaagttaaccacaagattcatgtgttctcatcaaatgatcagacacacccaaacggagatgagatcgtgagaaagatcaatgaattgacagctgagattgagagagaagggtacaagcctgacactagttcggtagtacaagacgtagatgagcagatgaagattgagtcgcttaagtaccacagtgaacgtttagccgttgcatttgctctgatcagtacaccagaagggtgtccgattgttgtgatgaagaacttgagggcctgcagggattgccatgctgcaataaaactaatatcgaagattgtaaagagggagataactgtaagggatacaagcagattccatcactttagtgagggggtctgttcttgtggtgattactggtgactcagcattatatagaacaaagtgctagagtaggttctgtacgtgtttcattcaattatttcgatatctttctttggtcttgggattgagattttgtaaccttaactgatgttgtaggcagtcctaatcatatattcaaataggaaaacttattgattttccagtacatctcccaatcaaattacattatattacacaaggagaatgggagctttgtttcctaataccagtctgacaagaatcataacatcaaactagctagtactttcagaccttgcaggttgcacctagaggtttcacgaagaggcagcgatgtagccggtcgggcattctgagactgcttcacaagtgtctgtctcaaagaaggccgagtggagagccttcacacaatgctccgcctcatcatcattcactatcagtgagatgtttacctgatagcatccaaaagtcagacgagtgtgtattcaaggggtaaaccttttgtacagaatcatctatattgccaaagaagttgaaagaggtttgaccttagatgcaccttgggagatcatctggacattaatcccattggttcgaagtactcggaagccctgtttgttgttcatcggtaagccactatgactatctatatattaaatcatacaaaccaaaccagagagttaactaaccttctctaatatgaatgatgatctctgaacatttccgatgagagagataattgatctgtgtcgaagcagatttacaacagcaatcttctcaagttcctccaccacctgatcaagctcctgtcacatggccaagaattacagaatacaagatgagtcttgatttgattttctgtgctccaagaacaagtggtacgtagcctgaaagttctctcaaagaaaacaacacagatacaaagtcacaagcttacgtgttgaattaactctctgctacagaactttgaaggatccaatgtcaaagaaatgctaacttcgctggttgcaacaacatccacagatatgcccaacttttcaaatgtggaaaacacctgcagagatagaaagtgtgagctgggagggcgggaaagggagtatcttgtcatcaattggagttaagttggttaccttggcaaggaaaccatattggccgagcatacgggtgctagtgatgtccaacatggtgacattacgtttcagaacgatgctggtcaatacagcctaggagaagataaggaggaagaagaggtcatggtgatgttgtacgtggtataaaaaagggtaatactagtgatgcaatttgacttcacgtaccttgctcatgtctcttgatctggtgatgacagttcctggagcagtgggattgtaagagttcttaacccttacaggaatgttaccttctcgcgctgggcgcatggaaagtggatgcaacacctgcaatggaagaggtaaatcatttggtcttttggtacaacaagtgttttatgaggttggttacctgggcaccaaagtaagcaagttcagcagcctcatcaaatgtcaagtgtggaacaggttgagctccgcagtaaatgttaggatcacaagtcaaaactccatccacatctttccaaacctgcatgcaccacatgacagtagagtatatatgttttgcaaaatcacatcttcattgatagacaataacccccggatataatggtacctggatctcccgcaaacctaaagccttcccgatcgttgttgcagtcaaatcgctacctcctctaccaagcgtagttacagcacaagatctccatccctgcacaaactcaaagtgaggccttttgttttcgaaattctaaaaatgtcacaacaaggcgtgcacgagactcgtaatcaatcgttattttatatacctttccaaggaagcctgtgacaacggggagtgcattttccttgctccagtcaccaagtaactttttcgaaaccgccgggtatgttgcctcaagaatatcagcattagtgaagtcatctgtggtgataatcccgatctcaaatgcatcatactgcaaaaacaaaactcatcgtcaagtcacgaaacaatctataaggtgatcaatctaggtaacatatatatacatacctgtcgtgctttgtgcccaattttgttcaggtacgcagcaaatagcctagtggacatgcattctccaaatgaaaccaagtagtctcttgagcgtaaagttaattccttcatcattgcgacgcctttaagaagctgttccagtccttctagatgttctgcaataactgctgtttccactccaagctcatgagcagtcctggacatggtagaatttgattttcttgaatcatgagaatatagcaaatttgagttggaaaactttacgtatgaaagattcaataaatctgtctgttttttcttaaaaaagaaaccttatatggagttcctttatatagctcaactcttcgatagtgtcgacgttggtgacaccgcagcaaacagccttctccccagcctaatgaaagccaccggctcaaagttttataacggaagaaacaaggtaaaaggtgcaacagacttcacttttgcttaccatcaaaagcttattggtggtctttgccattgctgatagcacaacaacaggcttctcatctgggaagctgagtatgagtttggcaacttgtatcatcctttctgctgatgccactgatgagccaccgaatttcattacacaggtcaattttttctcagttttgtttaacttgaaagtctctgaggcttttctctctagcagctccactcttcccgcttcacaagtaactctcagagcgatgttcttacaagaacgatctacgtttctagagaatacacgagcagaggacacgagtgctgagaagttgagcccctttgagctaaactcaatcctttttgagtttaaggcaagttctggtgttttaactccgtagaactgcattgaagccgccattactcaataagctctgaagaagaagattgtgatagaactcagagagactggctggctcttgtgatttcgacaaataatagagtatgcttgcttagtgcgcacacctgaaacgaagatccgtagaagcaaaacagagtcaaggctaaatgcatgaataaataaaaaaatggatcttgcagagaggagattgagaattggcttatataccagttgacagggctcacgattgcttgatacaaagccggacaagctccgagctatgtatcaagacgagtatcgtagacggtcaagatcccaagctaaaaagattagacggctgcggagtgaactcggtctcggatgttaaatgtttataggcaaaggaaagaatcgaacgatcattcgacttcagtgttcttttccaaaatatgaatctgcttaataataattcaaactcctggtttagcacatatatactagtcgttttaactaaagttttgtttttttttggttggaaaacgtgacatctacaaattccattagtgaacccttaggaggttgagggggtgttagcaaatggtaaatcgaaaaaacgtggccacctactcatagatatacatattttgtttgattaaattagcaataatatacaaactgcataatacgtggcatcaggtgtattgtcaacaatttccacatttagtgtttccttatgcaattacattcactagaggaataaacaatcgatatcagaaatactcaaatagataatggacgtccaatgtcaatgatgagatctaacaaactttgacggtaaagtcgagagacgaaaaaaaggaaagtagcaaaattttattttatatagtgattattgcatgaattaaatagtgaaggtaataatgattcatggcgatatgtatatagttagtatttaaacagcgcgggaacaacaagaggcagttggtttgtatgaattgagagacaagggctttaatgggtcattagaaaaacgcccatgggccttaatgtcatatgtgggcattatggagaatagtcaagagaattc

SEQ ID NO: 394 - DNA, 94369 bp, Arabidopsis thaliana
gaattcaattatttccggatatgtaatgaaggaacaaagcgaggatgctcagatgctttttacccggatgatggagatgggtataactcctgacaaatttacttatgcaacagttcttgatacctgtgcgaatcttgcttccgctggattaggtaaacagattcatgctcaggtcatcaagaaagaattgcaatctgatgtgtatatctgtagcaccctcgttgacatgtactcgaaatgtggagatctccatgattcaagattgatgtttgagaagtcgctgagaagagatttcgtgacctggaacgccatgatttgcgggtatgcacatcatgggaaaggagaggaagctatacaactgtttgagagaatgatactcgaaaacatcaaaccaaatcacgttactttcatatcgatactccgagcttgtgctcacatgggtctgatcgacaaagggctcgagtacttctatatgatgaagagagactatggcctggatcctcagctaccgcattactcgaacatggtagatatattaggaaaatccggaaaagtcaagagagcattagagcttattcgagagatgccatttgaagcagacgatgtcatatggagaaccctgttaggagtctgcacgatacatagaaacaatgtagaggttgcagaagaagcaactgctgccctgttgagattggatccacaagactcttcagcttatacacttttatcaaatgtatacgcagatgcaggaatgtgggaaaaggtttcagatttgaggagaaatatgagaggctttaagcttaagaaggagcctggttgcagttgggttgagctaaaagatgagcttcatgtgtttctcgttggagataaggctcatcctagatgggaagagatttacgaagagcttggtttgatttacagtgaaatgaaaccttttgatgattcttctttcgtgcgtggggttgaagtagaagaagaggaccaatggtgttactgctaaacaattttgtattaaaagtaaatttaacaaatagattgtttacagcgtttgtatagttgtagttttgtttgttcaagtactatgatattgcttcatttaatgatgatcagaagtggttatctactttcaatatcttgttatacattgcttcttttgcctcttttagttcttcatggtactaaattactgtttggttcggttaagctatagatgagtaaactaataagatcacaacagaaggaatcacaaaaatgggtcataagtctcaagtattaccaaaaatgattatataggaaacaacagacaaaacagagttcttcatcaggaggcaaatctgactgtagacaaaatctgatctattttgtaaaactttttgtgatttgtcttattatgttgaggtaatattatctgttgctgtcttctggcgttttggatcaaccttgtcttggacattatcttctggctctgcttcttcatcttcttctttaagttcttcatggtgttggctaagatgaccattgactgcttcatgaccaataagagatacatgtttgctcgtaatctggcgaccagccctaagctttggaccccaatgcttctctggatttggcagaaaacgagctactttctttgcctgtgccttgctcagcgaaccaatgtgacgcgaaaaatcaacctgtccaaacacaagacagaatcgaaaagaaaagattcaggcttggaaaaaacattattcagtttcaaacaattcagagaaagcgagcaaaagacctcatgtgatggttctttggacaagatcacactaccgggttgttcaggcgattgcgcctttatgggatgattcttcacctacaatatcacccaagaaaaaaccatcaaaaagaagacctggtaagatgaaacacggtcacattacaaattcatcaacttagtttacccagcagcgcataatgtcccagataacctccataggagcatcagttttcatgccgagcggattcacatgagtcccagagatacggtaattagcattaataaccgctgatcgaaacattgcagctgatggtgaaatacactttagtgtcgcacaaagattatgcagactcaaaaacagaggaacatccagcaattcctaaaaaaattaaatcgaaacataaaagtcaatttctcacttttcaatggtttattgaaaaaacagaacaaaaaaaaatcccacaacttgcctcggagactgtagtaagtacagcagagatccggtcataagcaggatatctgtctttcatggatttcacactgtttaatatcgaagtcacccattctggatcatgcattggagcagaccatattggtccacccatgttatatttcttcccacagtggttgcaatcctgcttcacaaccggaccaattgctggtagatacctcacactgttgttctgccaaaaacaaaatgtgttatgataaactataaaaaagggcggtttcaggatagaaattttaaattagtttggaagtgacctcactgatagttcaagagttttacaaaaagagggaactatgtcaaacactatcgacgcacatagaaccataacaagaatcattggctatattcaaagtttctatcatcctaagggatgcagtggatagaaaatgtattaaaactttcacatgtgtatgtatataccttagggagagatcttccaacaggttgaagatgaaatgaatcacagccaatgcattgatatacgtaagagagcttcaatggagtgttcttcattgcactcgccgagctgaaaatttcattaatctttgaggtttcagtgaatcgaaaacaaaacaaaaaaatttgcagaatctgaataactgagatgttacgagtttgattagacaatgaaaactcacgtgtaaacgcggacaaaaacacgaacatagaaatccatttgcacagatagcaccggaacaatataccgcttgtagcggtttgcatggctctgcattaaagcataaccaaaaggtggaaaagaacataagaaatcaatctaaacctgagagaattggcgttaaaatgacaaagataaacaaacctcgatgctggcaaggaggatccgcaaagccatctcatgacaatacttcgctctcaatgggtaagaaccatatctgatatattaaagattaaagactggtttagccaaaaggcaaaatcggtggttgagaaaggtgtgcaaaaaaacaaaacactcacttggaatagcaaacttcaccgttaccaccacataacactgccatgtcagttgctgtacacattagcaatccaccatccgtgactgattgaatagccgagtcaaggaaaatagatggtgatccatatggatcaagatcaacctaagaatatcattaaccaaaattagtttaacagaagcaactatagcaatattcaaatgaacataataatgagtataaaagatgcttaccacatcaaattctttagggtgggtaagcatatggacacgagcatcggtatgatgtgactccacctttgaaatagccactgagccattgaactttatgtttctctggcaagcttcgaccgatgcttttaagagaaaaaaggaacaacattaggatattgttattgggaagctacaagaaacaaacaaattaatcaagacttccaacttccaggtcgtctaatctaattcattaaaatgatgaaactttttacctaaatcattatccaacgccacaacctgaccaattccttctatttcgcgtgcatatcttagagcccgtaacccagaagctgacaaagcctgaaatataagtatgcaaacaaaatttatctaactgcaagatcacaataagcggtatgaagcaagacaccgaataaaaaatataggaagacctcaagaacttttggtggcttgggttctctaggtgcaaatcgttctgttgtcttagcagggtcttttgatacagagcttggtccatcttcagatgctacttcgtgatcaccattattcataccgttctcgctaggagtttcttccttggaagcttcagaagcatccttctcaatcactttggaagctggtctagttcttttagatgacttagcctcatgctcttgcttgcgtttcgatagaaattcccttagaacagcaatggacatgtctctattgttcacctaatcattcgataaagacatgaagggaaagagatcaggttcacgctcagatcccatgtaggttcaagcaaacacattactatcatgaccggaagttagctacttaaattggtagtatgaaggataagtttcacaaatatcactcagtgaaagatagatttctctcagcaacttactatgaaactggctaatccatcaaaaaagtttgatactttggttactcgaagacgtaaaaatccaaactttaaaacaatgactgacagttccttgattaaaacaggtcaaccaaattcttgttacagaacaagcgaataagccatgagctaattggtgcaaatcaatgttcactggtcttaacaaagctacaacatttaattacaaatcaaagcagccaataaaaatcgaacagaacaccaattcagataacctatctcagcctctatcttaagaaacaccaacaattacaaagaagagaaagaaaaataaaagagaatttggaaaaacctgagctttattgaagaagacttgattcttcttgtgcatgagaatctcagcttctccttccttgataacagtataatcattcagatccgtttccattgctttggtattcttcttcttcttcttcttcttaagtctctctactcacaaatccaattacttccgctattgatttatgtaactcgacgaggaatcacaaatacgtgtatgcaataaataaataaaaagtcctacccgcttcgatttccagaggcaaaataccaaagaagaaggagctttaatttaaaaccctactacataaactccccaagatcaacataaaagataatgggtatgaatgtaagaaaaccaaagacagggttggaccaagcataaataaataaaagataacgggtgtgaatgtaagaaaacacaaaatagagggatcagagactaaatatcaaaagtagaggtgttaaaacatggcccatgcaggtttcgaacctgcgaccttcgcgttattagcacgacgctctaaccaactgagctaatgggccatttgcgaatggtagtgtctattttacttattcgaatctaaatcgtcataggtaattaagaagacatgcaaagcttaatcaatgatggattctttgattctacttctaggtgccaccattgacgcattcataaaatcataaccggtcgtttacaaaacatattgcttgaatgattctaaacaaataatagttttttgttgaaattttcaaaacatatgttaggtaaggtcaggttttgccaataagccttactatatacagtggcaacatgtttcttctactttggaggattttgggtgaatatgaaacccatgtgagcatgatacatgtgtttcttcttctattgaaatttcccccaatggtcatttgctctttgcgttcgtgttgcgctttccggtatcaaatcatatatatatataacctaaatgagactagacaatttgaatcattgtaaaaggtataaagaagagattatagtccacaattaacaaagtaataagacggtaaaatatcaaacaaattgaaagggtaaaaaaaaaacaagagggacaagtcactgttagaaaggtgactcctccctttgggccagccccctaccacaaaagtcaaagcttacttactattcagtcatatatcgacacgtgtacttcgaaccacatcacccatcctattacgtaatttccactgtctagacttttttttttttttttttttttactttttaacgttttttagctgtctctctaaattactacatacggacttgctacgtcacctgagaagaaagatctttgctcgtagattctttgtctgaaggaaaattatttgtatttagttatttacaattgcataattgtgtgtagtaaatccgccagaatgatattagagtgatactgagacgacgaatggtgtaacttgtaacatatatactaataaacacgattgattaaaaatttactatacagtatatccaaaacattatgattgagagtgtacatatacaataagtaattaaacctcaaaaccaaacagttttttttttttttggtcaacaataattagaaatgagaataaactatttaacttataaattctagacccaaaaactcatattttacccttcttggtctcacctaaaaagactttaattcccaaaactcttgcaaacaatggccaaacatagaagattggaaaacaaatttaaatctactttcacttttataaagaataatcaacgaaccaattaagttaaacctacatatattcgtatgtgatcacatatgtgttatattcctcacgttctcttccatttagctaataaccttaattacttcaagaaatcatatatcaaccgaaaactagtaaaataaatatacatactgaaagcgcgcaaaatttttagcaatattttaaaataccctacatcatagtcttaactaattaatctttctgatcaaaatttattttcataatattcataaatacttatggattacctaaaccaggatacttatccctataaatctgtcaatcatcatggattcatggagacatggtcagatatcccacgtccagatacaatgtaacatattgatatactgcggctgattattattttttacattagaacgagtttagatccaaaacaaaattggtattctcaaacaaaaattaaaaattgaatacgaaagtaatagaacaaaacttcaatgttgtcgaatagataggaagcaatagaaaagcgacacgtacatgtccattttaaggtaggagaggcttttctgcggcttgtgaagtaagaaaaagaaaatgatgatagctgctttcgtttcattcattgcagaagaaaccaatgtttccccaatctcacgcgcctcctcctatctaccaccacttggacaaatccccttttcagtattagtttttttttccggacattgtacattcaaaagcattccaagtgtctaataaacataactaaccactccaagatgcaaaatctagctacgaacaaattttaaactatagagatgaactttaaattcgggcattaattagtggaacttgagctattgatgagttttctgactttttgaagcttaattgagttttatatacactatatataggcttgtaataatatggatcaaacaagaaatatataaactacaaattgggaattaggttttaaaacgttatcgttctattttaattcaggcacctttagaatatcaagatccatgcatgtttcaatatttctgttgacaaataaataaagatgtctcaaatatgaagtttgggcaacgtacgtgtagacctaaaagagtcgaaacattggtatctaagtcatatatctagatgtatatggacatggattatataactagacaacgtttgttttaaaaacttaattcatttttcttaattagtagcaactagcaactaactactcatggcaaataatggtgtctgcgtggcacgcacttgggagagaaggtgtgagaatgttttttactttctgtgtaaaagatggaagagagagaaagagtaaagaagtagagagagagatattgtatcaccaaaccctaatgatctctcaccctcacaaattttcttatctttatagcttttatagattcacaaaaacttttcttcagattcacaatctcatcacaacccttcaaaaagagaaaagatctaaagaataaacaagagccctaatatcaaatcacaaccaaaaaaaccaaagaaagctaattaaagttttctctctagctattcctcttcttttcttgttcttgaaaactagggtttacttcaccaaaagataagatctttccccagaaaaagcaatacccaagtcatgtttctgtgtgtctgtatatagataaaacattacataccctaataaggttacacaaatagctataaaagagggaaaataagatagggattttttggggtgaggaaagatgggaagaggaagagtagagctcaagaggatagagaacaaaatcaacagacaagtgacgtttgctaaacgtagaaatggtttgctgaaaaaagcttatgagctttctgttctctgcgatgctgaagtctctctcatcgtcttctccaaccgtggcaagctctacgagttctgcagcacctccaagtacttctctttctttatacacttattagatctgtgtgtagatctttcatttttctagtcttgtgatgagttttatctttcttgattgctttttaacaaaatacttgatatattttcagtttcttaatctgatctctaattaggttttgattatagaagaataattcagtactttcaagtgattgaatttcgagatctgatcttaatttaatcatcatgtcaaattcttagggatttaattgcaatctatttttagatttatcggagctaggaaagtatcataatgatatactattattatcatgtaatttcattgtctctacacggatatatatgtgattagaacttggtaaagtaaactaaagattcacagtcttcaatgaaatttaaaagatccaacgtagaataattagtggttccatgcattaaccagtctaattaaagctcatgcagacatttaagcaccacatgaatttaatatctttttaattaagggatcttctttttataaattttcttttgttagtttttaaaattttagtttgttcattaaatttatagattcttcttctcctgatttgtgttttttgatctttcagcatgctcaagacactggaaaggtatcagaagtgtagctatggctccattgaagtcaacaacaaacctgctaaagagcttgaggtttaatctccaacatctcttcgatcttaattatttatccttttttaattttatctaaagaaaatgtttgattttgagacaaaagcccttcaaagtttcttacatagatattcaattgtctattatcttcgcaattttcagaacagctacagagagtacttgaagctgaaaggtagatatgaaaatctgcaacgtcagcagaggtatatacattaatgtggatgatgatcatttataaacagcatatatatatatatatatatatatatatatagtttgtattgatcatgaaagtgtgttgctgcagaaatcttcttggagaggatcttggacctctgaattcaaaggagctagagcagcttgagcgtcaactagacggctctctgaagcaagttcgctgcatcaaggtgatttacttctgtacatacactgaaagattcacacaaatctttctctatatatagactgagacacatgcatgaaatgtttttgatgcgtgaggttatctgaaaatgcctcttcttttttgcagacacagtatatgcttgaccagctctctgatcttcaaggtaaggagcatatcttgcttgatgccaacagagctttgtcaatgaaggtatatgatgatgtttctctctctctcctccagtttctatttatagatggaaactttaaatagtccaatttatatatatgagtctaaatttcacattcttcaactgctacatgtttcttttgtattatttctatgatatcttcaggaaagtttgaaaaatattgtgttttgtttagctggaagatatgatcggcgtgagacatcaccatataggaggaggatgggaaggtggtgatcaacagaatattgcctatggacatcctcaggctcattctcagggactataccaatctcttgaatgtgatcccactttgcaaattgggtaaatcaaacaacttttcttgccttaagacatcaacttaggttataaacagttagcagtttgctttaagcccaacattgtctttgtttcatagaggctttggttaaaactcgtgttgtttagtctaaggattcagcactttgatgtctgaagtatggaaaatcaatatctcagacttgaaaatgtgggtttctattgttgacttcgaaactatgttgttgtggtgttgcaaacagatatagccatccagtgtgctcagagcaaatggctgtgacggtgcaaggtcagtcccaacaaggaaacggctacatccctggctggatgctgtgagcgatacttcttcccccaataaagatcttaagcaagtactggtggggtcttcgtggtgtgatcttagatcttatgcatatgaataataatgttattgcacaagacttttgcttttgtagacacaagtggctatagctgtaatagccttcaacatctctcttctgtttcaggatttgtttgtgcctattgtaattgcttatatatgtatggtttgtataatgtgtgaaatgttaacatcgaccatgtctcatctggtgaagtacttatcctgtctatgcatgatacaaaaagacgtggttagatgctaaccgcaatcgcaaacacagcttgtgacaaaggcatataaactctcaagttaacagtgacattcaacagatcacaatgccaccaagatgtagcttttattttcgattctagtgtacagaacatataattacaatatctggatcttacagaggcaggacaagtaatgaaatctgtcctgaaaagttaaatgatacagagagttctgctgaagaatgtaatttctggtttgctacattcttcaatttctcaataatataggaccaattgtaataacttccaacaatactaaattgtttcggagtttggggattgtgctttttaatatacttcttccccattagtaaagtccccatcaagtaactgctccctgaaacacatcaagtcgcattgtttagctttacttgacttggattctttctaagtttcaaagtttaaggggtaatgaagaagtttgtccaagaacttcaactttgcttacctcagtctttcgcagaggcgggctaaagcttcggatcccattctgaatgcaacatcttgaatctctgaagcatttgagaggttcacactatctgctaattgaaattcacacaactccttcaacgaaaatgcatcggttaaaacagctgaatgaccacctcctgctgctagcttcctcacttgtcctacacacctgaacgaaacaccagagttcatgttaatctaactgaaaaataccacaatctctgtatcccataccgttttggttagcaattgaataaacaatacaaacttgtttgagctataccagtctacaggcgatgggtaccaagcatatgacgatttctcatttgctgcttgaccataactattataaccccatccacaaattcgtccctctctcatataaacgagagtgtgagaatgtccacacgcaacaagcctgacatcagttgggatgactaaaaccgggacatttcgtagaagcatttcgcttccattagagacactaaaaaagaaaccagattgaggaccaagtcctagctgtcctgcttggccaccaccccaagcataaagtgctccttccaaagataaagcacaagtgtgtacaccaccacaagcaacttctttcatggacacaccatcgagaccaacgactctccttggtattaactccttatccccggattgaagagaaacatgcccaagttgacccatgcttcctaatccccaagtgtaactgccacgaaagagataagcagtggacactgaataagataaaccgagaaaatataagcaaaagggaagaagacttgcaagtcaggaattcatttgcttcctcaagcattcccatctgctaggatgtgatgagaccaatatctccatcaaaaggatttccttcctcggaacattgcacagagaattagctacccattcatgtgaataaccacaaacttttcaagagaaggcatttagataacttacacctcgcctgcatcagaaagagcagcagtatggtattctccacatgaaagttgcataatcttcacaagctcgggtgcttcatcaaggaacttcgcataagcatttatcacacgaggtgcttgtagtccttcacaagtgactcctctaccaagttggccttgttcattatagccttataatatccatggaacacagaaacctcaaaatcattataaataaataccaaacaaacagattctaatgcataacaagatctcaaagcattcttaccccaagcttgaagaaggccttcctctgataaggccacaacatgagctgtcccacatgatacttggcggattgcctataatatgtgcaaataccaaatcaatgtctacactagtatgtttctatcatggataggatttaagtacataccgttgtagcaggaaatgcccccgaaaacaagcgtggtagatttgatccctatcatgaaaaaattgagagagtattagaaaaatacatgacgtgacaattccagtcacgataatggaacctgttatacctgattttggccccaaacccagagtctactagtggaaagagtaccgtcattttcacggggttctgcgatagctgcagtgcaaaaagctccacaagacacaaatttcacaaattctgattgcagctgtttcaccttctttggatgtttcctcccaacctcggttccatccccaagctgaccatattcattagcacctgaaacgaggacataaaaatgtaagaatcatcccgtcttcaggaagttacggattgcctaagattcaatcacaagatccaacaattataaccaaacaactaattggtaactacttagattgctttctatcacacttgatacataatcaaagccaagaattacataaagaaaagaactttataacacaagaagaaagacaatctagtaacaacacaaaggaaaagaaaactgagagactgaccccaagcaaagagagaaccatctgatgcaaccgcagctgtatgttcccgaccacaagaaatatcgagccaacgcgaattggcaccagcggggcaaccaaaaagctcaggaggaagctgttttgggatacgcaaaagcttctcttgttcattcctaccagtttgtccgctttgattgtaaccccaaacgtatatagcactcttcgttgggatactcacagaaggagctacttcaccaatgatttctccaatatccatttttagaaattccccttttaaagaagaaaacatgcacaaaattgttattcttcttaaagacccaaactttatgaacaaaactctgacttttacagaaatgagcagaagcgatcacgaatcaggcaagtttttcaatacccatcttagagctaatcgcgaattacataactaaagatgacaccacacgcatatgcacgagaatcacaattaaccaaaaaaaaaaggagaaagaatctgaaaccgtacctcacaaatcaatgttgaaattggatgaatcgcaaattctgaaggtctttgttcggtttttggagtagttaatgtgtaagaaacggagggaaagagagaagcaatgagtctcgttcattcatttgctccgagagctccgggaccgactccggagagacatttctgatattaacatcggaagacctttactttataaaatattacaaaacagtccctaaattatgttttcttttctcttttcccccacttcataagacttttatcactgcatcagttccttagattgaacacataaaaaaagaaaaatttatttatataacgacaatgatgtaagagttttgatgactgactagagaatacaacaacagaggcatttcatgagaaaaagtcacttaaagaagaaacattgcttcttgtttcatggaagttaaattttctcaggaacttaaactgttgcagagtaacagtttctccttttctgcttcatatatttaccattgtaaatgaaaatattcacaaaccaacaaagccaaatttacaaattatattccttgcattgccttgtcatcttccccggtttcagttcagatacaggacacggatcaatggtcgatgatcacggtgtttcgttgaattccatcacctgcatacatgaacaatggatcaaaaatgggagctttttaaaaatccgaatgaatcagaacaacacaactgttaggattccaagaaaagattatttctttatcgggaaacttgtacgcacatatgctttcacttgttctaccatctgagtctcaggcagataaaaccagaagaagccatggaaagagcatgatgaaatttgaaaatggagctttttaaaaatcagaatgaatcagaacaacaatattgttatgaattccaggaaaatattagagcttttcatcatctagaccgtgcaatttcgaaaagcatatggccttttgctttgacgggagttttatacgcacttcgttctaagaatgcagaaaaaaaaagtggttacctttccgcagactggacagttttcacttctctccatccactcataaatgcaactaaggtggaaatggtgtgaacattttgtcacaatctttgggttctctgatgtatattctgcaaaaaaccaacaagatatgaatactgaaggaacaaaaaggagactgttgaatgggattattattaccttcaagacaagttgggcagacatcttcgtcttcagacaatatatacatgttttcagagtcggccattattgacttggaccttgatctcaaaatcctgagactggatttactagagtactcttctttggaatctttatcagagagggtggacttattattagcccatttgcaccctcctaccccgaaagattcagaatctgcatcgctatcgcttcttaaaggttcaacttcctcatgagaatgacttgaacccttctcccgtcttgagacgagtgagcggaagtatctaggatcagcatcataaggcagaggtcttggagtagaacggaatgcttcagacaaaaagttatcgtgtgaagaagaggaagttatcgatgcagtagcttgaaccgaagatgggagagagcgagtttcccctcttctgaagaccgaaatatactgcaacgattaatatgggctcaaaaaatcagattacagatcaaagtaaataactgtgacaagaactagaaattgtaactatagaaacatgaaaactttcgagatatctaaccataagaagcataaactgaaatagcaatgtgaagcaagcagttaccaggttaaggaaattatgagcaaggcatcttatgcagggacagttcctatagacagagctgtttggattcatgtactcatcaatgtcctcgacccggaagcaagaagaaacacatcccatcttctcctcctatattcgtctcaaaaacctttcaacgtcgcgtgaaggtttctatttacagaactctggttccccaaaacatctgcttcatatatccacgtcacctgcaatgataaaatgggtttgattccttgataagtctaaagatgcagagaagagaatgttattttacactagtggaacaaagcaacttcaaacaatacatctcaacaaaccaaaagtccaatttctgttgagtagcaactgagagtttcaatcgatctgaactctgaacactcacaactctaacttgaggttttgttaaagtgaaatgcaagcacttacacaggaaaaaaccctaaattaggtaaatttccgacaaccacatatataaccacacaaaaagaagaaaaagataaaaactttgcttcaacagagaaacagacaaactcaattgagataagagacaccgaaaagtgaaaaaccccatttgcattaatccaaagaactgagaaaaacagagtgtatcaaccgacaaacaaaaaaacagtaaaatttgatcagaaaacaaacttgtgagatcaaataacgatcaggatcgttattgatgaaaacatatttctagtaatttttcaaataatcgaaaaattaaaaagaaagagtaaacctttgatcgagaattgagctggccggagagaggaggcaaagacctaaactgattccttttcgatcagatgaaacaaattaaccgacgaaagagagacaaggctttaaattttcaacttttaatataaatatagaaactcattaattgtgcaatttcccaggaaagtgaaaaacttcaaaaggattactatttgttttctcgtcggtgataaaaagaaagattgcggaaaaagtgaggaacactgaagaagatgaagatgaatgatgattgttgttgttatgaaagtgggtgagagagacagaggagagcttcgttgtggatgccaatggagcttcaaacagaaaataagttgacctttaaaaataacaaaattctatataataatgataatcaaagaacataatataattacgcttagattattatatagatgactttgtattttgaactttttgaattttagacgtataagaaatgtttttctgtaagtttgaaaactcctttttctgtttccaaatcacatttttttttatcgaaatctcactgcttttatggggttaatggaggacgaataattattttgttactcacgcatgcccgattattctgtgcttctgcaattattttttcgtttaatactgaaattaatctctttttttttcgtgtcagtgtcatctactttccatacaaaaagtaaaagcaaactactttcttcagaaatttagactagttgaggttttgcattgattataaaatctgattttaaaaaaatcctaaatgaacagttttactctttaattagaatcacatgacacatgttacttaattggtgatatttaaatttaaacagaaattaatatctagtgttatccaattaacgattttgaaaaacaaacaaaccaacaaaaaaatatgtatttcaaaactaaatctatatcaaccttaaccttcgacacatcatcttcacttttaattaatttgtatgaattatcaaaataaaaataaaaattaatgtgccagcaataaaataatcagagaacatatatgtaataagattacatatgaaggaagttagagagttaagaccaagcttcaacattgtacctccctgtcttctccaaagccttaagccaccgtgaagctacctcctttgatcctcctcctgtctcctccgacacaatatcttcgaaagccgacatcacatcacaaggcattttcgtcgacgagcccgccacgtaaacagcggctccatcacagagtaaatcccaaactctcttgctcatttcgcggatcttatgttgcacgtaaaccttctttggttggtctctagagaacgctgtgtaaaagccaccgccttttccttcagagagcatgcctccttctcttgcgtgagactcccagaaatcgcggtatagaaagtctgtgtctttgtttctgcaaccaaagaagaacatgacgggggcaaccgggctagactgagcttgtacggctctctcagctatgaatccacggaatggcgcacatccggttccgggtcccactaagatgagcggaagcgactgagatggagcaggaagggagcctttgtgaaaccaaaccggtatgtttacctctaaccacaaccgaagacaaagaaaacatatcagaaatagagaactgagccattcacagttatggtaaagaagaaacaaacttctaaccttgttcaggtgcgaggcttgcaagccaagaggagcacagacctttccgagttctcttataaggcgtgatccatgatactatgcttacagtcaaatgtactgcggcagggtgggccaaaggagacgaagatatcgaaaaagctcttggttttagcggtgggactaactgtactagccaatcaaaagggatttgtacggaaggaaaatcctctagcacctacataggcattagcaatacgattggttaagagagtgaatgcatattcaagacgaatcatgaacctgtgagatctggtgctattttacctcaagaatgcttcttctttccttctgattgtaattgtagagatcatcccgcccctcgggtgaggcaaagtattgaagtctttccttctcatgttcagctgttgcatagaagctcataatctgaacagagatgatacatcatacattacaagggtgtccatcaaatacttgtctcataaaactcaaaggactttcatagatttgaaattcaaatgcattagaactgaatgattgaaattaaagggttcttacctcaaagaagtatcgtcgaggtgaagcggatgtaacatccattgttaattcaacaaaagtcttaagcttaatagggatctgtgtaatcatttcttcactaaaactactattctctgtctctcgcggaccaacctgaaaaaaaaaataactctcgggatttattttgaataacaatctgagataattttatatcacaagagtggagctacttactgtaatgaatgattctgggtctaaaccgcagcgttctataaacgcatctaccactgaagaattttggcttggaagaagctcaacaacatcgccaacttcatattcgatagtcttaaaagagtagaaaaccaaagaggataataagaaatcaccctcaaaatcgactgaactttgacctaagtaagtgacagcaaagtacttacagaagaaacaaactggaactcaaagtggcggacatcctttgtgctttcagctttagtcaagacttcattgcgggtctacatgattagaatgttaaggcaagctaagggaataaacctcatatcatctaggcttagcataataatgcataccaaaaggcaaaatcagatattttaagaaaacatgttaatcatcaagcaacacaccagattcaaggtaacagaggactggaatagcataaccagtgaggttgactagcatatcagaatgaaaaagaaaaggaattttttgttgggcaacaggatgagcataccatcttgagaaagcagtctggtttacttttgtccttgaataattttcctggggacattccacgggctctttgtatgatatctgcaaaaacataagaggcatattaaacaagataaattcccaaaaacatgtaatatggtacctaacctttttcatgatgcaagagaaattagtttcacgagccaattgaaacataacatttgtgagcctacttccagcagattcattcaaaatgatttttataccaacatttctagcaattaccattagcaagtaggcaattcaatgttaagtagcacaacatagtcataaattaacataaatgaagccaagtatccactcaataattttggcatacctgaatctgacaataatttaggctccaatttctcctgcttatgaaataaaatcctatatttaggcttatcaattacttcatcttgaggaattttcacatctggacctttaggaaagtattttggattgatctgatataatgtcctccacaaagaaagcatccacggatcaagagttccttcatacctgaaaataaagaaaacaccaaaactgaaaacttagtatcctaacactggactaataaaactacagtaagaatgtagatacaactgactgatcaaatggttccttcatatctgaaaataaagaaaacaccaaaactgaaaacttagtattctaacactggactttatagtagtataccaggaacagtaagaatgtggatacaatatcttcaactgaccaaatggttcatctgatttcaaagaatattatgtaaaagcaggattctttatttgttttaatataccgtatcataccctgatgggtgttgatcatctcctagacctttttcaatgatggttgtggccccaagatctgataatcttttgtctagcttctttgctacaaactaaagccatcagaaagagaatcatgtcatgaatttgtgccacagaagaataaatcagacaaatctcacgatttctggcagtgaggattcttttacaaaaataaaaaaccctgaatagaaaggagaagggtaagtttgctaatatcattcttccttagtaaagcctagttttttcttctcacattgattaaaacatcaaaaaaaatgtggaggaacttgggaatagcccaacatggggaatgttaaaacaaagcgaaactgaatataaatcatgtcatgaatttgtgccacagagaataaatcatcccacgatttctggcaatgaggattctttttacaaaaagaaataaccctgaatagaaaggaaagtttgctaatatcattcttccttagtaaagcctagttttttcttctcacattgatgaatagattaaaacaaaactggagaaacttgggaataacgaaacatgtggaatgttaaaacaaagtgaaactgaatataaagaggcagaagaacttacgttgtacttctggtaaccagaatcacctagtccaaacactgcatagcgaacttgttgcaaccaatagtttcccagatttctttgaagaagaaacctccaaaatgccttgaatgattgaaaaagacaatgaacaataataagctacgattaattaaaagcgttttacaggaataaactaattggtaacaaatttcaggactttaaacgaaccttaaaggaatcaggagagtctccttgccctgtagtggagacaacaaaaacaacagcctcctcatgatgaggtaaggaactctgcagaaaacaacacatgataaaaaggaaaacacttttatgtcgagagtttgcgctaacagctgattattggcgaggggaaaacatatcagcaatcaacaatttttgcaattgaaaggggtttgcttccaaaacatattagcaatcatcatataaaaacgaagcaaaccatcttccaaaacaaagtaacgagcttttaaaatcaaattggttttactacacacataccgtgtcgaattcgtcggtggagacgacagaagctggcagtccacggcgttctgcttcgcggccaatacgctccgccgcatcaagagcgtttccggtctgagaggcatacaacacaagcagcttcctttgtttttctcccatcgccgccactgccaccacccgtccgaataaagaataactgcacaaccggatcccggtctgatgatttaaattggcaagttaaaatcagaaccgaattaaatcgagaaatcttagtggagaaccaaatgtttgtaccagaacaacagggcatctgccaagccaaattgatcttgaaccaatgtacagtgtgttcttcttcttctaagagagatggtgagctttctacttcacagtcgtgcgtaagaagaaatccataaggagaataagattactttcactgtggattcgcccatacttaattgagaagaacagactgctaggtttttttttttttttgaaaaatacaaagtcaaacttgtaaagtatacaatacgaattaaaccactaaaccaacatctatataaccgtatttaaccagcaatccacgtatcagaacagaaatgttggttttttcttgtcttgttgatctcttagcttaatccaccaaaagacacaacaacacaataagtggaagacatgcaaaattagttacagagcatagtgccttgtaacttgtaactcgaaaataagacaaaagtatctgaaaaaagatggctagcaacatacatagatggacatttttgtctccaccaaaatcacaactgtaatcatcttctcaaaatcaaaggtagagtagttaaatcgtttcagaccttactcaagttaagaaataccttgtcgaatatctcagaggttcgttttattgtcatctaatttccgattatatcccaagtgttgcaaggcttttattgaacagctcaagtggtttgcattggtggaaacatctgtgggacaagtaagaaaatttgaacctcaattgttcaatttcattcttaaatggagcctcaaatggggaacttttagtatatatgtgtcttagaagaagcagagtttacgcatgtattcattttgttatcatactgtttttatgttaaattagtaacaaaagttttcatactctctgcttatgccaacattggtggttacttatgattcctatataggtcagcagaagtatgtgtctcatgttccttggtcttccaatgtgtgaaagcggtatgcaaaaccaaaagacttggcggtggctttgaaacaagatcagctttcattgctgccgcagcttctggtccttgttacctattaaatcaacgatcgtgaaactcacactggacagagatgtggataagatgataacttgtcatccccatagtttcgttggtatctctatatttctctgttgataaattaggattgttattttcagttgcatgttaaaacaatcgaagaagctttttacatggttttgatgaaatgacaatagatttcggttcggcgtacataggttttgaaattacaagtgatttctgtttggtttagatggttgtgaaatgaaaattaattttggttcggtttgtattagaatagtacggttttgagaaaaaaaaaacaaaagaaaaagtcactcgaggctgttttggaaacaaagcgagtagatgtaaaataggcatgattttgtgggtttacccctacagaaatcgacgacacgcgctcaacgcgaggttgatgcgagtgggcgtggtccggagcgcgtgacgcgaagttggtgcgagtgggcgtagtccggtgcgctctgattggttagaaaaatgaaaatagttgtgtagtagctcctccacttctcctctattatttcgtttttcgtcattctttagttctgaaagttgtgtagttttaagattcaattgaatcttattacgaggtttttggttattttgaaatcattgattactgtcacaaaaaaaaaatagaaactagattttgagatactaaaatttttattttcattttgttctgcaaccattaaaactagatttagctgagcccctaaagaaatcaaagtgagttgatatgttttcttcactagaaaagtttttgccacttttatgacatagttatcgagtatactataacattatacaatatttttaaaaaatagcataacaattggtttataccataaaaattagagatgagctctaacaaaagttaagcttattagaaaaaacactaaaagcgtagaagattactttcatggtggattcgcccaaacttgagttgagaagaacagactgctagggctttttcttatagttttcgttttttttttttttttttttccatctcttttagttttcgtttgggacatttaatgtctataattaataacaaacgattgggccttaaatttagctcaggcctggaataagcccatatagtcctcgtttttatgtcactctcaaaacctcgaaagtggtttctatctatcacttgggcttttattacttgttaaaacaaatttgatccaaatctcaaatggaaccgacaaaatagaaaatccggttctctcaaaaggccaaacacgtgacgtttaggaacaaaaaagacgttatcactgcaagaagttttgactttgagaaagtctttgaataatcaaaacagagtttttcaaatttcccaagtctgaaatggtactcgcaccctgcagacattttcgatcaaaattttcagagagtgagagagagagaagggagatcagataatggcttctcgtaagaaacgtgctgcgaagatttcagaggattcagaggaggaacagagtcgccgtcaacggttacaagccattcttctcgctgacagtttcgccacgaaactccttcccttaaccttagaacgccccaatgtcttgttaccgctagtgaatattcccatgattgattacaccttagcttggctcgaatctgctggcatagaagaagttttcgtcttttgctcgatgcaagtcatcgattatctgaacaactctgactggtactcgcacaaagactttacggtaaaaactatagagtcaccgcaaaactccaccagtgctggtgatgctttgcgttatatctacgagcagcagattgagacgtctcagattcaaggtgactttgttcttgttaatggatgtattgttagtaacatgcccctgacgcagctgattcaagaacacagagatagaaaaaagaaagatgagaaagctatcatgactatggttatcagacagtcactcatcaccgatcatcaactcttcatcgctgtaaatcctttaacaaaacagcttctttattacgatgaggacaacatctgcttcgataaatcattgctggatcgtaatccatctgttttgttatgtagtgatatgcaggattgttacattgacatatgttctcttgaggtgcttagtctatttgtggataacttcgattaccaacatatgcgttgtgattttgtggaaggtgttcttgctgatgacattatcggttacaagattttcactcatgagattagctcgtgttatgcttctaggattgaaaatttcaggagctatgacatggtgagcaaggatataatccagaggcggacattcccgtatgtaccggatatgaagttcagcggaaatcgcactcttaagctcgagagacaagggatctacaaggcttctgatgctactcagttaccatctgctcatgttggagcttcctatgtcattggacatgccacaaatattgggagtgggactaagatcttgaactctgttattgggaatggatgttctattggatcaaatgtggtgatccaaggctcatacatatggaacaatgttacggttgaagatggatgtgagataaggaatgctattgtatgtgatgaggtgaaagtgtgtgcaggagctattgtgaaacctggtgttgtgttgtcttttaaggttgtagtcgggagggactttgttgtacctgcatattcacaggtttcactactccgacaaccaatggaagaagacagtgatgaagaaaatcttttgtcaggtgtagatttgcaaatggagtctaagcttggtcttgatggagcaggttacatatggcgccaagcgtgtgaagacgagtggaagcattctgttccaccaatccccaaagataaacttgctgagatcattaaggccattgacgatgatgacacggatgatgaaagtgttgtcacaacttccggcgatgctaatactagtattaacaatgatctctttgactttgagagagaggttgatggcaccttcttaagggctgtcgaagagaatattgtagccgaccttgcggttttggagataaactcactccggttgtcatataacatggaatctgcacattgtgctggtgcaatattctactctatgatgaaactagcagttagtactccacatagctctattaatgacttgtatagaaacgcatcgagtatcattactcgatggaagggacttcttgggttctatgtaaagaaaagtgatgaacagatagaagtaatatcgagattggaagagatgtgtgaagaatctgctcatgagttgggaactttgtttgctcatattttacgttatatgtatgaggaagagaatgaccttttgcaagaagttgcaatcttgagatggtcggatgagaaagccggagctgatgaatctgacaaagtttatctgaaacaatgcgagccattcataacgtggctcaaggaaacatctgacgatgaagatggctaatgaattggtggtaaacatgtgttcgttggctcccaaaaggaacattctgattgattatttgcatcgaagagattactttgtctttttttccatgtgttattctaatgatgtgctattttatatctcatccattacatgtatgaggtatataaatacaacttttatgtttttgtaaatgtattataggaagcttattacagtatttcccaaaaaaaaacaattatagttatctaacgaattagagaaatttaactaagtgaaaaataataaaggaatgatctaaatattaatttttgggctgattttgaaagaaaagaataaggaaatgaaaacgaagaagaaggaacatcgtcttctccacagagtcctctttcaccgcctttgattctttacttataaacccttaccttcctcttccttttgtatatacctatttctctagaaacctttttcctcatcgaactcttcttctttcgcctcgccagaaatggcagatgacttggcgaatctctgccgatttctcttcgacgacaccgcctttccctctttgtcgtcttcggcatcttcagatctcttttctcgccgtttacgctccgatgattcgatcaagcgcggtctccgttctttctatctcctccttcgctggggtgtcgctccgatcggcggagacgatgctgattcctctggcaagctacgctttgagacatggtccgattcgcagcttcaagctcttgtttcgatatctcaggcgatccttctactatctcgatctctattaggtactgacttgacactgaatcaaggtttaggtcggtatcaatttagctgtccatttctagttcgtcttccactttctgagctttggcatctgctttttttgttgctatcctagatgagttactagttattttccatctgaacagtgatgatctcgaatcattttccttactgtttttttttttttggtgtatcttagtggaccaactcgaaccaatcgttttgggtgtcatccaggaggtgatggaattctctctcagcttcttggagaagtcaagttttagacaaaatgatctcaaaatggaggtttgttctttattattaatttgtgatagagattcagtagggaagtctttaatgttggtcttattttggtacactgggtaagtctaggtaatctgcttgaggtcctttttgagcatagacatatcttctagagaatttgtttttatttgtgtttgtttttcgatgattagacgtttgaactcgttttataagactttatcaggtttttgacactagtggtcaggttttcattgttgcgccatagaattttgtcacatatgctaaccagcatgttttcgttttaccttttccatgagggttatagtatggttacggtctacttccattagtaactctttgtctatcaccaaaacatttgtggactactgacttggtttcttactctgtttctatcaagtttgactgcattagtaatatctccaaatgcttgcttgaatcagatcaacatggaaatacttttggaaattgcttcttttgatggaagtgagaagcaatatgatatattaccagatttctctcccgctgaagttgcagaactgtggccagctttttctggcgagcatgataatatggacgcacagagccttgtgaaatgtacttttcaaggtattgtttctacccatccactcagcaatatgttttcttacttcaaatttatttgatgacccttacatcttttgacatctcaagcagggggcagatgctcaaatgaagagaagccagttgaccggcttcttattacactgatgtctgaatgcattgaatctgatgtccaggcgcagtcagtagtaaagtccccttttcaacaagactgtggagacctgaatccctttactcgacacctggcagttgttcaccttcgctgtgtttgtcgcctgattatggtctgcaaagagcttgttcaattgccaaatatgttggatgagaagacggttgatcaagctgtccttgataaattgtcgttctgcttaagaattttgaagctgcttgggagtctttcaaaagatgttcaaagtatagaaaacgacggctcattgttacaagcagtagcttcatttacagatgcttttcctaagctgtttagggttttctttgaattcactaaccacactgctacagagggtaatattgagagtctttctcttgcgctagtggagggatttcttaatctcgtccaactcatttttggcaagagcagtgtttttcagaatgtccaggcatgtgtggcagcttctattgtcagcaatctagattcctcagtgtggagatatgatgggtcctcttgtaatttgacacctccacttgcttacttccctcggtctgtcatctacacattgaaactcattcaagatctcaagagacaaccataccatatccatgatctgagggttttagagtctgaagttacctatgaagatgtcagttccactgttgattctgtttatttccatctgcgccaggaaaagatcccgttgctcaagtgcttcacggtcgaggatataatgagagtgatatttccttcatcaagtcaatggatggataacttcttccatcttgtttatttcctccatcgcgaaggtgtaaaattacgaccaaaagtggagaggacgtattccagtttaagatccaacagttttgcagaagttgaaagccaaatttctcatgacgatgaagccctgtttggaaacttattttctgagggtagtcgttctctctgttccatagaaccaaatgatcaaccacctgtttctgtcagcagcaatttactattgcaagctgctaaggaactgttgaattttcttagagcatgcattctttgtcaagaatgggttcctagtatatatgaagatggatgtaaaaagcttgacactggtcacattgatatcctgctcaatatagtaggctgtagtattgaagacaaggcttctgatggtggttgcatgctccaagatgagggaagacctggacatgttgcttttgagctgttactcaatctcttgagaagtcgtgctctgtctgattttctagagtcctacctttttcagcaaattcttgttgttgaaaatagtgacttcaactataatgataagactctggcactgttggctcacactcttctatgtaggccgggcttggctggggcacagttgagagccaaaatttatgatggtttcgttagttttgttaccgagagagcaagaggtatatgtgctgaagctttgagtctcaaggagttgactgcttgtcttccttctgctttccatattgagattcttcttatggctttccatttatcaaatgaagctgagaaggcaaaattctcaaatctcattgcttcatgtctgcataaagttgataccccggcaggaatatgtgatggtcctcagctgtcctcttgggcaatgctgatatctaggttgttagtgctgttgcaccatatgttgttacatccaaacacatgcccaacatcattaatgctagatctaaggtctaaactgagggaagttcgtagctgtggtagtaatttacatgtaactgttggtgatcatttatcttcgtgggcgtctcttgtagcaaggggtataactgattcatgggctgaggatgagtcagtcagccatctaatgagtcaaatgattgacttttcccctcatcctcctacatttcagaatgatgtgtctactgccaaaaccttaaacttggattatggagatttatctgcgagtttgtgtcgggttttggggctgtggaaggggaaaaaggcaggaaaagtggaagacctgctagtggaaagatacattttcatgctttcttcagatattgctcgtattaactgtgcattggatagccagccttctttgcatgttaattaccagaatgtggacatatctaactctgtggatctcatcagcaccagtcatttgcttgtaggcgacatcaatgttgttggtagaaatatcgagttgagaaacattctgatcggtgttttaaatcagctccaggcagcacctgagcaggtggttgaggatttgggttgggattatattcgcgaaggagcttggctctctcttctgttgtactttcttgatggtggcgtctgggattattgcaacaaaaattcatgttcagaaatcgatcccttctggaaggagtgcacatctgttgacgccaagtatgttgctgcagcagaaggggtagtctcttacttgatgaagactggtgatattgcagaattgctgagaatgctttcatcattggttggcaaatatttacgagtgtataagaaagctttccttgcaactttcagcgattggaatcatcacggtcatagttcgccttctctgctacttctcaagcatactcaatttggtaaaagtctccaaggtgaatatgcgaagattggtgacaattctctccatcttcaatgcatcttttatctgtcaaaactggattccctgggagatggaagaggttcgggtgttttatggaaagtgttttgggaatttatggtacatgggtttcccactagtcttcaaacttctagtgcgattcttctttcatgtattctaagcataagatgcattgtgctgacaataaatggcttactcaaactgggtaactctaaggagaagtttggggtagatactagtgtacttcatcagctacttgattctatcatgattattaagtttgaccaggtattcgaaagctttcatgggaaatgtgaggagatccatcaaaatatatgtgccgtgttgcagcttccagatttgactgagttgtttctgatgaaagacatggaggggtttgtaagagatatcagtgctgagcagatagatagaagccaagtgcttgaaggggtgatcaccaagattgtagatgttatggacagtctaagcaaggattcttcgaaatctgatattttcaaattttatcttggtgtagatgcagtctctgagcataccagggaattttatgagttgcaacgtggagatctgtctgtgtttattgactcattggactactgttccttggaaccagtaaacataaaagtacttaacttccttgttgaccttttgtctgtggctcaatcccctgatctccggagaagagtacaacaaaaatttattgacatggatttgatatctttgtctgggtggctggagagaagactgttgggttccttcgttgaagaaatagatgggaaaaagactgcaaaaggaaattctcttcctttcagagaggcagcaatgaattttattaattgtcttgtgtcatctactaacgacctacagaccagagagttacagaatcatttattcgaggccttgctgatctccctcgataccgcgtttctctcatttgatatccatatgtctatgtcatattttcattttgttcttcaacttgcaagggaagacaacctgatgaagatggttttaaagagaaccataatgctgatggagaagcttgctgccgaggagaagttgcttcctggtttgaagtttatttttggtgtgataggcaccttgttgagcaaccgttctccaagtcatggagagagtttgtgtggaaagtccttggcaagctataagaatactgcaacaggtcctttggtcccaaaactttcaggaacaacgaaaaaatctgatacattggctctccccgtggatcaggaaggaagctcaatatcacttgaatgcgatgtcacttctgttgatgaagatgaagatgatggaacatctgatggtgaagtggccagcttagacaaggaagatgaagaagatgccaacagtgagaggtaccttgcctcaaaagtctgcacttttacgtccagtggcagtaatttcatggaacaacactggtatttttgttacacttgtgaccttactgtgtccaaaggttgctgttctgtttgcgcgaaagtttgccaccggggtcaccgtgttgtctattcacgatcgagtcggtttttctgtgactgtggagctggaggtgttaggggaagcagctgccagtgcctgaagccacgcaaatataatggaaatggaagtgctccagctcgtggtacaaataatttccaatcgtttttacccttgtctgaggatgcagatcagcttggagaaagcgattcggatgtggaagaagatggtttcggggaggaaaatcacgttgtcttatatatccctaaagaaactcaatataagatgtcactgctactcgaagagctcgggatagaggaccgagtactggagcttttctcatctttacttccgtctatcactagcaaaagagactctggcctgtcgaaagagaagcaggtcaatctcgggaaagacaaagttctttcatttgacacggatcttttgcagctgaaaaaagcatataaaagtgggtcattggacttaaaaataaaggctgattatactaattcaaaggaccttaaatctcttttagccaatggttcccttgtcaagtctctcctgagtgttagtgttcggggtcgccttgcagttggagaaggtgataaagttgctatatttgatgttggacagctaataggacaagccacaattgcacccataaatgcagacaaggccaacgttaaaccactttcaaggaatattgttcgttttgagattgtgcatctttcattcaacccagttgtggagaattatcttgctgtcgcaggccttgaagattgccagatacttactttgaatcatcgaggtgaagtcatcgacaggcttgctgttgagcttgccctgcaaggtgcattcatcaggcgtatagactgggttcctggttcacaggttcagttaatggtcgttacgaacaaattcgtgaagatttatgatctatcccaggatagcatcagtccaacacagtacttcactttgccaaacgacatgattgtggatgctactctttttgttgcttctcgtgggagggttttccttcttgttctttcagaacaagggaatttgtataggttcgaactatcttggggcggcaatgcaggcgcaacaccgcttaaggaaatcgttcagattatgggaaaggatgttacgggaaagggttcatctgtctatttctctccaacatatcgactgcttttcatatcctatcatgatggaagttcttttatgggtcgactcagctcagatgcaacatccttaactgatacatctggcatgtttgaggaagaatcagattgtaaacaaagggtggctggattgcatcgttggaaagagttgttggctggcagtggattatttatttgcttctccagcgtgaagtcaaatgctgtcttagctgtgtccttgaggggcgatggggtatgtgcacagaatctccgtcatccgacaggatcatcttcccctatggttggaataaccgcatacaaacctttgtcaaaagacaatgttcactgtctagttctgcatgatgatggcagccttcagatttattctcatgttcgtagtggagttgatactgactcaaatttcacagctgaaaaagttaaaaagttgggttctaagatacttaacaacaaaacctatgctggtgcaaagccagagtttcccctggatttctttgagagggcattttgcattacagcagatgtgagacttggtagtgatgctattagaaatggtgattccgagggagcaaaacagagcttggcatctgaggatggctttattgagagccccagtcccgtgggcttcaaggtatggttggaattctgcagtaatttttcttgataagtttatctgcatactatgcttggttattagtttagtactctgaagagtattttgtccgcccaattatgagtatatgggttgcttgtctccagttatctaacctccttctctctttcagatatctgtctccaatccaaaccctgacattgttatggttggcatccggatgcatgtgggtactacatcagcaagctctataccttcagaagtgaccattttccagagatcgattaagatggatgagggcatgaggtgctggtatgacatcccatttactgtggctgagtcacttctagctgatgaagatgttgtaatctctgtggggccgactactagtgggactgcactgcccagaatagactcgcttgaagtatatggtcgagctaaagatgaatttggctggaaagaaaaaatggatgctgtgctagatatggaagctcgtgtgcttggtcatggtttgcttcttccaggctctagtaaaaagagagcgttggcacagtctgcttcaatggaagagcaagttatcgctgatggtcttaagctcctatcaatctattattcagtttgtaggccacggcaagaagtagtgcttagcgaactcaaatgcaaacagctactagagacgattttcgaaagtgatagggaaaccctattacaaacgacagcttgccgtgttttgcagtctgtctttccaagaaaggagatatactaccaggtaatgtttctaccaaattcagtcttgcatgttcagtagatatttccgggcgcagatattctttaaatttgtatgttgtctttggcattgattatatctgttgctataggtcaaagacaccatgcgactccttggagtggtcaaggtgacctccattctttcttcgaggttggggattttgggtactggaggttcgattgttgaagagttcaatgctcagatgcgggcggtgtctaaagtagctttgacccgtaaatcaaatttctccgtctttctggagatgaatggtatatgctgtttcagttattatctacagtgtgtctatttgcatgtgtagttcaaaattcaaacacaattttgtttattatccttgtattatgtaataggagcggctgtttgtcatacaaatataatcttcctttcatatagttttgtttatatgagatatgtttgttatgtaggctctgaagtggttgataatctgatgcaagtgctatggggaattttggagtcagagccactcgacacacctactatgaacaatgtcgtgatgtcctccgttgaactaatctatagctatgcagagtgtttggcatctcaaggaaaggatacaggggttcattctgtagctcctgcagttcagttactgaaagcacttatgttgtttcccaatgagtctgtgcaaacatccagcaggtgtgttcttgtgtatgttttttatactctgctctcttagatatgtactagtcttctaactcagtttctttacagcctagctatatcatcaaggttacttcaggttcctttcccaaagcaaacaatgttgacaacagatgatttggttgacaatgttacaactccttcggtgcctatcagaacagctggtggaaatacacatgtcatgattgaggaggactctataacttcatctgttcaatactgctgtgatggctgctccaccgtccctatactgagaagaaggtggcactgcactgtttgtccagattttgatctatgtgaggcatgctatgaagtgttagatgcagatcgtctaccaccaccacacactcgagatcatcctatgacagcaattccaatagaagtggaatcacttggtgcagacaccaatgagattcagttctctgcggatgaagtaggtatttcaaatatgttgccggtggtaaccagtagcattccacaagcttcaactccctccatccatgtcttggaacctggtgaatctgctgagttctctgcctcactgaccgatcctatttctatctcagcgtcaaagcgtgccgtaaattctttgattctctctgagtttctccaagagttgagtggatggatggaaacagtatccggtgttcaagctattcctgtgatgcaattgttctacagattatcatctgccattggtggagcctttatggatagctcaaagcccgaagaaataagcttggataagttaattaaatggcttttgggtgaaatcaatctcagcaagccgtttgctgcttcaactcgctcttccttaggggaaattgtgattcttgtgtttatgtttttcaccttgatgcttcggagttggcaccagcctggtagtgatggtagtagctccaaattaggtggaagtacagatgtacatgaccggaggattgtccagagctccactgtagtagctactcagtcttctttacatgttcaagagagagatgactttgcatctcagctagttcgtgcgtgcagttgcctcaggaaccaagagtttgttaattatctgatgaacatacttcaacagctagtgcatgtttttaagtcacgtgctgccaatgttgaagctcgtggatcaagctctggttctggttgtggagccatgctcacagtcagaagagatttacctgcgggtaactattctcccttcttttcggattcatatgcaaaagcccatagagcagatatttttgtggactatcacaggctgctacttgagaatgtgtttcgcttagtatataccttagttagacctgaaaaacaagagaaaatgggggaaaaggaaaaggtatacaggaatgcttcttctaaagatttaaagctggacggtttccaggatgttctatgcagctatataaataaccctcatacggcttttgttaggagatatgctagaaggctgtttttgcatctttgcggaagcaaaactcaatactacagtgtcagagattcatggcagttttccaatgaagtgaaaaacctatacaagcatgttgaaaagtctggtggttttgaaaacaatgtttcatatgaaagaagtgtaaagattgtgaagtcgctttctacaattgctgaagttgctgtggcaagacctcggaactggcagaagtactgtctcaggcatggagattttctgtccttcctactgaatggtgtattccattttgcggaagagtctgtaatccagacacttaaactcctcaatttggccttttatcaaggaaaagatgtgagcagctcagtgcagaaagctgaagcaactgaagtagtgacaggctcaaaccggtcaggatctcagtcagtggattcaaaaaagaagaaaaaaggtgaagatgggcatgattcgggtttggaaaaattatatgtggatatggaaggggtggtcgatatcttcagtgccaattgcggagatctcttgaggcagtttattgatttctttctgctggaatggaattcgagctctgttcgcactgaagcaaaatctgttatttatggcttgtggcatcatggaagacactcgttcaaagaaagtctgttagcagctcttttgcagaaggttagatacctgccagcatatggtcagaatattgttgagtacacagaacttgtctccttgttgcttgacaaggctccagaaaacaactcaaagcaagcaattaatgagcttgtggatcggtgcctgaaccctgatgtgataaggtgcttttttgagacgctgcattcccagaacgaactcattgccaatcatccaaactcccgtatatacagcactctgggtaatcttgtggaatttgatggttattatcttgagagcgaaccttgtgttgcctgcagttctcctgatgtgccatatagcaaaatgaagcttgaaagtttgaaatccgagacaaagtttactgataaccgcatcattgtgaaatgtactgggagttatacgatacagtctgtgacaatgaatgttcatgatgcacgaaagtcaaagtcggtgaaggtcctaaacttgtattacaacaatcgccctgtctcggatttatcagagcttaaaaacaactggtcactgtggaagcgtgccaaaagttgtcatctgtcttttaaccaaactgaactgaaggtggaatttcctattcctattactgcttgtaacttcatgatcgagttggattctttctatgagaatcttcaggcgttatctcttgaaccattgcaatgtcctcgatgcagccgacctgtcactgataaacatggtatttgcagcaactgccatgagaatgcttatcagtgcaggcaatgccgtaacattaattatgaaaatttggattcattcctttgcaacgagtgtggctacagcaagtatgggaggtttgagtttaacttcatggcaaaaccaagcttcatatttgataatatggaaaatgacgaagatatgaagaagggattggctgctatagagtctgagtctgaaaacgctcacaagagatatcagcaactactgggattcaagaagccgcttctgaagatagtttcaagcattggtgaaactgaaatggattcgcagcacaaggacactgtccagcaaatgatggcatctttacctggtccatcatgcaagataaaccgcaaaatcgcacttttgggcgtactgtatggtgagaagtgcaaagctgcttttgattctgtcagcaaaagtgtacaaacactgcaggggcttcgtagagttttgatgagctacctccatcagaaaaattcaaatttttcatcaggtgcctcaagatgtgtggtctcaaagaccccaaacaattgttatggttgtgcaactacatttgtcactcaatgtcttgagattcttcaagtgctgtcgaagcatccaagatctagaaaacaacttgttgcagctggtattttgtctgagttgtttgaaaacaatattcaccaaggtccgaaaacagcccgtgctcaagctagagcagctctttctactttctcggagggtgatctgagtgcagtgaatgagttaaacaatctggtacagaagaaaataatgtactgccttgaacaccatcgttccatggatattgcgctcgccactcgtgaggaaatgttgttgctttcagaagtttgctctctcactgatgaattctgggagtcaagactgcgccttgtttttcagctactattttcatccattaaattgggtgctaaacatcctgctatatcagagcacataattcttccttgccttaagattatttctgtggcatgtacacctccaaaaccagatacggcagagaaagagcaaacgatgggaaaatctgctcctgcagtgcaagaaaaggatgagaatgctgctggcgtcataaagtattcatcagaaagcgaagaaaataacctgaatgtatctcagaagacgcgagatattcagcttgtgagttatttggaatgggagaaaggggcatcatatctcgactttgtgaggaggcaatacaaagcctctcagtcaattagaggtgcgagccaaaagtctagaacccacagatcagatttcttggcacttaaatatacacttaggtggaagcgacggtctagcaggacatctaaaggtggtttacaggcatttgagctcgggtcgtgggtcacagagcttattcttagtgcatgttctcaatctatcaggtcggagatgtgcacattgattagtttactcgctgcccaaagctcacctaggcgctacaggctgattaatttgctgataggcttgcttcccgctacgcttgcagcgggtgaaagtagcgcagaatactttgagctactcttcaaaatgattgagacacaagatgcacttcttttcttaactgtccggggttgtctgacaacaatctgtaaattgatctcccaagaggtgggaaacattgaatctctagaaaggagtcttcagattgacatttcacagggatttaccctccacaagctcttagaactccttggaaagttcttagaggttccaaatattcgttccaggtaattttctcatcattaaatctattgatctgccattgacttcttcatacctgtctaatgttttgagtgtggcagattcatgagagacaatttactgtctcatgttctggaggccctcattgtaattcgtggcttgatagtgcaaaagacaaagcttataaatgattgcaacagacgcctaaaagatcttcttgacggacttctgcttgaaagcagtgaaaataaacgtcaatttatccgtgcctgtgtttctggactgcaaacccatgcagaggagaacaaaggacgtacctgtttggtaagaagaattatcatactgaccactgtatcatcttcaaaatatatgattctttattactttacagtctctggggatcttctattcttctttttagacttctggatgaaaatattatatacacttagtttgagtattaggagtattttgaacagtctatatatagctgatatccttcctaactttatatcctagattccagttgacatatatccttgacttgtgttttgatcatttcaattgcatatgcagtttattcttgagcaactttgtaatctgatctgcccgtcaaaacctgaggctgtgtatatgctgatcttgaacaaatcacacacgcaagaggagtttatccggggatcaatgacaaaaaatccatattcgagtgctgagattggcccactgatgcgggatgtgaaaaacaagatttgtcagcagttggacctgctaggtctactggaagatgactatggcatggagttgcttgtagcaggaaacatcatttcactagacctgagcatagctcaagtttatgagctagtttggaagaaatcaaatcagtcttctacttcactgaccaactccgcactgttagcttcaaatgcagctcccagcagggattgccctcccatgacggtgacatacagacttcaggtttgtgacgcttttctagtgaagtactaggccaaagatgggttttgctcgcctttacttattgtttttgataaaagcggcaaattcatacaatattgtgtggttaaaatattggcaggggttagatggtgaagctactgagcctatgatcaaggaattggaagaagatagagaagaatcacaagatccagagattgagtttgcaatagcaggtgcagttcgagaatatggtggtctggaaattttacttgatatgatcaaggtaaggatcttaaactatcaatgggaaactgagattctctcctaggctcttaggcacttttcgatacacattgaaggagcgtaaaagaagaataattataataccaaagtagcttattaacatgtaatgtattcctatgcagagtttacaagatgacttcaaatccaaccaagaagagatggttgcagttcttgatctcctaaaccattgctgcaagattagagagaacaggcgagctctactcaggctaggggctttaagcttacttcttgaaacagctaggagggcattttctgtggatgctatggagccagctgaaggcatactcttaattgtcgagagtttgacgcttgaagcaaatgaaagtgacagcatcagtgccgcacaaagtgctttgactgtcagtaacgaggaaactggaacttgggaacaggccaaaaaaatagtgcttatgttcttagaaaggctaagccatccttcagggcttaaaaagtcaaacaaacagcaaaggaacacggagatggttgctagaatcttaccttacttaacatacggtgagcctgcagcgatggaagcactcatagagcattttagcccttacctgcaaaactggtctgaatttgatcagcttcagcaacgtcatgaggaggaccccaaggatgacagcattgctcagcaagcggcgaagcagaggtttactgtggagaattttgtaagagtgtcagaatctctcaagacaagttcatgtggagagaggttaaaagacatagttttggagaatggtatcatagctgttgctgtcaaacacataaaggaaatttttgcaatcacgggacagactgggttcaaatctagcaaggaatggcttttggctcttaaacttccgtcagtgcctcttattttgtcaatgctaagaggattgtcgatgggtcatttgcctacccaaacatgcatagacgagggaggaattttaaccctacttcatgccttagaaggagtctctggagaaaacgacatcggtgcaagggctgaaaatttgctagatacacttgccgataaagaaggaaaaggagatggatttcttggagagaaagtccgtgcattacgagatgccaccaaagatgaaatgagacgccgtgcattaagaaagagagaggagctcctgcaggtaaatataataatgattctctctcaaggaaactaaatgtgtaatttggtcttgtgacaatatttaccaagtttctcttttgaaacagggacttggaatgcgtcaagagctatcttctgatggtggtgaaaggattgtggtttctcaaccaattcttgaaggttttgaggatgtagaggaagaagaagatggattggcttgcatggtgtgtagagaaggctacaagctcagaccttctgatttattaggagtctactcttacagcaaacgggtgaatctcggtgttggcaattctggaagcgcacgtggtgaatgcgtttacactacagtgagctacttcaacataattcattttcaatgtcatcaagaggcaaaaagagccgacgctgctcttaaaaatccgaagaaagaatgggaaggagctatgttgcgtaacaatgaatctctttgcaactctctcttccctgtcaagggtccctcagttcccttagcacagtatcttcgttacgttgaccagtactgggataatctcaatgctcttggtcgagccgacggaagcagactccgtctattgacgtacgacattgtcctggtaagttaaaaattggttctgaaacttactaggtgttggccttcggttcaattggcagttggttaaaaagtgtcaattcggtttggttttaaacttgatcgggacttgattccaaacagctaatcaagtggctctgttgatttcgtttcggatttaccaagtgattcactgacaacttttgtttcatctgtagatgctggctcggtttgcaacaggagcttcttttagcgcggattgccgaggtggaggaagagatagcaattcccgtttcttgcctttcatgttccaaatggcccgtcatcttctcgaccaaggaggccccgtgcaacgcacaaacatggctagatctgtttcatcgtacatttcatcatcatcgacatctacagcaacagcgccatcctcggactcgcgacctttaactcctggatcccagctatcatcaactggaacagaggaaacggttcagttcatgatggtaaactcgcttctatcagaatcatatgaatcatggctccaacaccgtagggtctttctccagcgggggatttaccatactttcatgcaacacgctcacggtcgggtagcttctcgcgctgcagaaccaaccagttcaggaggcaaaacccaagacgcagaaaccttaaccggcgatgaacttctctctatcgtcaaaccaatgctggtctacaccggtatgatcgaacagcttcaacagttgttcaaacccaagaaaccggtccacatcgaaccaatcaagaaagaaggtacatcaagtggagtagagcttgagccatgggagattgtaatgaaagagaagctgctgaatgtgaaagaaatgattggtttctccaaggaattgatctcgtggctcgacgaaatcaactctgcaactgatctacaagaagcatttgatattgtcggcgttttggctgatgttttgtctgaaggagttacacagtgtgatcagtttgtgagatcggcgatcgataaagattgatttcgggaacaaggaagagctttatgtgttttatttttggcaatgtgtctcttgttattaatatttgtgattgattgtaatttagaaaattgtcgttgttgtaaacattgagacactctgttttgttgtgttattaatgcaaaagcacacacatattgctctttgtttaacctcgcagcacaacaactcgcacgatcgagtcttcggtttgaaaatttccacatttggttttggtatcatggtataacattttatgcaaatgtgtagattcggattggattagtgtacaggttcgaattttaatcatcaaaaatataagtttggtttattgagccaccgatgtttctaaattgaagttaactgaaaaataagtacaacttagcaatatctttattattattaattaacttctaaatagaaactctatctacttttatgagtttatggaaacactctaatctctcctaattaattagtgatacttaaaagctataacaagattatatttaaaatttgaaaggagaatcatatgtgtctaaaatataacatgttataatttccaagtactttaatatatgattaatttttcaagatacattaaatctataattactgtgatagatattcatataaatcatattggattattccaaaaaaaaaaaatactcttaaaatttgtttccttatttataaacaatacattaatgaaaataactccacatcaaataccaaaaagtaatttcaaaatcttgttttgtcaattcaatacatgcaaagaaacagaactaaaaagcaagaagaaaaggtatgaagaagaaaaaaaaaaaggaatcatacaattaatatttcattttaatgaaccgaatctggaaaaaagaaaaaaatttatcacatccgaaaagaggagaaaatgtaaaattatgtggttttggaattaaaatcgatattggttcggtttacattggtttagagaagaaagcaaaaaaacaaaagtcacgcgatgtgtatttcggagaggaatgcgtcgattgaaaaaggcatgatttggaaaggggtacacccacagaatcgctctcactcgctcaacgcgcactttgtgcgagtggatctgaaatagagctctctcattggctgaaaaactctaaaaaaaatgaaatagtatacatgttgctagctctctcttatgttattatgtttttggatcagtgaaccattgagcttaattagacattcagacccgagccacgtttgcagcattggacggaatctttctccggattttgagcttctctgcaaccaaagcgaatataagagaagagaagagaacaaaaaatcctaatgcgttaaacttggtgatgggctgaatttgaaggcccatcaaactagggtgactatggcctatgggctgttatatttattttctttcttctatgcagataagcaataaacttgagaatggcacgtcatgctgaatgcattgagccaccgacacaactttctttatgctcgtggagatcttaattgttaaatgtcctttttctaccaatattaatttcacttgtttttttttgttcacttgttcttcatttaaataggtttatcatcccgaacaagaaaatttattggactttttacactgtttattattttatggtcaaactcaatataaataaaccggcatatttttattgactttcttaattttttggtacggtaatcataattcttaaaatcaccacttaaatgcattttgattttttttattttttttggtaaaatgtgaagattttgcattttgattttttttaaaaaacttctaactaaagtgtggagtaattaattttgttacatttacgtgccattgttaattcttagtggatacgtgtcttctgaaacgaactatcattgaactaaatcttgatttgcaatccaagttgggtggtacatttaattggatcccctctcgcgttacgcccacctcagtcccaacacatttacgttcacacaaacccactatttatttactatcaatctacgtactgagacctaaatgatcacacttaaaacaatggggagttaaaaacaaacaaacaaatagaaactttttcaatggttaaactcgtcgcgtttgaattaattttctttgtgtttttgattttttaaatagaattttgatgtcgtggactagaaaatgtcgaaatcgtatattactattatagaccctctttaaatttgtcccaaaaaaaagaaagaccctttttcaaaatatatagttttcaaataaaaatcatttcatacattacaattctgtatatgatgagacttaaaaacattaatttcgctgtcgagggccttgcatattaagagcccttttctagacctataaccacaaactaatcaatcataaatacgttatcactcacgaaacaaaacaaataaagaatcgttttcagtcgacaacataaacttttaattcaatttgtacttatggtttttagaaattaatgtgtgtttctggttgtattttcttttgatttctaaaataatttcctaactttgtacatgatgattatacattagcaatctacatatgtatgtcagtatgtgtctatatacttatatgcacacacatgtgacatttctcaaaattgtaacttgagaagatagtaaaatacaaacaaaccaagcaactcgccaggtcacgggcctttgtctttttatcctcttttggtgaattttctcaattctcatattaactatgtaacttctgtttctgtgttttttgtccacaaaatctgctattggtaaagcatatagtataacgtatagttcacgtgaaggaaaactatttaggtataaaaatctttggatttgatggattcttatccatatatatatatatatgaatgaaaggatttggccatccaggtaataagttgtatatttatttgtcttcctcataaataaatctaagttttaaaaactaaaaatgaaactgatatgctacaaatgtatactctgatatgctaaaatgaattctaatttagtttattgttgacatttatacgatgcttcaaacgaaactaaggtaccgaattctatttaattatctttgttcttctactcatagaaaacatattattactttcatattttcctttgctttcatttttttcatattattacttacaattattatattttagaatatagtaagaaaacaatacatagttagataccatggacctacctattttgtaatttgttgaaaaatctatatgtccatgggtatcaacaagagagatccataaaactagaaaatgcctctttgtattcgttttatgtatgtttattgctaaattagtgggttcagcatattcgttccttatatataatacgaacaacaaaatatcacagtagtatatatttcaactaacaaacaaatgtatgaagtatgtttactaattccataatcactgatcaatataaaaaatgatatacctaagaatatttaaatcagtaatttttatttttttcttctgtttatgcgtttaatttaagtttggcattgagttacttcatcggttcaatttagtgacaaaaattgtttgagaaaaggacctatatatcgatgtggtttagctataacggaaattatatactatgatacttaacttcttataaaatactaaaatacaaaaattggatttggtaattagaatataattaataaacgatgtggtcaaacaaacttcaaaggttgactcttttcaatcctatgtaactttgtgaagaaaaacataagagtttggtatttgattaagataaagttactatacgtatataaaaaaacatcttttaaaataatatttgtgatgaatttaagtattttgattatactcctcatcattaatctttaagacttagttcaaatcggtgtagtatttgtttttgaattttgatgaatcaaatcaatgtaattggcaaaaacgaatccgtgttatattttaaagatattgttcccttaagagatattttattttgatcagtatatataaaaagatgaagcaaatataacaatgggttccaatttccaactgtctttacacagaaaaggttaacaaaaacggtcagaaaaaaaaagactaccgacaaaaaaaaagacagttcatttttttgttatattgatctttcgattatcttttgcacattcttgtcctgatcttcttcttctttcttcccagtttctctcttcgagcttccggaatctttggtgatcaccgaccggatctggacgaagaatctcgttaacaaactcaacaagcattctccaaagcttcctcctttttcttcaacgatcgtcattgcattgtaatttggagagtttagctacaaagtctgtcttcatcgaattaagatctatctgatttttctgggtggttctcatgtgtgagatttttgatgggtttagagttgtcggatatggaaggttcttcttatctttgatttgttttatatattaagcggcagaatttgaggttgacttgagcgagaatctggattctttcgaggagtatttaatgttcctgagaattccctgtttttgcgtcaagttttcatttttctgagtgttaataaatttagaatcattagtgcagcagatagagagagagtgtgtaaatctgaggaagactctctgtggatttgattcgtctttgtgagtcaggaatctgtttgatgaaattcccctgtggagagttttaggattttagaaaatgtgtaaagcggagaagtttctttatcacaggaaactctgggagatgaaggttaagtttctaggagatagtaagattgacaagcttaagaactccttggttttgaggtctcgtatgagcttatggatgattcgtgctatgactatattgttgctatggagttgctttgttcatttggttgctgtgggagagatgtggggacctagattgttgaaaggctggccttcttgtttcaatcaccatgacttccccattgctgcagaaatgacttctcttcccatgaaaatcgccctcccacctaaaagtaagtgtctttccgattatgtagcttagctgcaacaaacttgttttcagtttaaaagtagcggaaattttgatgctttttgttcatctcagggatatatcagaacaatggctatcttatggtttcttgcaatggaggactcaaccaaatgcgagcagcggtaagttcagaactaatcctcttgctttcttaaagaaatctctttttatttctgaaagctgtgtgtttctattcatgtgacttttggactctgttttctttcttcagatatgtgatatggtcactattgcaagatacatgaatgtcacacttattgtcccagagcttgacaagacctcgttttggaatgatccaaggttttatgccatccatcttcttactcggagtttattactgaatacttcctttacttagttgataacctctcttgattgcattttcatatgggcagtgagttcaaagacatattcgacgtggaccatttcataagttctttaagggacgaggttcgtatactaaaagagcttcctccaaggcttaagagaagggttaggctcgggctgtaccacaccatgcctcctattagctggtccaacatgtcctactaccaagaccaggttactttctcggttacaccaagaagaattcagcattagtcttttatgagatgagtcttcaatttactttattggtttctcacagcttctttgtacttaatacttggaaacagattcttccgctggtgaagaagtataaggtggtacatctgaacaagaccgatactcgacttgctaataacgaactacctgttgagattcagaagctgcgatgccgagcaaatttcaatgggcttaggtttactccaaagattgaggaattgggtagaagagtagtcaagattctcagggagaaaggtccctttctagttctgcatctcagatacgaaatggatatgttggcattttctggttgctcacatggttgcaaccgctacgaagaggaagaactaacaagaatgaggttaatacaactatctcttcttaattatataaaaagttccgacttttgtttcgtgatattgatgttatcattttgtttcattgcttagatatgcttatccgtggtggaaagagaaagtaatagactccgagttgaagaggaaagaaggtctttgcccattgactcctgaagaaacagctcttacgctatctgcattgggtattgaccgaaatgttcagatttacatagctgcaggagaaatatacggtggtaaaaggcggttaaaggctttaacagatgtttttccaaatgtggttagtacttggtgtctaaaattattccttaatatttcactcaaaagtcagtgaccaataatattttattttgatcaaaccaggtgaggaaagaaactctactcgattcttctgatttgagtttttgtaaaaaccattcttctcaaatggctgctcttgattaccttatctctctcgaaagtgatatattcgttcctacttattacggaaacatggcgaaagtcgtggaaggtcatcgcaggtgaatcattcattctaacttttctaatctaattgtttatttcatcaaagctaatggcatttaaatcacatataggttcttggggttcaagaagacaattgagctaaaccggaagttgttggttaagctgatagatgaatattatgaaggattgttgagctgggaagtgttttcaaccacggttaaggcctttcacgctacacgaatgggagggccaaagagacggctagtgattccaaataaaccgaaagaagaagactacttctatgctaatccatatgaatgtcttcagctattacatgagaataatggcaattcactagaagaaacctaatgaacagatcctccaatgttgtctttcgtgggggtgatgcaggacatggatggagttatctaatgggaatgatatatccatctggaagattaggtttcttaaagagatgagaagttatttagggttctttggtgtacagagatatctgaagagcttcagttgatgcagaagaaaggttgaagctttcagggtcatgtttgcaaatttgtcctatgccacctcagtcatcatcatccatggccttgcagttttggtagctaaaaagtaaaatgcagtgtaaaattatatcacacatatgattatcattattattattttacaaaataaataattattctattttaagtctcttggaatcattgaataaataaaatttagattgtcaaaaaatatataaccttaaatagaaatttatttataactcataacaaaaaatttgagtcacattactattgtgtaagaaaaacaaaaattactgtacgtttttacctttttatcgatttccttgcaatctttgaataaatttaattcggctgtatttcataaaattagattgccataaataataataaagaagtttatttcatgttattgcaacaaaggtccttatatcgaattctttgtccgttggtcccgaggcttttgtcgtgaatccagtctcaaccatcgctatctcctcagaaatcaatatagccgttggaagctaatgatattgagaggtagtcttcacggtacaaaataataaatacgaacacacatctcaaacaataatggaatttgtttgcgttcgtaattttgaaaagattaatattattgtgtttttgtaaactttttttgataaaaacaaaaaatgattttgtaaactgtaagaaaagtataatggtattaattattattagatagtgaagtcttggcaaaacatatagatgaacctacatgttaatgcagtcattaagcaataagcataaacgaatgttacaatttctaatctacatatacatttttgcagccactttgtgaaataaatcctggagttgagatttatttacagtggttgtcactgacatttaataattgtttttgataattagaaagaaaatctttgaatttaatatttgacaatcttcccaaaatctctccacattaactacacgattagttactaaaataaaacttccaaaatatttaatatcatttaattattacaaattatcatttttgatattgtttttctacatgactataataattcgattataatcatcaaaccgcagagatatttgatagtatttaattactacaaaattaaaaaatattagacaatgattcataaacatatcataaataagatcagtgagtttttttacggaacggattggcgggacgggtttgacaggacgttacttaataacaatcgtaaactataaaataaaaatatttatagataaatataatttgcaaatttttatatatagtaactttaaaaaataaattgtctccgcggttaaaatctagtatgtatatataagcctaagtagaatacattgattgaagcaaaccaaaaaccaagtagcagaatcttatttttgtacacatacatttatgtatagacctataggatcttttttctcacaaatattaaactgttatccaaaacaaaaagtttcttaaactacttaatttgccatcaattatgaattggagtccttttcctccctttcatacgtgaaggatagtcactcctcattagatgatcgattttctttgctgaatctgtggagactaggccttttcttgatcttttctttatttccgaaccgattggttttatactttttatctgcgataaaacatattaaaaataagaaaagtatgatgtatgtgtttgacaagaaaaagtgtatgctagtgaaagtttttaacgctaaacgaaagtttgattaaaagaaaaagttttgtgtacctttcgtcccatcaagggatgttcgcttccgctcgctataagaccagaatctccatatttggatccacctacatctatatttccacttataagttttcgagtacaacatcagcttcacatgttttacaccgtcatacgtctaagtatatccacaagatacacacacataactacgacatctatatcatttaactcataatatcactaagaaaaaaatgaaaagaaaactaagagttttgtgttttgtcaatatacgaaccttgaagcacatgaggaaagttcatggtcatcatcatcatgaggaagagaaaccctagaacgagtgtgattaacttcgcttttgtgttcttcatctcttttgtctttttcaatattaaggaagtgattaggattttaattgatgtgagtgaagctattatatataagggttatacagtagaagattttttgaaatccggaaagtgaaagctagggttttccgacagctccataggcaagacaaaaaggcacttctcatcggtaattgtaaacgctagcataaaataaaaataaaatctttccggcaataacatttggaagattggtcaaacaaattagtataaaattttataaccaattaatactccaattttctgctatcatttacaaataattccccaagttctatcaagtaagtttcaatattttatttattaaaacaattccctagtcttactcttacggttgtgtgtgtcgcagctctatctcaatcataatatagatgttgttatctttcattgcagagatttagaaatataatacgaattaaattacactataaaaaacaaaattcaaatggtatatcaaacaaacagtttttataagaatgaagtatgtaaaattatttaaagaatatcatatattcaattagatgggaaagtcgaaaaataaagaacctaaaatagtaaatccagaaagtcggtagttggtaccgacaaagagtataaattaaaaagacaaagattattcttgaagaactcaaggaggcatggggaagttttcatgagtttaagtgccctaaagtaacattggagtttcagttatattaaatctttgtttactgcttagggtttctaaacaaagtctctacttttgtagttccaaacatcttttaaagcatagatttgctaaaaatgcctagtttgtacaatatttaaattagatttgtacgaaacagtctggttctatattcttttagagacacgagggcgggtcctccgattcaatccttgtggccttgttggtgtgaatgcatgccactttagaattacaaaatatatgttgttcacattcgttgcatcatttcatatgtaatctttccgatgtggatagttgtatacatgtacaatcaaaccttagaaacattcaaagtacttatatgatacgatcagtcattggatacagtataaaaacatcataatagaacttttcgaacgttttatatatgttttacaaagttaatttacacttacttatcaatgacaatgacagccacgcagccgtcagttgtttttgaggggcttgcttctgggttttgggccttggtagtccctagccatcatatcgacaaatacttcttgtctagataaatcactagatacttgatctgaatactcaaacccgttcttctttttgggattgatcattttcaacgattcagtttttggtttcaaatcttttaactgcaagtgaaaataaatcatgacatcacaggataacacttgtatatatggatgcactgcattaagaacaaaatatgtaattactgaagtaatcataaagtactcgtagctgttatttgtgtaaattgtatatacctttcgtcccatcaagatatccttagttccgatggccacatgatcatatagatgattgtcacctcttgatccacctaaatgcatatatagatcatatcatatgcatccatcactatcacataaaacgttataataataataatgttttaaaaaaaaaagataacaagaggtcgaaccatgaaaggccaaaagaataatacttaagaagacaagcaataaagctgaggtcattaacttcgcataactccacttcttcatctctaattaatcttccggaagatcccaaaaggaagatatatatttctttacggttatgaaatttctatgtgagtgaatatcatctgttttggtggatgttagtatgtgtgtgtatatatagaaatagaaaattaaagtcaaaagctataaatttggttgaagaaaaagatattatatttaatcaccggatgtccaatgaccagtgctaattttttcactgatgaaatattctctccaaaattagttaaatgctacggtgaaaaacagaaagtcaaaaagcaattgttattttccatctatctgtctatttttagatgatagcaccaaattatcaactacttgccaatgatcattataaacagtactcattactgttaaaaattccatcaattaaccggaactatagaaataaaaacaagtgtccgctaaaaaacaaagagtagtcaatgcttgataattgcaactccaacaaccagccagctccatggatggcgccaaccccatatccgtcaaggaatcgttggtcaaagacgtctctgagctgaatataagaaaatgaacactacacttctcttcattgttataatatagtccatctgttaatccgggttatgggatcatttttagtactggacaggtgaacatacaagtggattgttagtccatcttttaatccgagttatggcaacatttttagtccatcttttaatctgagaggcaagaaaaagtttcatacgtaatatatgtctatatagaatggtatttcaaatttggtttgtatacgtagagttgataacgatttatattgaataatcagctttgaacaatttgttttttttttcttttacatttctaatagaaaaataatcgtaaaagatatgaaataaaaccagcacatactgaggagatttaccttatacaaaataaaaacatcataacatgacttattcatttgtttattttacaaagttaaacagtaaattaaccataatttgcccggtatcaatgactacgtactacgcgcaaccgttaattatggacggggggtttgtactttcgttgcccgtagtcccttagctcaacatatacttctctttcttgtacatcatgagatccttgatccggatactcaaacccgtttttctttgttggattgatcggtttcaaactttttaactgaaagtgaagatatcacgatatcactttccatgaaattacttgtatgtatgtatacacatcattattaagaacaaaatatgcggttggtgtgtcttaattcggtttagccattatttgtatgagttgtatatacctttcgtcccatggagatatccttagttctgatggccacatgaacatgctgatgatcgtcgtctcttgatccacctaaatgcatatatagatcatatggatccatcactatcaagtaaatgattatagatatggaagaaaaaataacaagaggatcgaagccgaaccttgaaatgccaaaagaagaataataaagaagagaaacaacaaagctaaggttattaaattcgcataactccacttcttcatctccattaatcgtcaatcgtggagagaataaagacttcaaaaggaaggtatttctttacggttttgaaattctgatgtgagtgaatgtcatatgtttttgtggatgatatatgtatttatttatatatatagaaaaccaaagtcaaaatctaaaatggttgagtttataaagttcttaattaacgtcctttcatatatgtaacaaaattcgataaatatacgtgagggaaaataaattgttctggattacagtatttgatttcggctcatttctcatcattatgtgaattaataatttttattaccaaataccatatgttatcactaattaagtaattatcacaaactgaatgtatagagctactacgtaccgatgccacttttcaatctaaaactagttagatgctacaatgaaacccccttgtacatctagtagtaattagaaaacaagaaaacaaagtcaaaagcaattattatttttcatgagctgcatcgttctgtccatttgaagctgattagcaccaaattatcagagctacttgccaattttttaagtataaaaagttaaaagagtacaagtccgattctgttaaaagtcgtccccagggaaaatacgtgtttgactttaatccttagatggataaaagcctaattggtctccttctttgggtgatcataaaaaaagggttaaggttttttagagtttgttcaagagcttatcaatacagaccagcgtattcccgcagtccggcttaatgatttaagtctaaaagcatttgctgatacataaagatgttgttttcatcatctcttttccaaaatccttttaataatgatgttggagtctcttggccatttttacataacatgtcggatacagccaaaaacaccaactgggttctactaaatcaaatatgtttaaggcttgatttgattggaatctgttcctgtctttcaactaatttgatccaaaataacagtcaacaaaccagcaagcaaagacaccaacgactaagggatatgattttttattattgaaacaaaaacgaaaaacctcaaaagagagattgtctcggtcataaatagaactacaccattcactatttaaataaactccggcaacttaaaaacgaactgaagaatcgccggaaaatttgagaaaagacaaaacaaaaacaaaacggagaagatagatgatatgttgagctaataaccaaaactgcggtggtggtttttttgctgctcaagctttagtgggtgggttaagctcatcccaagcttcaatccaagtgaccatagcatctgcaagcttgtcaaagtaaggatcaatggggcttagcttctccttcaccaacttggacagctccatgtagcattgttgaactgtcacagcttctttcgtgagctttgcgctctggaagaaaggaatgatatcctcctgccagaagattcccttgtactccttcttcaagttcacaaacgggttgctggctttgctgtggtaaatgtagggcaaacctgtcttcactcccaatcccaaatggtcacagatcacctgaagaacataagagggagatcagtaaacaaattaacatttaaattcattttgaagcaacgagtggaatggggaaagtaagtaccttgatacaccatccagcccacatatcgtcgtagcgaccaataggctgaccatcacccatgagaccaaagtacatagccggaccaatgagctcacggtcaaaggccaagttcataccacacatagggaaaagagttccctttgggatggtcatgacagcatccacatacctaatagtgatgccagttaagcattggtagcttataaaaaccggaaaaaaaaaatgtagacagaagatgttaaataaaacactaccttgtgttcctttccttaggcttcacaagttgggtaggggcatcgtaatcagggatgttgagccacagaccgtgggaaacagcggtggaaacaccctcacggagactgaaagggtatccacggacgaagtcagcaccttcacggtatgggtcgtacaaggtgttgaagaaaaatggagttgatgggcagagaaggttcttgatgtgttgctcaagagcgttcacagcttttccagatggatccttagcaacctataacacatgacaacaacaataatatttaaattataagcaaagaatattcaaatgcatctaaagccaacaaaaataagaaaaagagacaatacgttacacatgactaaaccaacacaatatgaaagcaacatcaatgctacaatcatggcgtaactgaaaactcaattctaaaaagaaagccccacaaataaagtttggacttttctttgccttaagccttatgaccacaacataaatgtgcaggacaatgacatgcaagaatcttgtgaagttaactgttaagacataacatagaaaggttggtccaacaacaatgacattacctaaacataagagagatcatggcaatgccgacaaacataagactaacacaatttcaattctgaaaacagatcgaaacccatcaagcagatgaatatatagatctaagtcaaaacagtgtgtttcttaaagttgacctagagaattgtgatcgtattttcaattttcaattcaaagatcagtcaaatctacagactttatcactagatctcaaactgaacctatgaagaaggaaaaaaagaacagatctataaacagaattgtggaaacttacgaagcaatcgtcatcaatagtgaagatgtacttcttcttggagaccatgtagccgaagcaacgacaagcagagtccttgaaggaaatgcaggaagctttaggaccaaggatacggttgatgtcgttcctgttgtagagttcgtaatcgaacccttcagggacagcaatggtcttcgatggatctccatcttggacgataatcagatggtaaggctgaagaaaaggcctccacatctccaggaaatcgaggttacggatcgtggggatcacgatatcgagctcatccttcaacaatgggatgtggttcaccggaattccaacggtgttcgccggctcaaccatgattggattgattcagagagaagagaatttggagagaaaagattgtgagatttgagatcggaggtgatgggagactctgaagaccgtcgctttggcttttatattagttggcacgtgagagggctttgtgtgagttttgacacgtggtggattataagtcgttcaccaggtcaaaagaatttttaaccttgttatggtgaggaagtgaagactttactattttgtctcttaattgtccgttttctaggctattaataatttgtcttattggtttagaaaacatttgttaattaatttcccataaaaatagaagcttataatattgtctagagattatattttagatatttatcaccacaaataaaataaaataattgtcaatctttttaaacagatacttttgaagaatatccatactttttgatattcttgtttagttattaaattaaattatcagatatacctacgaactaatatggatttatatatttcagttacacttttggttttataacttgttgtcaacagaaaaataaaattgttgtcaagacatttgaattttagaaactaacttattttggttaattaaaaggtcaaaagattcaaaataaatttgtttctcaaattttagtggtcaatattaaatttctgaccaacaaaaatcacaaaacctcagttttgatcatttattattaattatataattgtgaattttgttttgatttaaggctttttaataagttaaaaagttttgtttcttgttcgtttaggtttttttttttttgttatacttataatcagttttagacttagaggaaattgaacagtttagaatagtaggtctagctaacctctttttttttggccggtctacataaccttgcgaaggatagatctttcagctagcaatttaattcatttctgcttaccattgtttcttacttaaattagttacattaccatcaatgtacctcaattcgtgtgtgagcgtttttaacaaacaaaaaaagtcgttcgtgagaattaaaagatggggggatacaaaaaccgaacaataattgaatactttttgaccggagtgtaacatcaataaaggtgttaattagagaatgtaattaggctttttactaacgggaataataaattaaaaactgtcctcgatctactttactatgtatggaaggaacattcgcatgtggcattgtgggaagctgaatctcaaaacttattttaagttttgacattccttacacttatgaatatactatacgattttttttttatcatcaatatacggattagtacattgatgataaaagaaaccacggatgataactattaataattattttattatatgatgaaaatgattatgcatttcacgaaatttcactaaaaaacaattattatgaacaaattcattttgtttatctaataacaataaaaatcattggactttgattttatacgtcgtgggaaggtcgtcgaagcacgttgcgtttgatcattgcatgcatcgtgaaaattccactaaacatcgtcttttaaaaaaagaaacctttaaaacattacaaatggaacgtgaacctataaaatatgataggtagatctcacactttatttacagtattaaacaatatggaacattgacgttaaattattattttctacttataacaatttacacctcccaaaatttggaaaggataaacccaacaaggcaacaagtatcacaaatgtagctgaaatagatgggcttttaaagtttatggattgggccgtcatgaacacatattccataacataacctaattgggtgctccgacttcttttcgcgccgctcgcttgtacatgtcctcttcttcgacttccagataaaatcgcttcctctgtttttttccgatctaaattcacagctcatcgaaaatgggctcacggcaaggaccaccgaagcatcagaacaaattcgcctgggttcccaaagccggcgtcaagatcaacgaaacggtaagctatttgctcggctatgagattaacgaaattgagtgagtactgtagctagacccttgattttttcggaaatttatgaattgttaggaagtcggcgggagatttagaccattatccgagattaccggagtttgctaccgatgtcgagagcagatcgcctggaaacgcaaatacggcaaatacaaaaccctaactgaagccaccaaatggtatcgtttgatttgaatttagagtcttctttgtcattctctgttggattttgaaattgatttgttttgttgtgtgggtttttttttcttaaaagagcaacctttttgtttgtgggtgcagtcagaagtgtacaaagcgaaatgttcgtcaagcataccataagttatgccctggttagtgttttctttctttgcttttgttctcgtactttcttggctaattagagtgtatagatcagtatcttgttttataagttgatgtgttatggtattgaaatgggtatgaaactgataacaggttgtgccaaggagcaaaaggtgtgtgcaaagtgttgtcaaagtgttgatcaaatccttggaaggtacttgtaccttgaagacagtctttcttctacttatgctagatgctggtttccttaagagtgggtttagtagacaagatattaaactaatcttgaggtaattattcgtttctcgcagagatatttacgaagtagaggctgaacagaagctgcttgatgaggtttgtcttttaattattccgcttttggcttctaatgttcaatttcatgcttgtttttgggaggttgttgctgatttcttattgatgtgatgcagactatcaagaatgctagggaaagagatcgaaggaccctattacgtgctgtaagcttctctagttactttgaagagtttttgagatttgtaaatgtgtatgtttgtgtgatttggtcctgaagttgcgtatttgcttgacatagatgaacaaagataacaaaccaaataaatcagatgaagaagcgtcaaggagtgatagcagcaaggttggtgatgtgtttccctcaacttcccttgaagaatatgcaaacaagtccggaagagttagcgggattattggtcatggtagtgtgcctgatcatgcccatgatgatgctagtggacctgaatcagatgaggatgacaatgttggtgatgatgagcatgatttgcgcgaagacagtgatgaaaatgagcaatctcaactgcagaaataaactcatgtttggttgtactactgtcaatttggtaggattgtgagattttgcaagactgtttattcctgttgttttgataaaacttttacttggtcacctgcaatgcaagactagcaaagaatactataaattttgttctgttttcttgtatgggacgggcttaaacgggcctaacagtcgttctttatcggcccactttaacaacacctaattgtctagtctagtagtagtattctctagagactttcaaaaagtctttggattactaaatagtaaatgcgaatataagtaaactataaatgtgaataagaatgtttgaaattgaaaaaaagaattgctagctaagtgcattaatgcttgtgcattaagtcaaattataacacttggcacgaaaaaacccatctcatcccccactaaagcagccttcttttggctttcattaatctctctgcacacaaaaacccaaaaagctggatgtctccattttcaatgaacaattatgagttctttttttaaaaactcattatactttgaagattaatcacaaagatttcgaagctaattcgtcatttcttgttactataatcttttcattgttattaatcactttggcttaagtttctgtatattacgtcgagcttcttcagtcttcatccttgtcttgtcacttgtcagagacagaagattaaagaagaagaggcgtttctctctctttttttgcttcagaaaaaatggggtttttcttgtgttcctcttcttcaatcttcttcaagttcggaatctctataatctttctagtttctttctctggtttaactccttcaggtaagccgaaagattctatctttattcaagcttttctctgttcattaccgtattttacttgctagggttttatttcgtcaatgattctgagtgcaactttccttctttgttccccatgttttagttatgtgcatattttaaaattatttgctaggagcttgtgtttattgagttctttaagtttggatcttgcaattgcttgagcttttgggtacatagggaaagagagaagaaagttattttgtatgttaagccgtataattgttttgaaggagcttcttatcctcaaaagagaagatctttttgacattttcatcttcaatgctctgttattatagaaagagagaatctatgagataagaaaacaaaaaaaagcttcagtattttgtgtgctcatggtgttgcttttgggattgtttcagaagcttatgatcctttggacccgagtgggaacattactgtcaaatgggatatcataacctggactggagatggctatgtggtatctatttacattagcttcaaatttgggaatttcttgaatcttgatagtgatttttaaaatcttgaatcttctcgcggtgcaggcgactgtaacggtatataattttcagcaatatcgacacattcaagctccaggttggactcttggatggtcatgggcaaagagagaggttatatggggaatgaatggaggacaaaccacagaacaaggagattgttctaaattcaaaggaaccattcctcattgctgtaaaaagacaccttctgttgttgatctcttacctggatctccttacaatcagcagattgctaattgttgcagagggggtgtgcttaactcgtgggctcaagatcccgcaactgctgtttccgctttccagcttactgttggacaagctggaaccacaaataagacagttagggtacctaagaatttcactctcaaagctcctggaccgggatatacttgtagccccgcgaagattgtaaaaccgactagattcatcggtactgataaacgaagagttactcaagcattaagtaagttactcagttcttgaactctaccaaaacaaatttgacttttgagtgaaatgaaaactgagttttggcttttctttttctgctgtgacagtgacttggaatgtaacttgcacatactcgcagttcttagctcagaaaacaccaacttgctgtgtatctctttcatcgttttataacaagacaatagtttcttgtccaacatgctcttgtggatgcagaaacacttctcagccagggaattgtgtagagtaagttcttctcataactttcattacctgaaaatatgttaacttgtttggttaattttggtgtcttgtctgtccacacagcccaaaaggtccacggatagcatcagtcattccaaatccggggaagaacgcatatataccgcctctggtccaatgtacaaagcatatgtgtccagttagaatccactggcatgtgaaagtcaactacaaacagtactggagagttaaagtcaccatcacaaatttcaactacaacatgaactattcacagtggaatctcgtcgtgcagcatccgaatttcgacaatctaactcagacttttagcttcaactataaacctctgactccttatgcttccataagtaagtacaccatcatctatcagtcccttgtttctatagaaaggaacaaatcttgatgtgttttttttgtttttgatttgatatagatgatactgggattctctggggaataaagttctacaatgatctgttgatgcaagctgggccatttggtaatgtacaatctgagctacttttccagaaagaagcatcagctttcacatttgagaaaggttgggcgtttccaagaagaatctatttcaatggagataactgtgtgatgcctcctcctgattcttacccttggctgcccaataccggctcgcacaaatcagtcggttccctgtttgcagcaatggccttgttactgattgtgttcctacatggaaacttgtaagaatcatcaagtgtagaattcttctgctgcagtttttcgaactgatataacccatcaagagagagttggtagcttagttttttgtgttctctcttgtctgtcctcttcctgtacaacgctttaatattagatggttaactagatccccttgaaaatggctaccacttctttgttctctatctccatgttgggaagtaaaagatattcagtataaacttttgaaatagtgtgtagcatcaagttaagaaacattactagcaaaaaataatgtataggaaaagtctccgcatatgtttcagggacaaaaaaaagattcaaagatcaaaaaaaccctgcagccaaatacacagagaaaaagctttaaggaagacaaaagattcgttatagaattgagcttctctggggatgaaacggtttttcttgatagctttttcaacgaacactcaagccttgaatagctgcagcagatgatgatgatgcctgagaaccttcctccgttaccttattcgattcgatggtagttatgatacttgaaatgttgtcctacacaaccacacataagaatcagattcaggagatgttttgtaataaaattctgtaataagtgaaagcttttgtagttaccttccaagtcgcaagctttgttcggagagattgccattgctttgtcccaaattcacgttcggaagagcggctgtaagatatgaatcaaaccatcaaataatgaatgttgcgtttagataagtgcagagtttcaatagatgtgtgacttgcctgacaattaaaacttggttcatctgatccatcttacactcaatcagttttgcagttattgccttcacgatccataactcgacatcctgttcatttacctgaaaacgaaaagaaaaatgagaaactaaaagggtctcaatatttcatgttaagtgcaagcagaggagagtttttacctgaagagtgtctttaatcgaggtgtaaggtattttgccagattcatctgaggccaaatccactagtgacaacaacctcatcttcgtaacacaatcttcattggaaagtcctagaaacaccacaggattcatcaggagatcatatttcagcaaaaacagttagtgagttaacaatgtagtaccatagctttgcagaaatcccgaatttgcattttggaattccgtgtaggcatttaacctctgagtaagaaaaatcttcagaagttggtaaacaggtgcatatttagcatccttttccaattgtgctacggctggcaagtccaataaatcacactgcaagatttaagattgccatcgttgaaattccaatcaaatataaaagagcagtgtcaggacaagaaagacaaatccaattcacattatgatacctggaaaatactggaagctttgacaaattcgataactgcacgcacagcctcctccttggcttcatccaggacctgagcatcctcattggagaaagttgctaggtacttcgtcaagaacttaagggattcattcaccaagctggagtattaatagaaaaaaccatgaggctattgttatacccaaacggaaacaaaaaaagaaagagacagagaatgactgatgagcatagttataaagtataaattatgtttcaataccttttgttttctttcagcacattagcaatggcaagaaagagttccctctgatctttaatgtcaatattccactctttcagaaagttatcgatcttcttaaaagaagaaactatgtactcagtaaccttcccatcaacagctagtgtaagagctttcatgtatacttgaaatcgagcatacgggtggtcaaccaggttatagagattgaagaggctacacaaagattaagacaaaaaaaaaatgagaagtgtgataaatgagcaaagcattcagaaataagcagaaacgattcatacatcttcaaacgaagtgaagctttgtcactgggttgttgagcaaccttggaagctatagctttcaccatttcaaggacttgctcagggcttttcgcattcttgacaatgctgcaaatgatggtgtaggtacactcaagatctgaattaaaaaaagatgcaaatcactgagaattgaatactcgaaagacatacaaaataaacaggtataagtaagaataggaacacaaacctttctcagatatcttagaagataccaattcagctgaagtgaccattaacgaagacaattcaagccacttctctgctaccattgactcctcagcctccctacagagcctggtaatttctggctctgctgcctaaaatttgaaacgataactagttaagtacaggcaagccttgaaaacttaagaagtcgcttaatgaaactaatcttagatggttgaactaatcggatgcatcagaatcctcaaagattacaaactattctagtccagaaactatcaacaaacccttccataaccaatcagattcttcgaacgaaacaacatataccagatcaaatttcccatctcacttaagatagacattcttaaattcccactataaattcacaaccaaggtgtggaggttacctcgggaccagcatcggcccaggcgagctgggaagtgaatcggacaacagcgagaaagggattttcttcggaggtgggaacaatcgtcgtcatagcttagctccggtttcgaatcttctcggctgcgctgaagaacaaatgcaccacaattacaacttgtttcagcagccgaccagcagagacaagagagagagaagaaaatgaaaccctaaatctctatatttttttcttttccggttaaaggtaaccggaaccgaatacgattcctaaattaacggtttacctatctgacggctaataaattatgagaaaactccaacggtcaggattgagctctagtccacaacccttataaaaatcgatttcttcctcagttaacatttgagaagattagggtttaaacgctgccgtgttccgccggatcgccaccgttgaagtcaagatggtacttttactctctccctctctgtatcctttgttctatctctcttaaatatttccttcgcctgatcgatttcatggtctctgatattagccgtcgcacaagtcgttcatgatcaaaaagaagctagggaagaagatgagacagaacagaccgatccctaattggatccgtctccgtactgataacaaaatcaggtttatagattttcgtaaacttttttcattcgatccgtgaaaaagttgcagactttgatactgagttccattgttccatcaccttcacacaggtacaacgctaagcgtaggcactggcgccgtaccaagctaggattctagagcactctcaccgtgactcagattcgtccgagtttcttaattgctttcttgtatcggaattgtggtctttgacccctaaaagttttagttttttgttaaggattttgtggcttatagctatgtttaaatcttagaacttgaagaagagtgcatgattatgaattataatagttgaatcctttctcctacaattggtcgttgatttgactctgtttctttctactctatgataaaacgtaagtatatggctgaattcgaatcatttctcctacgattgatcagagctttgaacatggctgattcaacgcaagatcttgtgggcattgtttgtttcatttgatatagatctcttggttgatcagtacttagtttattttcttggaactcttaaagagaacattgtctgaaaattccttttaacaagacaaagaagagaacaaaaggcaaacatcacaattgaatcacacagggttcactaagggataaaagccaacacttttgatgatttacacgaatctgaatagtgggaaaaaaactacaagtaacttcatttgtttccagatccagcaggacttggtcctccaaacagataatcaagagaagatcctccaccaggagctgcatgaaccttagtagatggcctgtcctgttctcatcaacaaacatttttggtttttatcagtttccaaatcaaaagtcaattctttgatctcaaaactttgtaaagactaaagatctcctgttaccgtgagaaagtttccacagttttggccttctgatctgaagtaattattaggacttcctctaacacctgcagatgtcttcttgttatcagtgactgtggtcgtcgtggtggttatcggtctgcctccggtcccatcggtggtagttgtggtggttgtagtagtagtagtccccattgtggcagcagcagcggaagaaggctggccggaaccaaaaagataaccgagagaactttcattcacgccattgttcactcctcttgctttacccatcttgtcaagatctgaattttgaaaatgttttattaagtttgtttatttatcagatcagatcagatcagttaaatgtgagcaagaagatcccaaaaaagattatcattgaatcattaaagacacgtaataagagagatctaaaggattgatttttatttacctctctctgtctctgtagtgtatcttctgctttctctacttcttgttctatgattggccgataatcaaggaagagaaacagatggaatatggatatgcaccgagaggaaaatgaggaacacaaaaagtatctcgaatgggcttatacgggctttgatttgggcttttggtaattccatagacatagaacaaagtttcataggttgtaggaataattttgggcttatgtaattctatagacatgcatgacgaagaacttttttgaaataacatgcatggaggaggcaatttctaagaagaagcaaaagtaggcgagaataatgagacgcattttcatttgataatttctgacacgaaagaagaaacttaaccacattgtgtgaacccatgactttgaggatcatgcatcatcagagtttgtacgatttcatcatcctacggacgagatttcctcgttgacttctctgaagattttaggtgatgttgaaagatggcaatgacgacacatgaaactgaagtctcaaatctccctttgaatctctcttttgcttttacattttgcgccagttcttcttctatttttaattagtacaattttttttgttaaagtgtgattcctatatcgtttacatattttatatatacgtgaatgtgaatatcatcatcaattaggaatgaaagtttagtttacaaaaacgcttttaaggcagaatagttgcttgccaacgaaaaaaaaaaacaatctgttactaataagtttgtgatctttagtcatagttttttttttttcaaagcatgttcaatgtgtagtgtgggctagggaagaacattcaatatttaaaatgttaaaaagtcaaaagaaaaatcttctgtttctttcattacatgacattgattatcaattttattggcaaggataataagaagataagaaaaaaagaaaaaaaaaagttctagcacttgttatcggcagagaaagtatatgatactcttacatggtttccatacttcatcttttgtaattgcagtaccccacattttgctgtgtaattgtgcattttattcttttcatattatggttacattctttttcccatgtgttgaacaaaagtattattttaaggaaatttcgagaaaatgagattttaacaaactccaaggtacatgaacttgagagaccttatgggtttagagagttaaggcccatctgattgacgcaactcaataagatttttcttctggtatattggaacctaacgaaatatataggagaatagtattagtacgtatattggaaccaaataatatatataaaatatgagtcagtctctttgttaccaaatattcttgagctcgaaatcataaaccttaacatttacgttttggtgttaactaagaccaacgtcaattaaagaccgatgagcgatgacattacaatagggactgttattggaactttttctttttattttgggtcttccctaatattagatccgtcgcatgtgacataaattttaatagttataactaacgtaatcatgatgaagaaaggaatcttgactaagctcctcatttaactatctaaatctttagtgatgtatagatttaataataaacttcattgtttttaggacgaaagatgaatcattttcagcttgtagtttgttacttttagttttctaaaagcacatttaagtaaatagtatagagtataattgatgtctatacaagtcagtgaatacaaatttagacaaatatgtgggcataaacaaagccagagaaatcgtactaatgatttgtgatacgttatttttcttataagtttttttttttttttttttttttttttacttcttaggcattaatagaagaactatataaaattactcccctgaaaagaaagatcattagatctaacgaacaaattatgtatgacttgaatgctcttatatctatcaaatgtttgttattaaaactattataaatttttatacaatgatatgtgtatgtaaaagcataattatgcaaaattgcaaagatgtgtatgtaatgctggcagtcaaaatcaaagaagagaagccccacagaaattaatggtgaaattaaacaaatgttggatgggtgggtgataagtgggatcatgtgccaataattgaactagataacttgaactttgaaacttaacgtaaaagtatacacacttaacttttgattgattttagtaaattctcattagcatttaaaatgcattttgcttagttggttccctatcaaccctaacactcaagtcacatacccaattgcttcatgtgatttggttcccttttctatctttgtttttgttccctttgtcttttctttttcactagtctattcttttcccatttttcctcttaattttgtcctttatttttctttgattacgagattatagattaatctcatcttaacgggtgaagtatgtttggtgcatttcatctacacatatctttatctaagaaaaaaggtcatataactggtcaaccagtttattctgaaggttacatgctatttatagtctttcgaagtgtatatctctttaatctatcattcatttcacagtttaacattttaaccacgctgtttattactttgatgcaatcatgaaaccatctatatacacaatatcatccaagaatcgttataagatttattcgcagaaatgagtgtcaattagtaataatcatatatgtgtttatcaacttgacactcaaaagtttttccccaaaaatggtggctcatctctaactatgtacccacacatactctcgtttctaaaacagtgattagttaatctttggtaatgataacaaaattgtttaaacacaagcaaccaagagattgcatgaagtttacataatacatttgcagtaagcttaaataaggttatgctagctataatctgttgttactcacaaattgttattagtgcataaaattgaaaaacgacccaagaattcaaaccatcaaatcatacataaaggtaacgcgcttgaaattgattatggtacaatatttgaaagcaaaacctaatacccatgtgtaatagtatattcctcggtacttccaaggtcaaatcaattaattttgtttttttatatgaatagcaaacaatatacttgttatgaaaaaataaatagataagaagtcacaaaccccacctggttcacagcacattgtggaacaaagcacgtgatatgcccacaagctttttgtgattagtacatctaaggacataaaccctcaaatcaaccaagacaaaatactaaaagacgacgacgactttattccatatatataataattttcttcctcattttatatgccagattccttaatgttgaatgattcacatgcaaaaagttattacatcatcttaagcactttatttaatacattaagcaaccgactaattgtttttaataatcagaaagtaatgaactttttgatctaatcgtttcttcagtttgataaccaacttgtggttttgtccacaacacttaaaacatcatccactaaataaatcactctactattcgattagggatctaagagcgctgaaatatcacaatctttaactggttaaagtaattatgcatgcctggctataaattcattattgttatattgatttgacgcatactcttaacaacaggaaagagatgtatgagtaaaaagaaccttgcacaataatgtcttagtagccatctaattatagaaataggttcctttcatgatatttattggtgtttaatcgaaagaatcaaacaaatgaagttggcttattttttaatatgagatcggatacagtttccaataccaaattcatgtatgtatatataaagtagaagatgtagtctatataagctgtgtcgacatctagaatcgattcttacttaatataatgttgaataacctataattcatcttcacctagtggacatagttacaaacacacattaatacacgacacattatccaaaactttgaatgtggttttttaatagccactctttaataaactataatttatgacaaaccatatttagtgtttgtggatattcacaaaaatgtggtccttcgtatatgcagaaacttgaatccatattttgctttaactgtttaacttgcatttgcatatgcatgcattattatgcatcagtctctcgctaaactattgaagtctatgaatcaaagtacccaaaattaattattttcaataactaaataatattgacaaatttaaaataataatatcctagtttgaaagacccaccaatctcagaccatgcaagctttcttccagttcaccaatccactttcccccctaataatttattttgattttatgttgccattagaatacaaattttatttattatctcttattatcctttaagataaatatatgtattatcaaatgctgtgtgttcctgacaaactccacatgcacatgtaaaagaggcaccaagacttataaagacccaccaacattattttgttcacatggatgtgtaaggctaacttagctaattatcaaaactcatagataaatatttttttttttgctaaaatagataaaacttctaagagaaaaaaagagagagtcatatttggagagaaaaaaaatatgtattataaaatgtatcaatttctcattcattgacaatttgagataaatcaatgaatagataaacatgcctaacatttcttataatagatccaaaatataaccaattttttccgaatttcaaaaagcatttaattttgttttctctaaataagttgccttgtgctgtcatgtgcgtaactatcatcttaggagatgaaacagattcctcattatttggcgagcagaatttttcagagctctgacataattaaagaatatataagattactagtgtatataatactaaaatacataaaatctcatacatgtataaactttatatgttaacacatgtacatgcattacattatatatgcttcaaacttcaaagcctcctttgacagttgtatctttgcctttaaagatagaaacctctctctctcaaagaccaaaaacaaaaaaaaaactttttttttttcccccttctcttctttcttcttcaaggtagcctccaagccaaacacggaggaacctaatctgttgtctgctcgtaacttcacaagaagctataatttgtcgttaatgttggcttcttcttgtccatttcttcttttcttcttcctctgaaacacaagaaaaacatctttaacccctgagcagagtaaaaagacgaagaaactggtaactccaaaaaacagagtatatatatgaagagaaacttgagtttgtgaaagtttttttagttatcttgtttttgagataagagttaagtagaggaagaagatatgtctgcaaaacttctatataacttgtcagatgagaatccaaatctgaataaacagtttggatgcatgaatgggatctttcaagtgttttaccggcaacattgtcccgcgacaccagtcaccgtctccggcggcgcagagaagtctttgcctccaggtaacttaaactctctctctcttctaaatctcagttgagtgtttaggaccacaaagaaacagagtagtttcactagaaccaaaaatatggttataggcttatagctaagaacaaggggttaacttttgcaggggaaagaagaggtagcgtcggtgaaaccaacatggaaagtgataaagaaacggtaagaatctgaactcagtttatttactcgtctctaaagaatgagaattcaggaaacacaaactgaaagaaacagagacttttatgggattgcaggagaggagtagtaccaaaaagaagaagtctgcagcaaaagagaagcatagagtctcttttgaatcatcttcaagaccttcattttcgtcttctccacgctcctctagcttctcgtctgcagaagtcagtaccacagcttctcaatttgaccagcctggtgagaatctgatcagagaacagcccaatggtggcttgatgatgccgtatgatctaaaggagcttgtcaaaggctctattaatagagaaattagaactagaggtgaagaagcatccttcactcagcagcagcagcccatttcagctcgaagtagcatgttgcttctcaaagaatcatcattgcgttcaccatgtcggagttctaatgagtggaatgaaggaagaggagcggctatgaagtttaaggaaagtcaccggctttcttatgatgagagggagatgagaaacaacggattcagggtgggttcaaagttgaaagagacaccgaggttgtcgttggatagtagatccaattcctttaggagtccgagagcagatgctgcgagatcgagttgtccagaggaacccgcaacaatgactcacaggagatcgagttctagtgttgttgccaaattgatgggtcttgaagtcattgcagacaattctgatactgaacagagaagagagaaccggttttgtgactctccaaggccaatgtcccgagtggaaccaacagctctacagagatctagaagcgtagattcgatcaagaggatacctgcttcagctgcttctaagtttccaatggaaccagctccatggaagcaaatgaaagcaggagactctgcactgacggtatatggtgaaattcagaagcggcttacgcagttggagttcaaaaagtcgggaaaagatctcagagctcttaagcaaatacttgaggctatggagaaaacgcagcagctgatagatgaaagcagggacgacggtactctgagtacaaccactcttatgcagagaactcacaagccagtttcagctgcaacaagtccagccaggaacttcaaatcttcatcgatcgttgttatgaaatctgcagctccagtttccacctctccgctgccacagaatgtcaccctaccaaatgtcaaggttggaaactctagacaaacccggaaagtcacctcagggaagcagaacgcaatggatttaaccccaaggccaggcctttacaagggccaactcgattccacgaagagcaatagcccaaaaacagtacggtcgaggcaagctttggctgcagatgctggttccatgaccaagtcaggtaggagccaacagcacagtgtcagcccaagaacacagccaaaaaagctcgggttcgagaaacagactcgacccacaactccaaaatcagagccaggcaaaaggcaactcggaaggcagcaaacagaggtagcctctccgagaagaaaacagatgataaaacctcacagtactcttcagcaacctgatgaccgattaagcgatgcaaggagcgacttgaggagtctaaggtctgacagcaacataagcttgggatcgaatgttgacatcgaggttacaagcagacataggctggagaggaactgtgacttcccagagcagcacacccccaaacaaagggtactaaatagatctctatctcacgtatcttcacttctcaagttaattcattagtactcaataaactgaatctcttctgtctaccaatgtagagtccagactttggaatcaaacaagacagaccgtccctaaaacctctgaaagttaccgttgaacaaccgagccctgtttcagttcttgatgcagtcttcgacgaagaggattcaccgtcccctgtgaggaagatatcccttagttttaaaggtgaggcacttagaaaagaacattcagactgattagtgactcattcatatatactaacaattacgtgttcacgatgcttattaactacatgtattcacaaggttttggttagtataaagttctcaccgtgtttttgttctcttgccacagaggaggatgccttacgttctgaagaatctgagtggataaacaagcctaccagcttctgcagatccgtaccatttcctcagagtaaccggggaccaatgaagccaagttctgatcattttgaatgctcacctgaagaaggtgcagacttcaaaagcggcaaccacaagtacatcttagagatattgttggcctcagggattctaagagatcttgaatacagcatgataagctttcagctgcaccaaacgcgcctcccgatcaaccctggactgttctttatcctggaacagaacaaggccagtaatgtgactctaccggacaacaaacacagaggtagaggattcagacaacagcagacaaacccaacagagacaatcaggagaaaactcgtcttcgacaccgttaacgagattttagctcggaagttcactgcagaaggctgcatcaaaccacgtttaatcgcaaatccacttaaaaaattggagaaaatatcaaaagaggagcaacttctgcagactctgtgttcagagattgataggttacaacaaaacaactcaaactgtatcttggaggacgacgaggaagacatcatatgggaggacctgcaaagtcaaagcatgaacttgaaggagtttgaaggagagactccaggaattgtgttagatattgagagaatgattttcagagacttggttaatgaagtttgcttctgctaatttttttaaggttatcagttatcacttagatttgtaaatgaagttatcttagagaggaagagaacctttagtctctgggttttcagccctcttgcctgttctgttctcttcccacttgtttgttgtaaccagcatatatatacaggtctaattaataaataacagtatttaagttcatagataataccaaaaagtgcaaagagcatatttattggtctgtcaaactaatatttcactgcaaatcaagttaaatgccaaacaaccatctatttctccatcgttttgaattagtaaacatttcttaccctaaaaagtaacgtattccagttgcaaacgatcactaaactcaggatgcaaagctattttgtctgcaaattctaaaatgacataatacctattttacatctgagttgacaattgcgagtcaattctttcacgcttttctttgatttctgacgtcttctccctcttgtcttcaccttcttgaaaccaaccctcttcctggaagctccgattttttgccaaacacatagatctttttgtagtccctatcttgaaacgtaccaaagttagttcttttcttgcaacatctaccttctctacatcctttgatatagctaaccagttcttgttgttgattttatccgatggagcagatgcctcaagaattgggatgtgatggttgttcctcacatgcttatcaggaacgtggttggtcctaacaacttcatttgaaagctccaaagggcggaccacaggtgacacatttttctccacaaatcgaagaggcgcagttagaaacaggttaccttcgactactgcttctgttgattctccaacatcctttgaagatttatgtatttctaacctaccaccaccatcgaaagaaagttgcatactcggtaaagatgaaccattttctttactaggaatttctccttcgattgtggctgcattagtttcctctgatcgatcacacaattcggtttcgggaaatgcaggaagccaaacaggaatgtgttcatctggaggttctgctccaacctcagagaaactaggagcaggttttttctctttactaaatgggaaacgaggaagagagtaaacaaacggtatctcctctgcttctccagtataacgaatgatatccttgactacaccggaatcagcaagacaatggtcagtatcagaaacaccagcaaaacccaaaccagatcccaaatcctctaatgcttgaagaatgtccagagaattaccatctactctaccggctaagttagcatacaaatgagcagtcttcccaatgctctgaatatactgaaccgcaacatcagttagtgtatcaagagcagattcttgaaaagaactaaacctcacaccctcacgtgtctgtgattcctgatacgggttaacctcaacactctcgcatatctgagccactgccattctcgctatggaaaaagcgaaatcattgcctcggaaaagctttctcttaccatgtaattctctttgctgacttccaccttccccaactccattgttcatattcaaaaactttgttacaacttcacccaacataacatgtagaaccatctcttgagtgaaaaaccaacacaacacgtatccctctcagaacacaaaacaaaagccaatatctttccctcgaaagtcttctcttaggcacctaagaacaaataagagagaataaaacatcagaatcaattttatactaaacccaaaagtgactaaaaaacgaagaattgaacttaatgaaagatcaattttgttccggtcactaagaatagacgtttcgggttcaatttaaagcagtagaaagcaacaaagcaaactcgagagcgagagttaacgaatccaattaagagaagtaaaatgctttaccggagaaaaagctttatccactgaaaattcaccggggaagaagaacagacacaacttgggcagctatcggcggcgaacacagtgagagaaaatgctagcgaagaagtgaaattgaaagcaccaacaaacgaaattgaggaaatttcgcatgcgaatcaaaaacccagctccaagtttaaaactttcgatccaatttgagaaggcgaagaaaaagaagggtgggagattttccaagtttgagattttcgttaactttatagagaggaactactgagtttttttaaagaaaattaaaggcaattactatttttttcatttttaaggaaattaaattaatctttattataaaaagaattatttattttcatatatagtaagattaagattattacagcgatgatgtaataattagaaaggatacaattatttgcgttgatgggctttcaggttatcaaacagaatttcaaactaatgggtcttagtggttggcccaacaataaaaagacgttacaaaacatatcaaaagttcaaaaccaaatcttgtttgatacagtatgtttttaatttttagtgcgacttaataaattcaaatttcgtcatttattgtcctccgtagtttagtttgctatcaatttttgtgaggttggaacgtaaaaccagataattcgaattaatatatatatatatgcatgtagtatgatagctagagatcgacatggaagctttttgcagaaagtatgatgatatacgacagagtcacagagcattggatcggtagccttttactcaaatcaatcaaagatcgtacacacaacattatttagaagcttttgtctctatcacccctataataatttaactaatttttcttctttcttcatttattaattcttccttttttacctcctactataaatattaacatagcatgtacatatgtaatttgcattttagcctaactctttcattggtgaacatgcatgtgatcactattcactactacacattattatcgagaccatttagcctagctacacatcttaatttttatatgggaatggcttctttgcatcttgatagtttacttactatgctaataagattttaaaatgggcacttgtatgtataataaccattcatgatgaatttctatttgataatgggttcaatatatatctgcttcacatgacatagtaatgttaggtttgtttgggttttgtggaatctccacttatatcatcatctaataatctatctagctacggtcacattgagttctatagttgcattgtaccgtgcatccaatagaaacataatacctcgataacagatcagtataaattattagattcaatttcatattattacgttacctattgatgaatctgatttttttttttgctaaatatttgatgaatctgaatgtaatttagcttctcatctcaaagtgcatacattactatcagatacttataatacatttcatgtatgtttgtgtgtattcagatcctatgaggaagctatatatatatatatacatgagaaagtttcaaaacacatgctaatagtaaattaataaatcaatttataacattaatttgtctattaaaaaatatatcagcaaaacatagtacaatagtaattaccttatattttgttttgtgtccccttatttctgaacacatcaaacaacaattatatcgtttcaataatctaacttcacatatggtgatcacttcctctacttgtacaacgctccgagcctagatgcctcgacatgttagccgttgtagtgctattagttcggttgaattggaccgacgacatccgattatcaatgtctctaccaccattgttgctactactaccatgtaacaacgaatataatgtcgaaatgttttgggaagacgaagatgaagaattacccattaatggcatttgaaaatggcttaccatttgcctcggatctaatgtctccatagtccctgaaccagctgacgatgatgatggaaacaaagattgtatagttgtagttgttggtgatgtcgtcattggacataccaaaatttgtgatggaaatgggacaagactatgtagttgatgactatgataatctgcctgtaaactcaaatgttggtgatgatgatgatgatgttccaggttgtgataagttccataagacccaacatgatgattgtttgtgtaaacgacatcgttttctcctttctctctatcgttttcttcgcggctagtagtagtagacttttgtacacatccattgattttaaacccgagttgggtcggatcttgaccgggccgttgaccaagattcaagaaggactgatgatggttgaagatgctgaaattttccggcgagataggtaacggaggtagctcgtcgatctcctctttagctgcatcaagcaaccagtcaacggctttgctaggctggtcaacaccgagccgttcttgaagatcgtagagctgaatagccgttgggactgataatctcacgcgtctgtcacgtagtccacgtaacgtacacactttgctgtgacggtctttgcctccaaaggcgcgtgaaaccctaacaatcctcggatccttggatttcatccacgaagaagaagaagaagagatcgatgtaggctgctttttaattacggttttgccactggtggctctgacttcggtttcttcttgatcctcttttacttctctttcacgtcttgtcgtagcgccgcctgcaacttcgtcgtttgcatctttccaagagacgatattcataatgctattctcgagatctttatatctaatacagaaagaagaccaaatgtatatccattagcagaaaacataagggaattatggcaaaagaattcaaataatatagttaatttctgaatccttttaaaacgagagcgaatccagaaaaatggagagaaagtaggaattgtctaagagagaaaattagggtttaatttagcctgttttcttcaatcgacaaaattcttataatccggactgaagaagaaacaaaaaaaaaaacgtgtactgtttcttacatgagttccaaagttttgtacggtcttgagcttgaacaggaaatctagggttttgctgttctataaaatgagtaatatgatgaagaagagagaatgagaaatagagagaagaaagtatgtgattcgacttttcttttcaaaaagtatatgaataaaatgaaaataagataaaaagaaaaagaaaattagaaagaagaagatgcttttggaagtgaatatgagaaccctaccaatatcataagcctccaaaatttagaagaattgcgacttaagtatttatgttaaaaaaagcaatggatgtagtaatgccacgtggcggatttcgctatcctcgaagggaaaataaaatgaatgcgctgaataatcagtcaagttcattttcatctttaatattatggatcatatcaaatctacatacggaggagatattaaactcgaatattttatcatccacgtatgtgatatgagttgcagttataatacggctaagaagaaaatcccaaaaaaagtatacgcgaatatctaaattttacagaaattttagatgccaaaatcaaacatacattgacgtgaagttatatataatagtagcttattagaacatctaaccaatgttatgaaaataacgacattttaggaataattattgttgtgaaatggatgatgtacgattattgatggaaaacgtatgaattttatctcaattagccaaaccatgataatttcgtgattttttttctttaattgtccactgtaaatctattggtagaattaaaaagccaagacctatattatttatgatccttgatttttttttttgctcttttcaaaaatatgttttgcagccgccaatgcactcgtgatatattgaaatgaagttggatctataatattatgactagttaaacacttcatcactttcttttcttaaaaaaaaaaatgaaactacatcaattattaaccaggtattgatttgtttcataacacttctataaatgataaagattagactttagagttcagcgtagcgttttcttgatcattttaactcatcttttaaattggatatcttatgaataatctaattaaaagaatatggtacattatgtttaaatttagtccttggttctacaatatgaaatgtaactcacatatatggtaatatataatatacacacagtatatggtccatgtgaatattggcatgctgttatatcgacaattacaaaaggttgtggtttacccgatgcacgccttgtgtaccttgttgagtcatgactcattaccttttcaaaacacaagtactttaactagacatcactaagccctaatttacttttgcttcatatataaaaatcagttttaacatctttatttatcgataaggttgtgttaaccttgtgatttttctttatataaggatttttttttaataagattttctatattagatctaatgatgtatatattatatttaaatgtgtaatctaatataattaatatggacggtaggatataagaagtaatatgattttgttattcggatgcatcatctgtgaaaaggggcacctatataattcccatattactagtcaaaccattcttttaggtcaaacttaatgttctaagaataattgagacgagtatttttcagaatttcaaatccataaaactaataataaaaaagtatccacatgattgtcttttgaagtatgcaacttaattaattatccattcacaataagatttgtacccctttttcaaatacattttaaatatctatatgaatcaataacattcatcaaattattaattttattaaattgtacattgtcttttaaataaagtgatataagaatattagaagtggacgaaagcaatatatccttatgaatcgaaacaaaggagtaagagaaaaagaaagtgtgatgatgatcattttatcttaagacatcacatgggaacaaaggagaaatcggacaaacttagaatccattaagtcatgtctacttcaccgactccagaattttgttgtctcatgaacaaagattggggttttaatagcttttctatagtattttcacatccataataataattaatgatgtgaaggatatatatatcaacgacaataatatcctaaaaatcatgttaaaagttaaacacatttctccatatttgataaatagcaatcaatatcagcgtatataaatgagatgaagctaaagttagcaagacaaacaaaaacgtatgaattacgtgagcttacgtgaatattgcaaatagaacaccaaatcattaatttcggttgacgtggatattcaaataatgatctacacatatacagtaccgtgggtacgcatgccatttcgagacgtatacaattcagtttcttccacttgagtttcagatctttatcaaaattacaaacacgtttatatatatatacacatatagatagattgatagccacatttctgagattcgatagtcatatatacgactatatattaaatattccagaagatatattgacactttttctgaaagactaattaagaagaacgcgcaagtatgactatgcgttactaagaatatttaatttccattagaaaatgtgtaagtttatctgatatactagttaattagccaaatgattttaaaatttacgttaagaaaatttcgtaggttcaactttttagtgtgtaagttattaattgtgaattatacagctaggaacgtccgttatatgtaaacaaagtaactatatataaaatttaagacttagagtaagtatttattatgtgattgttatatatactcgctaaagagtactagatgaagagtgaagaggttgggcatctcgagagagaaactgaagaaaacagaagagaaagagagttattcactcgatggtccccctaattttcctatcactttttctctctcaatttaaccgtctcttgtattatccccaatagttacatttttaattactcttatcatttcaatacccaacaaagcagaaacagcccagcaaaattttcacttccagaaattataacatggttgaatacacaacactaattaactgcaatatgaatcataaataaatttattaagatttctatataaaaactgttgggcagcaaatgcatgcgtacgatatctatagaattggagtttagtgcaattgttggtatttctttctttggggaaagtgacacgttaaaatatgaaaaatgtaaaaatttgaacaagacttacaataactagaaaaatcagagatacaaaatttactactctatcagtctatctgttgtcttatacactacacctttattatgcactgttcctatcccaaacaccaatccctatgctcagtccatatggtagatactactagagatggtaacccaacacatatgtgttagatggccccataggcagtaagcaaaacattactttttacaaccatatctttgtttataaattttaaaagctatgtgaatttaatttagtattactatcctggatcacaatcttgggccaacaaaagaaatgtgtatgggccaactgtgatgaaagaaaagcccaatggatcaaagttcagatgctttctgtagctcttttgtagagaagtttttgtaagtttagttatagaagcaaaaataggtaaaccacaaaactgaagcccggttgactaaatccttaaatgtgatcatgtcacacagcaacttggctacatgttgtcgtgaagcaatgaataaagtggtacgtggtgtattctagaagcgaaacgtgtcactaatcttatcacctttttagggtaaaatagatttgaaacaaaacatttcttcaaacatacaaaaaaagaaagaaatagtacaagttggccactatgcgtgtcccacttctcgatctcctctttgattgtttgcgtctctttaggagatcctcccattcattcattctttcctctccaccttattattactattattctgctgcatgaatttcaaaaaattatgtaacaacaatttaccgaaatgaaattaccacaaaggattagaaactagcacattcttaataaccaatattgaactcttattagtattgttgttagaacttgaagttaattaggccacaagaaaaggcgcgtagaaatgtttagataaaaaaaatgtctaacgtatttctttggtttgccgtgtcgggggcccagtcaggctggatacacgtggcaataaagggactgtcgtagttgagcacgttgattattagacacgtgtcgagttgtatatgaacaaagtagcctacgtctacgccacttgatgcccttttccacgtggcgtggtgggtggtcgtctatcttttcctataaaaaatcataaatcaatattaaaatgttttcaagaagataatccgaataattccctatattttgtgtctgtcaacgagaaatcactatctattttcattgattatactaatgcaaattggtatattaactggaaattatgtctattttaagccaacttgtgtgaaaatatactaaagtaaagttttaaaatccgtactacatcgtcaactatgcttgtaatataattcaaaaacatgattttctttttttttccctgaaaaatataaaatatgcaaattgaagtactatagtttataatagtaagcatttggtgcttgttttaagacaaaattgtttcgtctctctcaagattgaaaatagaaagttaagccaaaaacgtttctcccttctctttcgaatttctctgactttgatatttggttatggagatgataagaggcaggggaatcccaaacggcgtcgttcaagtacccaatctttctgctaataatctcttgcagaagtttttcatcgcaagcaaccatttttgtcagcgagactctgagcatggtgagaatcaacaagaagcgaagaagagagaagatgaagcagaagaggatgagaaagacgtggagctaacgttaggtctttcgcttaatggacagtttggtacggatccgagatcgagaaaaaggaggcactttgaactgggtcgatcttcttcgataccggaaggtttcgtcttcgatgaacaaagatccggcggcggtaacggcggagatatgcgtcgtattgtgggccgtggaggctcagacatgtttcagctggatcggacgcgttctctgccggtcgtaacggagatggatatagagaaagagcggaaggtgtcagagaagacgagggcatttatggaatctccggttacaaacagaggagcatatctaacaaaagataaaaacagaggccaagccgtcgaaacagagaagccgagggcatttctggaatttaagattcctccgaccaaggagggaaagaaagaaaaagatcggttggttgtcactggtccggtcaacgggaagggtaaaaatggaaatacggcgaagaagcagaagaataatgtggaaaattcaggaatggagaaggcgaggaacattcttgaagacatgccttgtgtgtcgacgagagatgtcggagccgacgggaaacgagtggaagggtttctttactggtacggagggaacaaggaggaggtcaagatagtttgtgtttgccacggcagttttctttctccggcggaatttgttaggcacggcggaggtaccgtcagcgatgatgatggtggtgatgttatgattaaccctcttagacatattgttgttaaacttccttcttcttctatctagggattattatttatccccaactattattagagctctcattttttgttttccctaactttcaaaatgtaacgatgtcaaactaatttgaccgactaaactagctgaagcatgtacattttatatccaaagttattacagatccacttgatttgattttggttaagaatgttgaatcaatcttagctaaacggatgttttattttttaacgttagaaattaaagattcattgatatcgaagggagaggaaacagagttcaaaactgaagagagacaaatgcaaagccaagactaccaacaggcaacagatatatcactacgagtgagctcagaagataatgagaaaagacaacctttgcaaaggaagcagggagcaaaaccatggtaagagaactaagttttctctctaagtctaattgtggatcgtcaggactgctttgtaactaatgcgataagtgagccaagaagggggctatatatgattgataacggtgatctttcgtaacacactaatggctataagctctaatttccattcttcaaatgaaaccgttagcctcaacgaacggatgtttcacaaatgttgagccaatggatggatatactcgtctttattatcgagcaatacgcttggcgttaactattcatggaagtagcatgtagtagcgagagtcgctctatttgatactagatacatagaagaacctttcacatcgctgtctttcaagaaggatgaagatgccaactcaaccaaagcaagccagaccactaccgaagaagatcgacaatcatgaatcaagacccaatgatgtaccattcaaacccaaatgggtggaattgctttcttatggggattatactgatagcattgtcggtcttctaagttaatattgggctcatagcccgagtttttttattcgcatatattattgggcccatagcccaagtttctcaaaatggaaatgtcaatcaaacaaaaaggatcggcagtttaaacatactaaaaatcgaaaaagaaagaaaaactcccacaaaactttagtataaaacaatttacaagtgggagaaacaaattagctacaaacaattctttctcattttatggttttctgcttactgagagagatcaaccttcctatggcttcccctttcaaatgtcctttttaccctcgagagaacccataggaaattcaacctctctttcttcttctaacaactactacgtacacatacaagtttacaactgagagaactttttttaaagaaagaataataatcaaatcctgcggagggaggtgctaacacgacggaggttgtagctgcttcaaccgtcttacaacttgcttcatcgtcggcctcgtcgacagagaatccaccgtacaaacaaccgctaaatgcagaacctctactagatcatcatgcggacctgcgtcccacaatcccgctgtgaaaaactcctttgcccttccttgtctcaacaacatacaagcccattgcactatgttgaaaccattaccatacgacacaaatgacggatcaagtgctttcttgtccgaaagcagctctagaagcaccactccgtagctgtatacatctgctttgtctgataccctgcatgtcattgcgtactcgggagctacatacccaaacgtacccgccacaccagttgttgcgtgcgtttccgatgtcccaagcaatctcgctaacccgaaatctgataaatacgcattgcagtcatcatctaggaggatgttactcggtttaacatctcggtgaagcacccgtgggacgcattggtcgtggaggtaagcgagtgctcgagctatgtccagagcgatcttatgaagaactctccaatctcttgtggatctttcttggatgaatttctcgaggttgcctcctgggagatagttgtacaccaagaacatctcagtttcgctagcgtggtaaccgatgagagtcacgaggttcgggtgtcgaagtctaccaagagttttgatttctgcgtggaactgttggactccctgaaaccgtccgatcgagaggcgtttgattgcgacaaccacatcttgagagatttctgctttgtaggtcgctccaaatccaccatttccaatcagattgcttgcgttgaagtttcctgtggctctaaccacgttgtcaaaggttattggaactccgatatccatgaacatagtgacttctcgttttgtagtggccatgatcttcgatttcggatgccatttccttgtgtagaagaagagaattacaagagcaattagtaccgagacaatcgctgaagctgatgcgattgaggcgatctctagcgagttgaatccaccctttcctggcgactgagatggagcgttttcaacaggcgaagatgcgtaatcctgcgtgatagaatcacccgtggagtctcgggaatccgaagacggtgttgtcagagaaaacacatggcaaggtcgaagataggggtttccactaacagtgctgcatttcgtcagtccattggttgaaggaactggaccagacagattgttggaggaaacattgaaaacagcaaatgtcgcaaaacccgacgggattgggccagagaggttgttattgttgagaagcaggacagtgagattcttcaagtttacgaaatcatgaggaataccgccagatagatgatttgaagagagatcaagaacatccaaggaatgtaactgaccaaagctctgaggaatttgccccgtgaggttgttattcgcaatcgaaagatatgtcaaagctgccatcttcttcccgaggctacccggtatctgaccttgcaactgattccagctcagattaagagcaacaagtgaagctagatccccgagacttgttgggattggcccgaagatctgattcaccgaggcatcaagaatcttaagagaagtgcacatgttgtttagtccctgaggaatccgacctgagagcttgttgaagcttacattgacataaacagctttgagttcgtcgcagttatcaaacagatttcccggaaattgcccgtacaaccgattccctccagcagaaaatatgtaagagactcgctttcccaaccgctcctgtgcaagtggtatagacttgagagtaccagtgaagttgttgtctgcaaaattatgaaacacggccggacctccatcacttccaagatctatcagggaagttccaacttgagccttctcggtaaagaaggagagataaacagacgacgggtcgctgtaagattcaatagaaaacctgtcaaagtaaacaacaggaggacaatggcttgtggtattgttgagaaaatcagggattacacccgataagctgtttccaccaacatcaaaaacactcatgcatgggaccgaaatctctttgagaagctccccagtaagcctattcgagctcaaatcaagaagacgaaggttcttgcatttactaagaccgacaggaatttcgcctttaaagaagttctgacccaaattaaccatctccaagttttgacatgaaccccaatctcctggaaatctaccttctaacgtagctctgggcacccaaagtatctttagtttcggaagcctagtgatttcctccgggattcctccttgatagaaattgaaatcctcggtcatcgaggttaaatcagcgcctggaggaagatcagcttcccctcttacactattaatgtcttcatacacattgtacagatttgatagaacgagaacagacaacgaagagcaatttccaagttcaacaggtaatggaccactaagagtgttcctagaaacatccaaaacctcaagcttctgaagactcccaaattctaaagggatagtctcctccaacgtattcatatacaacaacaacgaccttaaaccagcacatttccccaaactctctggaatcctcccagtcaagaaattaccagacaaatctaaatgctcaagctttccacagctatccccaatatctttaggcaaagagccttgaagccagtttaacggcaaatgcaacactctgaatctcccaacaaaaccaggaacagttccattcaacttattaccacccaaattcaaaatctccaactttgtcagattctgcagcgaattagggatttcacctgaaactctgttaaaccccaaattcataacccgcaaattccgtaacccagtaaactgatccggcaatgaccccgtcatcaaattcccttccagatcaagaacttcaagcttctccattccccagattcctacaggaatctctccactaaacgaattaaaaggcagagacaaaaccctaagtcctgtgagactcatgattacagaaggcaaattccccgccaaagctccatgatttccggtacaatccctccgaacaccaaacccatacaacggaaacttaccaatatcaccacaagtgaaacgatttcgactaatttcagaacttccagagccactaatgttaagagccatgactcgagagctcgaatcgcaagatacaccaaaccaggagcagtaatcttcactctcttcgacccagctagctagaatcgaaccagggtccgataccgttttcttaaaccgaagcaacacggatttgtccgaatcagctaaaacagtgatttttccggcgagacaggaggcgaaacagagtaagcagagcgagaagacaacgtctgaaggcatctgtctgcggaaaaaacgccatttgatcactgaagaaggcaaagaagtcatcttcgtaacttatccccaaaaatgtttttacaacaaaaccctaaacccacctcgcaaggtctgctaatatagcaattgacgagcaaaagatccttccttttaccgtgcgaaacaatcccaagctcgaccctttaaccctaatttagggagatgatgagaagctttgtagtgagagaaactgatgaagcagagagagaaagagatgagagaattc

SEQ ID NO: 395 - DNA, 89934 bp, Arabidopsis thaliana
aagctttgttgttgctgaagtagcatctaaagagaattaaacagtttggcacaagagtaaacacaagccaatatatacaacaacattttatgtacattgatagtcattccattttcatgtacacaagccaatgtatatctcttaaatgccaatttcatgttttattcctttttccatttccagttataaagtttgccaatattggttaaatgatcttgaaactgccaagtccatctagtaagtcgaaacataacaaaaactgggaaactttgatactctgcagataaagagtgcaagaacatttaaaagttgcagatcatcttgcttaatatgggcggttcaatgcagcagttaaagggactcgacctcaagctgttgttgcttgtacaggcttagaaatatatgtgctcttgttgtgaaatgtatccagttatatagttttcttcacttagctaagtgatctttaaaactcttgaagttgccaagtccatctaataactcgaaacataacaaaaattgggaaactttgacaagctgaagaaaaatcatctatcccaaataaaatttagtcaaaaacattaatatatcaagtaacctaaacggactaatgagtttgcaagagagaagacaacagaaagaactgatgaaatgtctgagaatctcccaacatatgacgtcttcaaaaatgttatcctcctccacaccagacttgccaacatatatgcacagcttcaagaaactgccaagaaacataattacaaaacattagaaaaaaaatcaagaaaagacatttgcaacttgtcttgtctcaagttttcaagatttctcaagtcgcacctgtggttccgttggaagaaactctcctcctttcgtaatgagtctcacgagacacagatatgaacagtgatcttgtttgcattccactagctgattgtagcttcaccgttgactaaactttcttcgttggtactgctattgctattcattgtcttgtcactactaccaccagttgctctccttacatctttcttcttcaggacaagttcatccccagatgaaacctttgatgctcctgcagctgcacggtcctttgacgaagtatttacatatttcctttgcgaactcttgtctttggtagaatcacctgccggctgttgtttctgactgtctttgtctgtctctgattcgggaagtaaagcccgtacactaagtcgaagctgacccttttcatttacctgcattatccatgtttctttgttcaacaactctctaattatcatttccgattagttatattgtctcttgagttataaagacacaataactcgctgacctctattaatttgacgtcaatgcggtctcctactttataggcctgaaaggacaagaatgagcgtatgtgaaaacctgaataaaagatgaaacaatttctataaaggaagggaatcaatgagtaatgctcacatcctctggttttgcaagccattcagcactcagctcactgatatggcaaagaccttcccgcccaggcgctatctctacaaatgcaccataaggagccattgacttgatttcacaattcctgatacaaaaagaaaggtaagaatccaaatctatttacgctttttggtcagagaaggtatatgaaggatacatacctgtagatatcaccaacagagggaaccattgtcaatccactaataatcgctttcgccctttctagactcgctacatcaattgccataattttgaccttgacaaagataaatattaagaagttaggataaagaatacccaataaatataaaatcacatttttttgcatgtatatctcacagttccatcatcttgcatgtcaatggcctcaactccagattcttcaatgatgctctttactttcttacctccagaaccaataagagagtatactttgcttggatgaacctgcagcacatgaaacgccaacaatctttagttcaaggcagaaaggcattagactgggcaatcctggaaaaactagttgaagccaaaccttcataataagtatcaatggagcatattttgagaggcttagcgtgggaggcggtgagcactttgccatttcagctgcacaaaaaggaaaaaaaaaaatatagtaaattacatcttttgtggcatacattttccaaggaactaaatctccccaagtctactatcttgagactaataattcatgaataacattccttaccaagaatatggcgacgcccagcttttgcctgtattagagccttttccattatctctaaagtaattcctcctacctagttcatgattaaagagaagaagtaagaaaagatgttaccaacatattaattcaattgccatttaaaaccatttcggtagtgtaaattaagaaacggatgatgaccttgatgtccatctgaaaggcggtaacgccatcttcattcccagcaacctattgacaaacatatcaaaacttcagcattcaagtcaatgcaaggtccttcaagggaatcctcatattttctgaccttaaagtccatatcaccagatgcatcttcagctccagtgatgtcagaaaggataaggggagatccatcacctccaaattcttcagtatcccaaaccattcccattgctatcccagcaacagaacatttgactggaactccagcatcttgcaaagccaagcaaccgccacaaacagatgccatactgtcacattttgagatcaacgtaagaagcaattaccaaatttgtcattcaaacaaactaggcgtgcagatcataaaaccagataaaaaagctgaccttgaagaaccattgctttcaattactgtactttcaacacgtattgtgtaaggaaagtcatcatcactaggtagaatggtctccaatgctcgctctgctagtgtcccatgacctatttctcttctactgggtgcaccaattcgtccaacttcaccaacagacgatggaggaaaagtgtactgcaacatcacaatgactagcttagaaaatctctttaagcacaacaagaaaaatgaagaacgacactaagcaactaaccacatcaaaaagtttactttgtctaataaaaagtcaactgtaataataataacaaagtgagaagaacaaatataaaagagacctgaagatagaacctcttgtattcatcagaaccctcaaggttgtcaattctctgcgccatttgtttatcaccaagcgtaacaactgccagtgcctgaaagaatcatactaaatgttcattagcaaaccaattgccttaaaatacataaaaggcgataagagaaaggatcgacatatgaaatagccacgcaggatttctccagaagacaacattcctatgttacctgtgtttccccacgtgtgaacagagtacttccatgtgccctgggaagcagtccacatcttgaattaattggacgaatctcatccagagtccgaccatcacttcttttacctccctatggatgaagaaagatgtcatatggaatcaataaagctcattccgaaaaagtgaaaacaaaaatgaaaatttaggaaagaattactaggagacaatgtgaaagatgtgtggcttcaaacatgttagattctttaatgtagtgtagttcataaaatgcttcagtgagaaaataaatccttaaacatacatgtctagggtataaataccaagaaatcagatgttgtacctcaacaattcgcctacgtagaagcttcgacgatacttctttgaagactagcttgacatctacttcagaaaatagctagcaaagggaaatgactagtttgttagcattacatttaagaaaaaatgaatatgataaaaggtcacattcaagttatcatgttgaaaaggttaagagactcactaaaggaataggtttccgagggatgggtctaatgtgaacatcgccttggtccacctcaccttcaggaacaacttcctcatcctcgtcttcatcctccaacagatccggttgtgcttctatggttccaaaagctacctcatcaataacatatcccttctctgtcagtattgtcaagaccttttcttccagggacgatatggctttccttctcgatattttactcttaatttgtaacgcttttgtcaattcctcaccagcaagttcctgtgtacataaaacaattcattttaaacatgaattacaaaataatatcaatgcaattccattctggcaaaacgaaacagaaacaaagtgtataacatactttcacatgcttgtatagctctggaggtggtaatctgatagcgtcaagcattttaggctttccatatttctttgctaaaacttcaatagcaatgcatgtagcctgtacagcatcctggtaaaaatgaaaaagcctcacatttagtatctaattcagacttttaaaaattgaaataatccgaattaaaaatcgaaatacctgtccaactttaacagcttggagaagcatttcctcaggaagaaaattactgtatccctgcaatcccagatttttcaatgagcaagggctgagtatagaaaaaaaaaaaaaaacaggagagaaagggcaaatcttgcaaactcaagtaaagattagagtttacctctatcgttagaattgcagtatctgttccagctagaaacaaatctagctgtgattcttccatctccttcacggttggattgacaatgaattcacccccaataagaccaacccgaactcctgcaatcgctttcgcatttggtacttctgaaagagctctgcggtattcatttattacatagccatgtcaactttgccaagataaaaaagcttcactcatatgtaaacggaaaaagatgaccctacatacacagcaattccagcagatgtaacagctaaagcatcaggtgcgtgtaatccatcgtagctcaaaacctgaaaccacaaacaagcaacaggtcaattacgaatgagactcaaacaaaggagatgaatacaaccatcccatatatgtttaagtataaaaaaacaatgtacatcattttccgaaaaaggtagtaggcacacaaaacaggagacgccatcatacagagacaaaagaaagcgcaagtcaaaaggtattttgttcaaccaaagagaggcaaaacagacaaaaaaagggcctatcggaacataaagatatccatggagaagaagcatacccaggataaaatctgagtttcattgtagaaacctttgggcatagtggggcgtagaggtctatcgatcaacctacaaatcagaacctgcataaaaatcaaaagtagaaacatgttaagaaggatggcgaattagacgaaaccaaaaccatcattagtacatacctcgtgatctttggttctcccttctcgcttaaaaaatccaccactgtaccataagaaggtccatttagatcatcatttaggcaatgatatggtcttcttatagcaagagactccaaaattgcaagagcttgaaagacgcttacctagttcgacctacagctgagaatcgctcctgatagtgaacataaaggggaagaaaatctgatggctcactcggaacatcagctagacaaacggatgtgtagacaatctacaatgacaagtagacagagtaaaaaataaaacaaagcttccgcatctaacaaaccgattaagagataagcaaaaacatttaaaaagttgaaagttttggaaattgaatgaagcagcacacttacagtttctccatctgtgaccgtgactgcagaacttgcttgtctccccatgagaccagtctcaactaaaatctacagagtagacaaaaagaaagaaaagatgaaaaactttgaacaatgttcaacacattcatctaaacagcgagctttgcttctctactatggagctaaaggtctcaaatcctaccaatcaactccgaattcaaacttgcaaccaatgaaatcaaaagagtacagctttttgaagaaattacctctctatttccgaatggaattttgacagaaacgtggttaggaaaagccagagacccatcgccgacggagtcagcgtcgtcggtatcatcaggcctaactagagctctgacactgaatttaccggcgccacttccggagagaagagagagcgagcacaattttcctcctccgccgctgctgcgttcgccggagtgaaaacgagggaaattccgggaacggcaaagcttgctccggcgaagtggccagaattgtggagtactactgtgaagtgcgttactgggactcgtcaacatcttcttcttctttgagagagagagagagagagagagtgagaaagagagagactttatccgttccttgcagacgcgggagcttctcctgtgactctgtgtgaggcgtagctagtcttgtttccggtttcaaattgaaccgggttttaatttcccaactgatattttcagaaccaatcatttattccggacaattaggtctgattcgttagaaatttgaaatagaatttgtctttaaacattaacttatgattaattaatataaatttactgtttaatttgatgaccaaaaatgagattttttatacgaacctgtggatagactaagccagttgaaccgattggttcggatcaatgtcaaaagctgaaacgatcgaaatagaaacgactgcgttttgtagaaaagctaaataataacaagagctagcaacatgtctactattgctatttttttagagttttttagccaatcagaaagttctatttcagatccactctcacaaagtgcgcgtagagagcgtgagagcaattctgtaggggtttaccttctgaaattgtgcctttttttatcaacgcacttgtctctaaaatcaccatcgcgtgaatatttttttcttttcctctctaaaccagtataaaccaaacacaaaatcaattgtaatttcaataccaatataaactttttgttccggttcgagatctctcctcctaaatttttgtttgatttcttcaatcaaaagctctctacgacaaactgcaaattcttctccagaatctgcggcggattcccttatcgggtattcgattccaaatgtgcagtagcttctcttccttctattgcttcagattattgttttttccgttaatcattagaatgtacttgtgcttaatgttgataatgattgtgattataatcactagtatacttgtgtcacatatggaacaaatttagttattttttgctgtaaattggtagtatactaaaaactctaagatttttaagtgttgaaaatttcaataatcctaagtcccactgtataatggctaagttgagagaaaaagtatgtgcattctttctttagttggagttttggcatacatataaacacattgaagctaagatttttgcctatcaatagaagaatctataagtttgaagaaataaagtagtaatccttgtttttctttacatgtatgtagcgagactccttcatgactcaacaattgttataactatcttcttctctgtctctacccacctcaagctccctgttatctcggtgagcacttaacatttgaagacgctgaatacgttgtggaattgttccatcaaatctcatgctctgaggatcttcagaataagctacatagtaagccaatacacatgcctgtagccacgccaaacctacccttccctgaaaacactcaaaaccaggtacacaacataaaccactttgtcttaaagtcttcttcttagttttataaaattagctatcttaccacaaaatatccaattatgaaagcatagagagtcacttccagggcatagtccttgtgtattaacaacatccatatcccagcagttaatgaagagacagctccaacagaaacagcactgagaaaacagaaggagctagtgagatccgagtcaatcagtttctccaaccctgttgtgcttctgaacttcttccaggtatcactcgaagcctccatgaatcctttatcataggttccaacatgtacaaagccccatctgtttccaagtgtaatgagtttgttagcaatggtagagaagcaatcagcacctgaatacatgacctcatcgctgctccctgacattagattaacacttcttattgatcctcttatgaatacgatgattggaacaagcgtcgagccaacgcagatgctcccagtcaagtgtttcatagtgatgcggaaagcattccaagcgtccatatcttctccatgtgcaaagtttacatatctcgcccgtgaaatcgcaacttgttgaacattcttgataacttgcatcgtccatgctaagcttattatgattacggatatgaacaagatatcaagatttgttctagtggaagttgctcctccaattccagtcaccaagaaaccagagtaaacgacactgactatgattgataagcagactacttctctggttcttgcaggtggaaatgctgtggcaagtgataatattttatcggtgtactcaagcctcggagtaatccagcaaccatagagggactgagtaatggcgaaaaggacaaacactgcacctatacctgcatctaccgctgagccaatcaaaacaagcaagattcctaccgagcaggtgagtattggactaagccagaacgttgctttgactgctcttgatggattgtagataaagatgcattgccatgctaaagatgcaattcctgagacagcaacagatgctagtaaaggagggtaccatttcttgaggtggaaatggtgtgtacttgctgagatgagaccgcgaatggtgagaacgatcaccaaaagtgagattaaggttagttgtgagaagagaagacccttgaaaagagttctaaagagttttcctgctatggtttgttgtgttgttggaggtggtctaccttgttgttcctgcaaaaaaaaaaaaaaaaaaaaaaatggtgtctcatcaacaggttattcaaagctggttaatgtgaattcgttatgaacatgcaagtaaaaagcaccatgaagaaaacaagaagagacaaaagagaagctgggtcttggttttgttcttgagtcaagaaatagtgatggaagtcaacgagagaggatcaaaacagatagcataaagtagaaagcaaaacagaacccagagagagagaagatacagagatcaaggtgtttcctgattcttgattcaaaagagagaaataccttgaaggcgattggagaagaagaaggaggaagaggagacattattcttggttcttgaatctgcacgcgagaggcatgaccgttgcttgttggtgtaggcatagatgcgttgtatttgccaggagtgttccttgaatcccaagttccacttaaccatcttcatcaatcatcattcttctgttgtatatatatatgtatatatacatacatctttgtcaataagttctatcattttgttgatgttttattaaatgcatttcgaatatttattatacatactttattccattactttgacttactccatctttaaactaaacctacacttcattgttgttttgactttttacatcaaagtttcctcatttcctgatcccccaagaaactaatcaataaaaatgataaatctttcatttggtcttcagactccacaaattatggaaaatacgttttacatacttattaaattgttaggtttatattttggtagtatttgatacatgtaggttcatcttggctacctactcatcgccgtagcaaaggtatttcaaattatattattagatcaaagagtttagagtaatcaatgagttgatctgaagataatgttatttaattataacaaaatattgttaagcaaatatagagttataaacttgatgtctagatatcatttggtttattcatttccgtatatgatgatagatgagatggagacatgaataacattaaaacgctcagtttaatctttgaagaaacaaaaacataacaaatcgtatccttctttttgattatgcatatcttgtcaaactataaaaatgataccatttgaagcaaataaacaatattataaatgtaatttcaaggaaaatgaaaggggaaacgagtagacaaacgaaatacgttctttcctttatgctttttgttgttacttttttgtatttggcgtgagcggataagtatcgatatctatctaatgaattcatccacgggcttgctgtgtgtgagtatttctgtcttctttttattttttcaatatttatgacttatatgaaatttcggaacaaaacacaaatatttttcatgcagccgttgtgaaaagtcaatcaaaactaaagatatataggttatgtaatggtcttaggactggaattaattgacaattttagttataaactatgtgactatgtgttattgtgttgttgatttgctgacaaccttttttgtttcttaaatgaagaaaaaaagaaaaactaaaaatatagattttattgatagagaaaatagaaattttgatggtgaggttggtttgggatcgattgcttactcctgtacccgaaagcatacaaatcaaatacctaaaccaaaaagacaaattaggtaaagtggacttcgtagtagttaccaactcaaacattccacatttgacaacaattatgagtgaacatttttttttattatatctatgatagatgatggtagaatgatcgattccaaaatatagcactgtagaatgtattgctattgtgtaccacaatggttacatacgatcatcgagacgtcaatgtcatttttctgatccctagctttttggaaatacaataaattatgaataagcttttgttcttatgctgttttactgtctttttaagagactgagattgttatgccctggtctactttacatttatcaattatcaccttgcaatcttttgggtgatgcagagctaagaagaaaatggaaacgctggtacaatataactttggacggtcaacaagcaatggcatttggatgaagatggactgatattgtataatgtatagtatatgaatggctctcaaaatagttgcttaggttttagtatctttgacaaggcccagtttaactttacataggccttcttgggacttggggtttcttgggcctctatcggactctagaaacaagttaaaacatgatttgtatcatcgaacgtacattttgacatcatccaccaattcggccaaccacttccataaatcagctccttgtaatttacaaatgtatcctgctaaattccaagatcttacccactaggtaagggtaataaagtaaaattggcttcacacgtgagtaagtaagttccagttggaagatctaaaaacatgtggaagaatgtgagagataggacagatggaggactttgcttgaaagcaaggaacccacaatcttacagttacagccttttcacattttcttactgtcagttacatttgtctgtactttataatcgttctatttctttctatatttatctctttccaaaacaatttttacattgttttcttaacgcagcttttagcttattttgggtaatggattaataaaatgcagtttcatttgttgtcacacacacaaaagaagtcaaacgcagtttttttttttggcagcttgtcaaacgcagtttctacaattagaattctcttatgtgtcttttaaacgtcaaaatcaaaactaattaaaaacaaaaattgatatcgttcggttaaaatttatgtttggtgaatattactaaattaacacaaacacaaaattctgatttttccttagtttgttttcttttgttaaagttttccttaaattgtttgtttaatctttatgtcaagtttggtaacaatcatctttcaaatattggtactgtaccatataagctggtaccaatgttataacaacaaccgttgtttatgaatacttttgagtatgaaatttaatttcactatagatttacagcagattaacacgtttatttgattacggagtttgtatgtacttcagactattgtggggtaataacataaaaaaaacaaaataagggggcatatttgtgattctacaaactacctatcactaaaccacattaaactctctctctccctctctcttctctaaagagattcgaagaaatttacagagagacaaaaatggcgataaagaaactgttgatgatctccttctctcttacttcactcctcttctctcttctctacatcatccccacgaccaagactctattcacttcctcaaaaatcccttctttacccctcgaatccaaccaaaactccaactctaccctcccctgttttgcttacctaatctctgcatccaaaggcgacgccggaaaactcaaacgcctcctccgatctctctaccaccgtagaaaccattatttgatccatctagacttggaggcacccgaggaagagcatttggagatgatacggttcgtagccggagagcctctgtttcagccggaaggtaatgtaatgatcgttggaaaaccgaatctggtgacttacagaggaccaacgatgcttgcgacgacgttacacgcaatggctttgctcttgagatgttgtcggtgggattggttcattaatcttagtgcttctgattatcctctcgtcacacaagacggtacggtgagtgattaactgaattaactaaaaattagttgattgtcagaaaatttcttatttggttttagatggtgatgatggttaataaatttgacatctttatttagaaatttttggattagctgattcggattggatctaggtttgcgtggtatatttatgaaccggttaggattgatttatgccttgattgaatgattgtcttcacaatgtaaaaaccggttatcattttttaagttatgtctatagaatgatttgattcataatttggaattatgatcagttttgatcatcgcaatgcaatggttaggattagttcgtgatacatgaatgtacttgttgggatcgatgattttggtgataacaaccggttatctattaattctttgtctgataatggtgtgtgcttttacttatggatatgctgatgtaattcttttgttaaatttaaactttataatattaaataaatgcagatctgatctatgcattttctgagttgcctagagatctcaacttcatacagcacacgagccgattaggatggaaaatgtaagttttactctcttttttttatctttctcttgtctaattatttggtcatcttatttctataatctatactatcaaaggaaaaagacagaattagtgaaacatgctaagaaatatttaaactatctgaaaaagaagtggttagtcttattggttttgtaagggaaacaaaattatgcaactgataatagtaaaatactaaaatgtgtaggaacaaaagagggaaaccaataataatagatccagggctttatagcctcaacaaatcagagatttggtgggttagtaatcagcgaagcctccctacttctttcaagctcttcacaggtacccaaccaatatttagatcctcgcattataaatagtgcatatatgtaagtgtataactaggaaaagtaatttccaactaaaaaaactaggaaaaaagtcttcgttgattttctatgtacattccttcagatttagaaatttgttgcgtctgaggattgatttgagttgagtaagacagaaaacctaatatataatttgacgacataaaatattgtttcgaaaagataatttttagaagtttactaattaggtgaaatgtctttttctgtagtttaccaaaatgaagacaattgttatgttttaacatgtaaaatatttcaggttctgcttggacattcctatcaagaccgttcgcagaatattgtataataggttatgacaacttaccaagaacactgcttctctactacacaaacttcgtttcatccccggaaggctattttcagacgcttatatgcaactcggatgagttcaagaacacgaccgtgaaccacgacctccattacatcgcgtgggacaatccgccaaagcagcaccccaagatattagggacaagggattacagaaagatggtaatgagcaaccgaccattcgctaggaagttcaagagcaatgaccccgttctcaataggatagaccgggagattctgagaaggaaacggaaacttgggtcgaaacccgatcttggtcctggtccgggggctagaagattgaagagtttactaatgaggcttttgttgagaagaaactttgtcaatagacaatgtagataggaagtgtgacttacacagctctatatggagatactttttattttgatcttattctttcttgaatatttttttggggggttggtgtttgttctttagtgattcataagggaataaataacgaagaatttacatataatgtgttggcctggtttggctttggacttcaatcaaagtcattagcatgtttagaatgtctggtgggctagattgtgatactccataaccatgttataaagcttttccccaatttgatctttatgaaaagcgtataattacatgctttctatgggctaagaaaaactgaagagttttgtttttatttgttttgttggtcaagcagcatttttgaataatgtagattattgatgtaaatctaattaatagctccctaaatagccttttggtaatgcaatcaatatttttccttttttgttcgattcatgttttgagtgttcctttttttcctagagcaaacgctcctgcgaggctgcaacggtcatatacaccaacttcgttacctaaaaaccacgaatctatacgatttttttccgtgttgttttttatgcgaacttatttacgttttgtaattaaatatttgtccccacaaagcaataacggtctaatttcctccacctattggtgagtttacatcttaaggtccactcacggacccacctcttcaatttaagaagctttccttcaatttaaaagtaactaacatatgttgaaaaataaaataatttagtatcagaagattacatgacccagaaatagataaaagaacgaaaaaaaccattattataacccttcatcgaatcacagaatctggtccgacattgaaggaagtcgccggaaaaagttgaccggaacggaaggcatatcgtctctaaacctcggatgtcgaatgtagtaaaaaccagatcccaaaaggaaaactttaaacggaacgatgtagaacaaaaacgacgcgaaaagacagaacactacgaatatacacgtggcgcgtgggtctctccagttgaacaacgcctcaacacgctccccttgagccgccacgtcacctaataaagtctgtgcccgaccggccaatgcccttaaccggtcataccttatacgtacgacctccggttgtctcgttgttgggaaaccatcaaactcttcatcaagctcgtcgggagcaacggagtcaacgcaagatagtcgtgggtcaacgctgttgactttgactctgccacggtaacggaatcgtaaggctaagatcaagaacgcgtacatgaatacggttgggaggactaaatgtggacacaagacgatggccacgagaagcaagtgaacgagaacggttgttggtgggtgaacccaagttcgaatcccgtgaatccaacgggctatagttgcggcccgtgacaagaacgtgatgacacggaaccaattagctttgcttctcctcatgctccacacatgattgtctgtgtctagcatgtactgaaccacctcttgacctaatggaggctcagaccgcgcaagccgggctgtcacgatacgcatagccgtgtgacgcaaaatgtcttgttgagctggaccaagcggacggacatagtgcatcctaggtagcattggtgtgacataggcttgaataatgcttagccaagatggacaagagaatcgaaccgcgatttcaacttctcccattttcttggctccgcttggtaagatcacggttaaggtgtaggaattaaggtatatgcggttcatgtcgagtgtcgagagacgtacacggattttcccgaccctaacatctctcccttgctttccggattcgtcccgtttgtatcttccattgtcgaaaactccaatagtaaggaccgtgcacggatcataaacatcccatgtgtactgctcgttccaccgcggattaaacctgtctaggatcgtacgagtccgaatccatttcggtccatatttagcaaccacataagcatcggtggtgccacgtgtaccgtctctggttttcacaggaagtaaattagtagctccacggatacccacttccaataaaccaataggtggcttggctaactgtttagcagagggtctgacatcactcgtcacgtgagctgcttcgtctagcacgtgatacccaccttcaagacaaactttcacgtggattctcccggagtacggtttcttctcatcgccggcgagattaaaccacctcgatttcggttcagtccggtcatcatttctcctctcaacacttcccatatgtatcttagtctgaccaattgattgcccgttggttatatcttccacagtcactatcaagaacggctcaaacggctcggaagctacgaaaactagatcctcgttccaagtcgggttaccggatccggacgaagaagccgacggcccaatcgaagtcctagccgttttgaaaacttgaggtccaagctgagctttcacataaagctcagtggtggggatctttgacttagcttcggatcccaaacctagctgcaaatcttgggtttgtatgaccgttagacgcaaataccaaagcttcggagataagtaaactttggatctcgtctccggaatcaacccaccggaatcagattgccaagcttcttgaaacgcttcatcagcttgagtcccgagccaaacagcgagcatgacgtcattccccggtgatttctcagattccaatgtgtaccattgaggagccaaaggactatccggaggcactctcttaggaacctcttgaagatcaaacgacaccgttcctaaacaactctcagtagtcgtcgttgttttatcttccttctcaatcttctcttcactccaaacggaaacttcaagcgaggtcgagtttaagctctctttctcaaaagcaaacacttgatcccaatctttaccggtttggcttctggttttcacgccatttgttccgatcacgagcttcgcgtaaaccggattgcttccatcgttcttcgctcgcttcgctttagctacacgaatgtatagaaacggcattcgatcgacgagatcgtaaccaccaccacgattctgatctctggttagtgaaggaagctcgagatcagacccgattagatcttgccggtttacgttctccggtttaattcctaattcattctgcttcacagtctctgccttctgcggtataggcggattcttaacctcagccggaggaggaggaggagctacggcggtatcaggcttctttgccttcgtatccggtggtgcatcgggttttttctcgtccggtttagcttcttccttcggtttctcctcttcttttttatctccttccttcttctcctctgttttcgccgcctctgtttctttcttcccatcctctgcttttgcaatctccggcggcttctcttccgtcgcagctgcagcctcaggtttcggctccgtcgcagcaggcgccgccgggggattctcatcgacgtaataagcctttaatccaatctcacctttgatctgagagaaaacgctcctcttctcaagcggataataaacaagagtttcagatccagccgacgcaaacgcacttccggcgatcttaactttcccgagaaacgtgctccgttttcccgtcttcttatcgttgcaaagattgatctcaagaatctcttcccccatagtcgccacgtcgtgcacaaagaactcgagcttctcgtcccactgtggattcagatctcggaatttcgtcttcgtccgtcgccgttggccgtcgaaatccacgattgcgtaagcgctcgcggtgccttgaccatccttaggcatcagatttcttgcgctacagatctcaacaatcagcttcctcagaacattgtctgccattgtttccttctcggagataattgaagctgatcagatttttcttacgattgaagaagatgaatgagactgttcagtttcttttgaaagatagagagagagaaataaagtttgaatttttattttctagagagagagagaaagcactgtttgtgttcgacgctcgagagtgaaggtttaaaaaggggttggaggtagagtcacgacacgtcagtaatgccacgtcggataagttgccacgtgacattagaggacgaatcttattttgtttttcttttaaagctttaaaataataaaagaattggtttcaggtgtgtcggaacaccgtgcttggcgctgctgttgaatcacatattaagggaaagaaaaacaattactcatattttaaataaatcatgattttttcttgtttgtcttttgttaataaaacgtttcttacaatttagaaatcgggagattatatcggtggtgatgcatttcgaatatgaacaaaatgacaaattagtttataacgttacaaattaattaatgaactcatattgcttaagtctaattaaacttacgttatgcattgattgatgtaatatcaccaaattcaaacacaataaacacaagtggaaatctttgaagtcaaagtctttgatgaattaacgaattagaggccgttgaatcttttattgacgtttatgagtggtagaactgtttaatgagaagtgagaacttcacataattattctagttataacaaaatgtaaccacagaggaaattagaaatgtggatattagagagtaggtaaataaatcaatcataaaatcacgaaattttagatgcaagtcatgatatctaacactctgtgcataaacctcgacagcttctattcgtgaatgaccataactcttgattcattctcattccacgataactcttctttatctcatgaatatttctgataagtgattttaacatgtgacgtgaagcggatagcaattcaacaccaaaaatgtttcataattatgtgaacatgattacatgaaatgtttgcttgcatggccggtaaaatattagtattcatgtatttgcaaaggagaatcttttcattaatgtaaaccgcattgagaaagaaaaaagagagcataatattgcagttgtacgaactcgaacggtgaattgcattatttgtatttcttctgttaactcacatttttttttcctttctttctctatgtatttctggatgtacttgttacagaactgaaattatagaatctatatagtactaatacatcagaagccgttagttcttgttccaatatgcccacgtgcacggcacacatattcatcatcaacatatctttcatgtctataagtagtaccctttaattatatttttcagggaaagtttggaactactcagtttcttacgaatcttattaaaaaaaaaatgaattaaatccgcacgtaaattcagagctttttaaaattgtgaccaacattttctaatacgaaacttaggtatgaataagtatacaaaaacttatttgatcaagtatatattcttggttaaataatttcattttatgtttggtataggttttaaatatattactagtaaagatcaataatcaaactcattgccacaatgggatatataaagcaaacaactttagtagatcgagatctattaatttgcacaaagatcttcggaacaagaacatcagagaatcttgatgatttggcatgaagatgacgacatttaccatagttcgttttaaatctccttattaattattagtattatcggtagaacctttgtccaatgtccataattaacaaatatgaaatatcccaacttgcttcacttttagtttgcttgcttgcctgctctccgcagaaatgaacgttgttttgttttcgtgtttctagcagcgacgtaaagatagtggattttctaaaataaaaagatacggaaataaatgtaaatataaagcctgtcctataacttttcttcatgcaatttgtttctcaaaagtaaaattataaaatactaatttccacatattgcctcgcataggtctctgtcagatatgttttctccaacggtatttattttgtataaaaactattttccttttgtttgttttcatatgggcttcatcaaaaatgaaaatatatagatgagctttgaatattctttttcagtttttcaagttgattaaatttgggtttctttgaaccaaaaacgaaaccagcagtcgggtcagatttgatcagattcgtttgggtcgggtcggtaggataaattcaaacttggcccagcccaatgcacttaaagagcgggcttcacctcagcatgttaattaattttaaccacaatccttttcttttttttttgagcaacaacttttaaccacaatcctaaaatgtcaatttaaaccaaattcattagtgattcttggtccaccagcaaatttccaaaataaattatttttcttatcatttaagaaaataacaaacatataatattgtttactatactaattattacattaatgttgtacaaagtttaccttgtaagaaaaccgatattttaatttattttaaacaaaaatataaaacgtttcatttatggataagtgaggatgggaaccatatgagactcataatcgccgtctgcaactattataatcagcattcagcaaaatccattattttaaagattattgatgagaagatgaccctaattaaaccgccagagtagtactagctaatacggtataattataaacacatccaaccaggccaatcaaactatatataaaatcatgtcgggaattacgtaaggtatgctaatataacgtacatcacaatcctcgccatacatgtacatcacaatccgagtctttcatcaacttgagcaatatataactactaatgaaacattaggtccatcttccatatacacatacccagaatcaattactttctagaaaatataaagaaagaaatttccatcaagtcaaaggtaaggctttttaaaccctacatactttaaatataattaatgggatcctaatttgtttttaggcaacgacaatttctttacacaattctctacgaaatatgctttggtcttatatttccaatcatgaaagtaaccaataacagtattattattttgtttgaaaatgtcataatcgtatgatggctcgttatctccatgttgattaagagtgttttttatctcaagaaaatgtcatgttgagaaaatgtcataacaaacaaaaagtaagagtttttttttttttttttttgtatagaggaaattaagaacgagtctttgcattttcattaatttaactccatgttgatttacatttaatcgtatgatggctcgtttatcttcttcttagtacacttgttatttattatgtagataaaattgattgttttgtgtcatggactttaaatacatatattagtaacaagattgtctaaaactatagtctgactcgttatctcaagaaaaagtcaaaggatctaatttactacaagaaaattgagttacctttctgccatttaatcagtgtatatatcggattacaatcaaattacttccaaacttacattcaccttatactagtcaagtaaatgcaacatacatagacgatcgtaatatttcactcagttaaagatgtttaaaaaacacacacattattcaccccataatatatatcctaaacaacacgcctcatggagataaggagattatggctcatacacgcctcatgttctgtttcataatttcaatccataacaaattggcatacatagattaactctataatatctcctttttttttttttggaaaaactcaatagtatctctttataactatatatattgtcattttatttccgatgtagaattctaatatcagtcactttattagcaacatttattttcatttcctagcagacgtatctcgtaaataaaattttcttacatataccaaaaggcagcggaatgtttcaaagtagtccgtacatacgccttatgggtttatatataaatttacctctcttaatttatatgtatttgactgacctattcgacatatacaagatgtattaagttccttttaaaattaattttctttatagaccgtccattttggcgtatatatatatagtattggtttatctaattaagaggtatcataaacctttctacaagaacatagcactattacattgcaacactttctacaaaaacaagatgaagattgcaacgttttctgttctactcttgcttttatttattttccccgtggcattagcgcagctgaaatttaagttttacagtgaatcgtgccctaatgcagagactatcgtagaaaacctggttcgccagcagtttgctcgtgacccttcaatcacggccgccttgactcgtatgcattttcacgactgttttgtccaggtatgaatctcatcaaacatcctcttcaggtttagtatcgttaattagtttttttttttggttaagggggccttaagaatatatcgttacgtttattagaaaagagatgcaatcaaagagaattatgtaagaaattattcaatcgagttaaaaacataataaatacgagcaaaaaaataaataatttctgaaaattgaatattgtcttctttgatttttctcgtcttaacttgaatattattcatttgatatatgtatgtgtaatttttctgaaaacaacaagtcgttgacatttcgtatagggctgcgacgcttctctcctcatagacccaacgacgtctcaactatcggaaaaaaacgccggcccaaactttagcgtgagagggttcgagctgatcgacgagatcaagacggcactcgaagctcaatgtccctctacggtctcgtgctccgatatagtcacgctcgccacacgtgacgccgtgttcttaggtggaggaccaagctacgtggtccccaccggacgtcgcgatggctttgtgtcgaatcctgaagacgccaatgagatcctccctccaccattcatatccgtcgaaggcatgttaagttttttcggcaacaaaggaatgaatgtttttgattccgtagctcttttgggggcgcacacggttgggatcgcgtcttgtggtaattttgtggaccgggtcacgaactttcaaggaaccggactgcccgacccatccatggaccccactttggctggcaggtaattgaaatctggttaagccgtgtttacgtacgtgattaactatagatgggttacgtactttacgttataaatttaatatttctcatatatataggctaaggaacacatgtgcggttccaggcggcttcgcggcactggaccagtcgatgccagtaacgccggtctcattcgacaacttgttctttggtcagatcagagagaggaaaggaattttgcttattgaccaactgatcgcaagcgacccggccacttctggtgttgtacttcagtacgcgtccaacaacgaactattcaaacgtcagttcgcaatcgcaatggtgaagatgggagccgttgacgtgcttaccggttcagctggtgagatcaggacgaattgtagagcattcaactaaagctttataacaagtttctatatctgattattgattgtttttcccttaatttccgcttctgatgatgaattgtgaatggtgattgtttgcctatatatgtatgtacgtatatctttaaaataaggtttggtgaatcgatttggtaacaacaatatgttatgttggtacgagttttgagtgaattgtgatgtattttagttttttagagtccaaaactaacttcagagttgcatatttttcatgctcaagagcacttggatacgtaatttattttctggctctatccaattaatttgaattatagaaagttccattctctcaagattttgtaaagattataaagattttttataagatcttaagagttaaaactgtccaataattgaattcatctctttcggaaccatgcggaagtcttaccactgttgaagaatccaatagaacaattcaaagttatagaattagttgtagagtctaacttagctttactaatatataatacatattttatttcttgatttttgttttcttcaatatcgaaacgacgaaaccaactaaaacgcactatggatactttcaatatttagcagcaagcagctgacattttccgacatttatagtttaccacataaattttacgataaaataaattatttttacaaagaaaataggaaaatctaaactagttgaaacatacatcttaccgacaataaaagattaaagattctgtcgatatctacttttgcttataagtattattatctctttaagtacatcatcaatacacatcatatatatactgtttatccaaaggcaccggaatgtttccctttacgtttatagtttcacctctctaatttaaataagtttgacttacacgtatgtatagttatctgtagtggatctcattatgagattctcatagttctcataactcatagtccaatctttgctaattaattatcctatcaaccagagtatataagcaatggatgaaataaacgaacttaacaattaatatttgaaagctttatatatacagtttaaccagcatatgtgcggcctcaggaacccgtcaaccggactggacaggtcaacaccgttgactttgataacacgcattctttgggaaaatccgagcgaggagaggagttttgcaacttgaccaacggctcacaaccgacgaagccacttctagtgtggtggctcaatacgcagacgacaatgacttattcaaagtgggagccgttagtgtcctcacaggtgaagacggtgagatcagaacaaattgttgggaattcaacgatagttaaatttgttttttttgttttttcatataatctgattcttgattgtttgttcgtgtgtgttttttccaccccgattattgtcaataagtccatatgttatgttggttcagatttgggtggcctgtgttgtgtttgagttgctattttaattgtctttgaaattatatatttgaaatttgattttatgataaataattttgatatatatatacatacaaattttacttacactgttacacactcaaagttaccgacttcatttaaattgaaaatatatgtactaaatttatcaaatgacctataaataatccaatcgattcagtccggtgactcggtaactctgaaagaaattcagcctctgccatagtttggtgttaaaaaaaaacttttttttgtgtgttatcgttgaattacataaatgtttgtgttgttgtagcctcacatagtcacatacgtattgtaggcctaaaatttgaactacgtaacacagcctaaaatgggcctcgttagtcgttactttgttacactagtcggccttattacaagtcatattcatagtatacgtaaaatcttttctttttctttttctttttttttagtatacgtaaaatcttatatgattacatatttttggaacgcacccaaaattaaatatgaacgtagtcactagcagtctaaaacccatagtctcatacaaattaattactttatatttttaagtgtagaccacctcatcatgctgaattgatgtcaatgaattcatactattaaagtattaatgttcagtcaaatgtaacgcaataaattacaaagtaaaacaaagttaaaaggaagaaaaaaaaacgaatcgatattggacttgataaattgatcgaatctcatatggatcccaaaaatgaaaattttattgaagtatgaaaagtgccaatgtcaaaatataatatgcataatataaatgaatgcatatgccatctataggcagtcttctttatcctaatatcaaccaagagcattatttgagtattttgaaaacttaaaactgtatgttacatatcatcaacaaagtagtctggactaggtatgctataacaagttgtagtacttttttagagagggcactaatatttaatagttttgatcggacaaattagtcatggacactaaaaattatagaaattaaagacatctttaatattccctttaatagacacttacacacgcgtacagaagtagaaaaaaggggcataactaactagaatttatatatttagaatctagtcataataatagtactaataattaaaaatggatagtgatgttttatgctcgtgtgtgacattaggaaagatactgtctttgtttagttcacatgtccttttcacaacaacattgccatttgtctgagcaaaggccaaacatagtgccggctaatgatgattaattataactttcgcacgtaattaacattccaaattaactgaacatatataaagtataataaatgcatgaatctgcctagctattatttgatcattacatatagctttaggagtaaataaaaagattagagtagctttaggagtaaataaaaatattagagctttagccttttggctcattttgtgatggcaacgcattcaagtgcgagacacatcagtgtcacttgaaaaacttaaggattgtttttttttttttttttttaagatctacttgactttttatttttaaatcaccttgcgccgttgtgtttaagtgttttgtaccaaacccatatacagtactgttattatttatggaaagttatgtcgacgttgtctcaactctcaagagaccctatgataatttggtaatttcagctaataatatagcaactttatcttattgatagagatagggaacaggagataaaattcatgcaaatttcttggtggcaaatattttggatcaatcttaaatattctcaaattcatgcaaatttaaaactgcactcgatcgatatgatcagttaggtctatgaagtatttaaacgaagtttacttatgattttactatccattgtctttttgctaaaacattaaagaactacaacacactcttaatctgcttaaaagattatctaaacgactgtgaatccttcaaacaaaatatcttctgaaattaagaattaaggatgagggagtttttgttgttagttttctttaaaataaggaaaaggagagagatgattgtaggttcttgtcaggattcatgcatgctgcatatataaattattaaaaaataattaatgttctatgttgtagttttttttgttcttccatcttctttttgtccttttcctggtttttttttttaatatctcataagtgccctgcaagttcagtggacaaatccacaaaactcgactctttatgtcagctccgttggtaaaaactcaagtatttaatgatacaatgtatatggaatgaaggactatcataaatttatatcatgaatctcatcgagatctattaaagaatcatataatgttttcatagtttcttgttatgattttttttttcccattaggtcattaattgtattacttttttttttttgtgatttatcataatatctctgcgtatatttcttttgtattattctttttataaaatctaagaaatagtacaaaagttttgataaggcattttatagtcacatcttaaataagtgatttaaagatagtctttaaatagttttgaaaattgaagtaatatactactagtatactaaatatatataactcaacaacaacaacacaaatggtaattttaaaaagaaatactcttcatatgatcatatacatacgcatacgtagatgttatttatagtatatcataaaagttactttaacgatcagattagatatgattcgtatagtattttcttcatacctagagaatacataattgttaagttcttttttttttgttttcctgacacataattgttaattaaggttattacccccaaaaaccgctgtgaaaaaacgaaaaaaaaaaccccaaaaccgatgaaaatatagtgatattattaattacgtcgtcatctgaatctatcatctctaacacaaagacacattatgtatcatgtaattattcagtcgtgagtatatatagtccgtacatgtcacagagcaggaccacattaattccacatatctatgattttttaacgaaacaaagtctagaagtcttacaagattcgagaatttcaggaccgcatagatcgattatatgctaaactagggttttgtgaagcttcgtccaaatcctagacttattttgttttaattagagattgaacctagctagactctattgtctattcttttcctaactaactaacgattttacagtatctaatgtttatactgttttggtccagattttcagtgtacatatatatagtgttatatatggtatatctagtagcaacgtatataatcattttttcctaccaataggtgttcaatgtatcgtctgatatatataccccgatattcttaataatcatgtgaaaaaatctcaaaagaattgaaattttggtagatggaaagatataaaataatcgacacattttacatatatctgttttcacgtaacatatgagctcatctaactgttacgattgaattcaaacgatataagtagatgaattactctcgctttcactataacattaaaaaaaaaaaaaaaaaaaaacaattactgtctcccgtagagatccaataaaactggaacaatgccaaaacagataaatgaatagtaaaatattccgagaaatagacttattaaagtaagtatactgtattagttttaatcatctagctagctgtaataattgcatgtttccaaaagattaagtatctatagacaacttttcactttagctacaaaggttttgttgtgcgtggacattaaccaaaaaagtgaatttggtgtgggcgggtgaaacacatatcatacgttggtaaacaatcaaaagagactcacacttgtgccctaaaagcataaccacatgttggtcggtgtcccccctgaaatcctatatattcatataaaataagcttataggaaacttttcatcaacaataatatctttagaggaaaaaactaaaatatgtttttaatatcaacttgatagaaaatgccaattagcatctatataataaacagaaagatatacttttatcgaactgttactgtgggcatatatatatgatatatttttctctgtggtcgcttgatttagatagtatccttatgtttattaatattgttttgttttaaggagaaataactgaaatatttttctgaattattacgggatattaatcagactaaacgaaataaatttataaatgttcattgacaacttttattaattgagtattaatctgataatggaaaaatgtcatatatattcagacaaataaaataaaataacgtactttagaaaattttcgcgtaacttatttaagtgaattaaggagtagagtttctggatatctaaaagtggtttctctcagtgatttgatacaactagctgttggtgttgcttgtcttcagttcagtgtccattttaaaactatttaattttgtatttcacgtatgacttcctgacagatctattatctacacacatatctcacttccagagctattctatatatacatatatatatatatatacatgctaatattttaaaataaattaatctcctcatttttacctatttcaatttatttcgttgaagtaattatattggttaatggttaccattttaattgtatgtttcattgaactatttatatttaaatagtaataaatttctgtcaattattaaacttcacctttttacctaaaatattatacatcgaaactgagggagaaactatttattcgtgattgtagttttgattttgatttatttctatctaaaaatatgcaaagaaaattatttaacaatatagtaataaagtttcagaaaatttgtaaagtagaatgaattcagttatataatattaacctttatatagaagtattaataacatatacattgacacagatacagatagccgagcccataactatgaatatttacgtatagctatcatttcttgaagcaacaccaaacacataaacagcaatacatttacttacacagctatatgagaaaccaaaaagaaacaattacttattctacgtagttaatgagtattataatattaaaaatataaaaacgaaaaaataccaaaacagctatacaattatacagagacgacaggcaaaaacagagggcatctgaagaagcaagttgtctcctactgtgtctttctacactctactttttgcatacgtattcgcacactcacctatgtacggactattttattctccatttaaagtttaatatatacattctccctgagaaagaaagaaagaaaataaattatcttgatcatacatcattgtacactgaatatacaccccattcccatggatcatttgtacactgaatatacactaattcacatatatgtactttaaaaaaatgaatttcacatttacattaaataacatgcatgaatatgtgtaactctctactctcgatcgtaatcgttacggtgtgacataattactaatcgggaaagatccatgtatttatgagcaatggattatataacagtgtataacacattcacttgtgtggtaattaataaactccaagatccaatacaccatgagatgtttggttccatttagttgtattagttaagtttaccactcttataagtggctagactgtgtaaagaagaaatgacttaattaatttattttttaaaatgacgtatacagttcttttagtttttgaaatattaagatgcttgagttttggccaaaaaagaaaaagatgcctgagcagaaatctagactcaattaccaaggtacccttgagaaactaaatatctatttctcatcatttttattattgttttacaaacttctctgatcaactatgatcagaaaattattttttaatcgttcttagagtcttgaccaaagattttctaataccaaaaacatgctagatataaaccaaaaatcattgttctcatatgaataaaacaaacaagataatagagaataaatttacaaaaaaatgaaaaaaattactcgtagcgcacaattaaatcttagcagtcaaattaatatggtataatattattttgcacgaacaaaataaaaatcgaatggctacccactgtgtaagccatgtttacttaacgtcatatgtaataaataattgcacggttttttcttgaccttctgtttggatcgtccttctttattgctttttccttttttcttcttcataataatgttattcgaaatttaaaattacttaatatgccacaatatgtaataaaaaaactttgacatggtcaaacatatattcattttacaatctgtaaattatttaatttccttacaaaccattttacgaaactacccctacaatgattttcctcatttttgtaagtgttcaaaacttagtgacaaagaaaaacattttgatttttttcacctaagtgacaaaaaatatctttttaggcgcctctgtcgcatgacgccaaaattaatctatttcgctgaagaaaatacaaattaggtcacgataagacgtttattggatgtggagaaatatacaaagtaatgttaagatatttaataaattccactggacgcaattggcgaagtagtagtcaattccagttttatgaggagctcattatttgagagttattaagaatttaatttatttttttcatttactattatcaataatttaagagtaatatcatttgaccgccatgatttaatatttttgcaaacgataaatagtatattaatcgattataaaccatggatgaatagtactgcttgtgttattgttcttgatacaataagatttgttaattgtaaatctacaatgagtttttattcatttggctttttcacttgcagttgttgttgtcggatgttcatgtgagacagataactactgtttactaagaaattgtataactcttatgaaatgtataacttgtgttttaacattgataccaaaataaataaatgtataacttgtgttagaaatatatagaagtttttcttttaatttgctggtatattttgctcactgcagtataaaacctgtgtacatatatatatatatatatatatatatatatatatctaataatgtcgggatagtgtgaactttcgtctacaacaaaacctgatcattaagctatacaagttattgcttttgaaaaagaaagagtacttatttatcttctgatgatttatagagcagaaagatggacaatcataatcggcgacttattcatatactattttttttttgcaggtggactactggactgtacaatatgcgcctctccatttttcatattaacctcaataatattatacagtttacttattatttcggaaccgttacaataaaagttatatatccagtagtgaattataatttttatttacctcgaccttcctttttttggtagaacttatttaccttcttcaccttatgtggtgtctgaattatatttccaatgcttatgtgttcatgactattgatttttgggacggacttagcaaacactaaactagtacactgcttaagactggccttcaacgagtaatattggaccggactccgattgagcaaactaacgcgtctcacactcaaatgcattgaaataactagcttgaagccttgaacatattgtttgcaattgcaagtgtagttttggttttagaatgttttgttggcaacaacgttggagatttgaatacaatgaaaatgagattcaatttaaagcatatctgtctctctttttcttttggaagagattaaaggcttatttaaagcatatatgttacggattcaaaagattgtgtgtagctaatttttgtgttgtacccgttaccgcatatttttgttttaagcttggcacatacatatatatatatatgttgattacccatgcatatcaaagcggataagggatactgttaactttttggactatccttgttgcaaattttgcaatggtcaaagagaatttgcttagttgctatatcttcaaatgccaagcaacttccactcgtttgtgtatctccgatttaagactcaacacactcctatacaaaatataatatatgcttatatcattcaagtatattataatgaacccactaaaagataaagataaactacatgtaacttaataaacaaggaaaaatatattatttaagtaatcattctcctataaattcattaccctcaactcaccacctctcacaaactcaaaaaacaatttgtgccttctttttatattgtctccataaccaccagataatatcaatattcttcaaagcaatggaccaagaacaaacaccacatagcccaacccgccatagtcgctcacccccatcctccgcctccggttccacctcagcagaaccggttcggtcccgatggtcacctaaaccggaacaaatactcatacttgagtcgatcttccacagtggtatggttaaccctcccaaagaagagacggtaaggataagaaagatgctcgagaaatttggcgcggtgggagatgcaaatgtcttctattggtttcaaaaccggcggtcaaggtcccgtcggagacagcgacagctacaggctgcagctgcagcagcggacgcaaccaccaacacttgtgaccagactatgatggtgagcaacagcttaccacatcatagtgggagtgatttggggtttggaggttgtagcacttcttctaattacttatttggtgggtcatctcaagttccttccttttttcttggtctctcttcttctccttcttcttgttcaagctcctcttccacttcttcttcagctagctcttcttcttcttatggtggtggatgtgataatcaaagcaatagtggcatggagaatctcttaacaatgtctggccaaatgagttaccatgaagctactcatcatcattatcaaaatcatagctcaaatgtcacatcgattttgtgcccatctgatcaaaactccaattttcaataccaacaaggtaaacaaaagaaaaaacatattttgcatgactctttttttctttgtaagcgaaagtggtttatcctctaaaccctctttctttccccaaaaagtctctaaaactaactattttttaattgtaaaggttgttttagagtaggaaaaaaatcaattctgggtgggtttcaaccggaaaaccgatttgtttttatttggcgacttagttaataattgcttcttggttatttttttttatttttttttttgtttaatgcttcttggttaatcatgcttccaatattgcctaacattttgtacttgaaagcaagttctctatgaaggtttttttttccaggaaaaaaacatctctagatctcaattttacttgtaaaagttcttttaaagacaacataagaattaaaaaaattcagatgagtttaaccaaagaactgaccatttttagtagtagcttagttcttcttctaataatgcctaatcttgttcttgataacttattttatttaatctatttttcttacatattagtaaaaaattaattttgtaatacaggggctataacggtgtttataaacggagttccgacagaagtgacgagaggaggaatagacatgaaagcaacgtttggagaagatttggttttggtgcattcctcaggtgttcctcttcctactgatgagtttggttttttgatgcatagcttacaacatggtgaagcttatttcctggtaataattctaactcaaatatattttaattttttggtatcatttgtttgttttattgctgatcgaattcctcgtgaatatatttgttatattgtttggttttgagcaaacgtaccttttttttgttctgtctctcttttctctctctctctcgatcctcactttggtgttgaaaataggaaatgagatggaacccaattggggtaaagtcctaaattgtctgctgcaatatattttaatcatcataatttaatattagaaaagttttcgtatagagaaagagaataatctaattgatgagtgtcggtttgtgcagtaaatgaacatgaatttttttagagatagtttctgtaactgaagttttgtgatttgacgatgattctcacatctgaatcaaacatatatttatattattttttatatgtgctcttaaataaaattaacacatatacgtatatcaacaatttattgaaatcttattgaattcatttaataatttttcctgttaaccttagttctattaataataatactttagaatgtatttggtcacactgataaatagatgctgaaaacagtatgccaaaagcaataatcaactatggaaattttagaaacttaaacaattgttcaaactacagtatctttgttatcacaatataaaaattactgttttgatcaagaaaaaatcaaatgccagtttgtacaattatcttataaaatagctattttgatttccttttcagcatttatgttctaatgtgaatatattatgtactatacttctatcgaagatacctgtaactcttacataatttatgcatgggagtcacacgtatatatgtgtgtgtatatgtatcctttcttttccccctttttttttcctttttttgtggtaaatagtcatattagaaagtcgtggggtgaagaaatatttattcgtttcctaggcaaatgaaacaatgggacaatataccctctcataatttctgctcttgatcacaaaaacatttctctacaaatttgagtgtcaaatttggcattagggtttccccctctctctctcccctccccccttacttcacataatgggatcctatcaagagatcttttagatcgtgtttatttttgttttgctttttcttgtttagtataaaagattttcttttgttatttttgttgttttcgttttgttatcgacaggttccaagacagacatgaactggctttactcgtatgtgtggtgatgcaacagatgtcttgtttttctaccttggactttattgcaacggtccttccattttttcttttcttttcgagtctatcgtataatcaaagtttcttctattggtttttttttaaaaaattttattttgcaatttattttataaagatgaagtcaaaagctcttgtacgacgaagatatctaggttgtatcaatttagttatttagatgtaaaatacgtatgtataattgatttgcaataaaatctctgtctagggatctccatgttccttatcatcaaaaaaataaaataaaaatcgagacctgtcagatagatcaacatggtaatatgatgtgaaattatttaggtggaagtgcacagttgtaaatccgattagttaaagactaggatactcggatgatacaattccaaactaaaagcgatactgatcgagatgcttggagttgtatgtgcgacatcgagtaaaatgataaaattctccaaattggccatcataagaacgtgtttgaaacggcgcgcatcataatgaaatgaaaatctaggattcttaagaataatggtcctttttaaaaaagcatcatatatattcactcacatagacaattaactgaagtttgctcaaaaaataataataattgaattcgatgtatattctatgaatctcatttgaaataataataatgagtcatttctactctaaattttcaaagaagagaattcaaccaataaacttcattatattttgaaaaatataattttagcaaatcaaaagataatatatcctgctattattataaggcatgttagaaataaccaaaaaaaaagttaagtggctcaaatgcatattaaacatacacaaaacgatagtacttaatgaatgtgagccatgtaaattagtaaaaaggttagcttgttaataaattaattagtaaaacgcttagtgatctgattttaaaccaaattcaatattagcatatcagtaccgatatggtgatatataattcggattttattagttttaatgaatatatatatatatatatatatatatatatctacgaaaaataagaaaacaataaaaaggaagagcataagacagctgggttcatcagatttctattcttgtcgattcctgctctccgaaacacaaaccttaattaacagctcgaagcaatatcttaatcggatagtgaagacaaatttttatttttttatagagccaacttctgcccattagatttagatctaaccttgtaaacatcaagtacaaggttataagtattgaactaatgttcacttaataaaatctgaaggacaaaatctataaattttagaaattacgcatagacaaatccaagataatttctttataaacttttttgatccctctccgtaattatatagggtggcacgagcacatataatattatgttgggtgaacacaaattgtcacatcatatatagtagttgtatattgaaactaaatttgtgtagacgagatcgatataaataactcaataagcagagcttagataaactgaatagaatatgtgttgccattttatacagaaaatattcaatattcaataattaatgttatactagcgatagaagaagattatttagatacaaaaattcgtattaagaaataaaataaagcaagtaggcgacaacaccgaccactataaccagtgactaggagacgcatgtttggttaattcttgatttcccaactcaaagaagaaagcatatattgtgagacttaccatattgatcttttcaaactctctccacacattttcctattggctcccatgtgggtaattaattaacttttgtactttggagatactcaacctttttagcgtttgtactttttagcttcccacattctatgtgtatttttttggtttctgattttgtttgttgactaatcttgttaaagataataaaattcggcagtgattaaatgtatgtaaccagcccataaaaaaaaaaacatacggctaatgaaagttacaatgacttgatcaaatatggccacatgctcttttctgttggcccagcccaaaatatcgtaaatccacaaccaaattggcctagcgtaaatattttcttagtaacattagttttggaatcaagatccatttgaattagttgacaagcaacataattaaaattcaaaagagctgtcaggtttcatcccacgtaaacgttgacagaccaaccgacgatgtgatttgcacatttcatttacagaattatatgtactttttcatccagaaaattgttttttttttggttaattaaattaaatatctacagacgttacgttatcaatgaataattaaggagtcacttaagatctttaaaatactatcaaatgctataaaacaattagaagataattatgcatcattatttgtagttcttaaatagaatcacctaaaaatgcattcttttgagcagcttcatcagtactagacgcagccgatgatgtggagttgtggacatttgggttcaaagcacgaatccgttggggaatcacggtgaaccacaagagcttgtgcaccagtaggaaagtacttttgtaacctaataaaatatgaacagtaaactctgtcagatctaataaattctctttaatcaatcataacgttttgaccatttactaaaattctgactaccattaatctacgcaaactttttactatttcaaatatatttatttccttcaaaatcagtggtctcagaaatactaaacaaacatttttactaaatcaaaactataggagtaagtaatattgatacatattttaccctttttcttgatattgtttttacgctaaatcaaaactatatgaataagtaatattgattaccttttccttaattttttttatgctaataaaaatcagactttttttggttaatgatagaaataaatcctttggttaaacaacaaattctaatatcgttttgattgccccgcgtctcaagatcaacgacgacgactcagtttcttccttcacaagcgagatagatagagcaaagagcgtgttgtgttgtttcttctctcttcggcgttttcatcgtttctcatctacctcgaaattttctcgtcactctaatcaaaaatctcacttcgttattttctcgggaaaaatttcccgatcactaaacctagtttttagatattttctctcctggattctggatctacacaatctttcttcctcttcttctatgaatctgttcatcgtaatttcagattcttgatatatgattccttttctccaatctcttctcttagctctcagagatgggtgagaaaacaaactcacgttatctcggtgtaatcatcactcgaaaatctataattttcttgttcatatcaatcatcaccgtcctttcttggttttttatcttttcttccacaaaccctaaccgagttctcgatcacatctcagtatcagaatccacagatgtacctctcatcatcatcaagaactcaaacagttctccacaaaacaacgcaccaaaaccccaaaacagagaaggagcagaaacagaggaacccattaaagaaaacagaggaggaacaaaaacagagtcatccatgaatcaaaacagaggcgaaaccctccggtgtatccaaagggtttctccttctccaaggccattgaaagtctacatgtatgatatgagtccagagtttcattttgggttattgggttggaaaccagagagaaacggtgtcgtttggcctgatatcagagtcaatgttcctcaccatccaggtggtcttaacttgcagcacagtgttgagtattggctcacattagatcttttgttctctgagcttccagaagattctagaagctctcgggccgcgatacgtgtaaagaactcgagcgaagctgatgtcgtgttcgtgcccttcttctcttcattgagctataaccgattctctaaggttaaccaaaagcagaagaagagccaggacaaagagttgcaggtaactatatccaaatatttacacattttgttatttttccttaaaaagtttcattcttaacattttcctactgattgcgtaaaacgttgaaatatactaaattgcaaaggtttaagtataatacacatttttctaacatataacgtaatcacaaactcaaatgaaaaaagaaatgtattcgtaacgcaacaaaatgaaataaagtcaagagtgtaaacataatctacaaataacttgacatgaatcttataaatttttgataggaaaatgtggtgaaatacgtaacgtcccaaaaagagtggaagacctcaggagggaaggatcatgtgatcatggcgcatcatccgaatagtatgtcgacggcaaggcataagctatttccggcgatgtttgtggtcgctgactttggtagatactcgccacatgttgccaatgttgacaaagacattgtggctccatacaaacaccttgttccatcgtatgttaatgacacatcgggctttgatggccgtccgatcttgctctacttccaaggagccatctaccgcaaagctgtgagtactttgcttgcttatgtgacatagcctattatctagacaatattctcaaaaccttttaactaacttgattccgattcatacgaaaacgatcttatcgtagggtggatttgtgagacaagagctatataatcttctcaaagaagaaaaagacgtccacttctctttcggaagcgtaaggaaccacggcatatctaaagccggcgaaggaatgagatcgtccaagttctgtctcaacatagccggggatacaccatcctcgaatcgcctcttcgacgccatagctagtcactgtatacccgtgatcattagcgatgacatcgagttaccatatgaggatgtcctcaactacaatgagttctgtctctttgtcagatcatcagacgctttaaagaaagggtttctgatgggtcttgtcaggagtattggcagagaagagtataataagatgtggcttcggttgaaggaagtggagaggtatttcgatttgcgttttccggtgaaggatgacgagggagattatgcagttcagatgatttggaaagctgttgccaggaaagctcctttggtgaagatgaaggttcacagatttcagaggtttacaaggcctttttagggtttctaatgatattttgggaatttgatttagatagaaagataatgaatacagtttccaatgcaaccatgtgaatgtttattacagtcagccatgtgaagaaagaggttacttgatctagacgatgcacaatggttacgtgtgatataagttacttctttatttattatataaactacatagatcgtggattacactcttttaagataaaaacacacataacatcatatgatcgattaaacagagttgcgaaaaggatctctgatcatttataactctttccttgaatccgaatctaccttcgactgaatcgtgtccgggactttctcaaggagcttggagagccacttggcagattgtttctcatgccgtcccatattgtgtccatagtctacatagtacagtccagacctcgtcttgtatccatcttcccactctagtccatccataagcgacgacacaaagtaacctttaacattaaccttgtcctcgctgcaaaaaccaaaaaagttttagatatgaagcagaaacagtttttatttttattttttatcactaattccagcaactagagaagaagaaacagagttttttggaaccgtgaaaagtaacttaccagactgctccatgtaatgccatgagatgtctcatatgataatacttcctgttactatcgctgagggcatctggaagtacatctttctcttcaagtgtctccttgtaccctgcaaatgtaatgaatttagtttcttgcaaaggaaatctgagtgaatgaatctttaagcagagagctacaaagccaatggcttaccgtttccagtgactatgatttctgggtcattgtagttctctttgatgtatttcaaaacttttcttaacccgtcagcgcaaacaggatacttcgcagtagcaggctgaagcattatataagaaagagacttagaaaaagctcaaaatcgtgtaaaacaaagagaactttcgtatcgatgacaaatgtatacctgagaaccaatcttgaacccatcaacgttattcgctgcaagcaaatcaaaaaaggattagagaggaagataagtaattatcagaaataagcaagaactgtaatggttaggagtaagagcatacaatgtaactgcaagcgagaatcagcttcccaactcggtttctctggattaacattgtccgtatgagcaacaaatgtagaagtgaagtaattgataccgacaaaatcataagaacccttcagtttctccttctgctcgggcgtaaaagatggtaatcgactaccaacaacatctttcatggcctgagggtaatctccatgtgttattggctccatatgcctgtaaacagcaagtatccacactcaaaacactaagcttaataagtttgctcaaacaatatttcttaaagactactcaccagcctagagtgaaatccatagctctcttcactatctcctctgaaggactcgaggtggatttcttatcataaggctcaaaccacattggactttgaacaattccgatctttccacctgtgcactgtttgttttaaatccatggattagctcaactgaaattcgagtccaaatctgttgtgattatcctaacattcttacctttccacatttcctgaattcttccacagcttcggcatgagccaacagcagattgtgactaacagtgtaaacttcatggccactcttgcctgcaacacatttctcattgacatatttagaacatcttcctggtgctttctctccagtctcgtatccaccacgactaaattcataaggttcgtttatagtaacccaatgcttcactctatcaccatatttattgaaagcaaactgtgcaaaatcacggaaatcctccctatatatgagtttcagaacatattaagtaactgcaaaaagataggagacataactgagataacatagatcaatatttggcttagaggacttacaaaatacggtcactcaagaaaccgccgtattcatcttcaagagcctgaggtacatcccattgaaacaatgtgacaagaggcgttacacctgcaaaactcaatcaagattgccattttagccacaaggttaaaggaaaaaaaaaaggagatttcatatgaaataaagatgtgggggaatgtgtaacaaccatttgcaatgagctcgttgataagatcattgtagaatttaactcctgtttcactcactcccttgtcttttttcccatctgattgttttcaacaacaaaatgttgttagaaagtgcatctcataataaactgcaaaagaatcattaaccaaagaatagatctttgtcttacggggaaatattcttgaccaagatatagagaacctaaaggcatccatattcagttttttcaatagttgaacatcttcctgcaacattttcaaaaagttagattagatcaacatcttcagtgggaaggattgctcgtagaacaatatataccttgtaatgatgatagaaatcaactccgagcctgccgtcaagattgttgttgctttctgcagattcaaataacatgctcatgagttaataatcacaggacgagatcgaattctaaactcataacaatggctcagttttataatcttctgacctgaatgttgtttaagagtgaatgagtcccaaatgctggaacctcggcctccttcttctgctgcaccttcatgctatacaaacaaatgaaccaaattagaaacgtttggcagtagaagaggactatcaataagtcaatcatgaaacttgaagcatcatcaacagaattcaaaagtgaatgtgaaaaagaaactacccttaggcattaaaactagagacttgaaaatgaccaatgactgccttgaattggaaaaagctttaaacttttccctttcaagctatttggtttggctaaagataccaaatttgatttctttaaactagatttgagattaaagactttcttaatcgtacttacaaagctgctagagctgatattagagtaaatccggcaacgaaatattaaaactcgccggacaaaaagaatccagtcaacggcgattcaacaatgtttggacttataaatcccaaattcgatatacctggaaagcagaagttgtagcaccgaacaagaaaccatcaggaaagcttccacgaccaaacgtggaactcgccggacacacagctccaccgtagacggtgatcggagaaactatcacgacgagaaataaacccaaaaagagaatcgctttgagtgccatttttcaagtaagttttttttatgcttaacgtggttgtcgtgttccattatttataagagtcgagatcacaaagaagaagaatttaaaagatagttgtttttgagatccaatacttcgtctcgaagattaaagcaaggtgagagcgacgtgtgtgttaaaataaactatctttgatattgtacatttaattttcgatagcttagccttgtcttgtcgacgacgatggtagtagtagaagaaacaacgttaaggttccttcttaccacggtaaaaaataaataacaacaaccaataattgtaattctataacttaatttttgaaaaacagtttttaatttgaaacaacataattttaccttttatacggactaatatatacctacgacaaaaaaaggactaaatttatagctaatttttttgttttttttttcaatttatattagttagttggaccgacatgaaatatttatttaccttcaattaaagaataataaaacaaaattatctcagcaaaattaattgaatttttttagctgacacgtcaccatctttatgtttttttaattcatttatttccatttggataaaacagaaacctaatcccttaaacctcgccggcgacggaaaatggctttcgcgtctccttcgctccgtcttcttcctcagtctccgttaggtcgaataacatctaaactacaccgtttcagtactgcgaaactctcactcttctcctttcaccatgattcttcatcttctttggctgtcagaactccggtatcttccttcgtcgtcggcgctatctccggaaaatcctctaccggaacgaaatcgaaatccaaaaccaaacggaaaccacctcctcctccgccagtcactactgtggctgaagagcaacacattgctgagtcagagacagtcaacattgccgaagatgtcactcaagtgagttcaaaggattcaaattttactaagcttatgagtaaagagacgtttttttcttattaaagattagattatgtgatgaagtttgataatttaggattcgaactttgtttgtatagttgattggaagcacaccaatggtctatctcaatagagtcacagatggttgtttggctgacattgctgccaagctcgaatcaatggagccctgtagaagcgtcaaagataggtcagaatgattcttcgtcttctctaaattatcagtcttgtggatttaacattcttaacagttttccctttctgcaggatcggtctgagcatgatcaacgaggcagaaaacagcggagctataactccgaggaaggttattgtacttcttgcctttcgatattttaatgttctgtgttgccacattgtagattgctaattcgatggtgttattaaagcagactgtattagtagaaccaacaaccggaaacactggccttgggattgcatttgtggctgcagctaaaggctacaagcttatagtgacaatgccagcttctatcaatattgaaaggaggatgcttttacgtgcactaggagcagagattgtgctaacgaatccagagaagggtctcaaaggagcagtggataaagccaaagagattgttctcaagacaaagaacgcatatatgtttcagcaattcgacaatacagcaaatacaaaggtaagaagttatcgagcttttactcttttaattttggatatgaggtgtgtggcctaataaggtatttttcttatggtttgtttggtaagatccactttgaaactacaggaccagaaatctgggaagatacaatgggtaatgtcgatatattcgttgccggaataggaactggtggtactgtaactggtactggaggtttcttgaaaatgatgaacaaggatattaaggtatttctctttctcttgttttcagatttctggtttaaccttgtgattacctttatatgaaagatccttaaaacataggtagttggcgttgaaccatcagaaagaagtgtgatttctggagacaaccctggtaaggagcattgaggcttcatgtcttcagaatcaatacttttgaattgggtttatatgctttggaatcccccttacaaaatactactaaacggtttttcaggttacttaccgggaatcttggatgttaaattacttgatgaagtgtttaaggttaacaatactttcaaatcataatcaacatttcaaacgatacatctattgaaaaaataaaagaagatcatgttgaaaaacaataggttagcaacggggaagcgattgagatggcgaggagactagctttagaggaaggattgctggtatatatgataaacctctacttatgttcttgcgtctttcttatacatgacattgggtttaaaacttttgcaaaatctatacaccttaggttgggatttcatctggagctgctgcagtagcagcagtcagcttggctaaaagagcagagaatgccggtaaactaatcacggtgagtaaaaacagattgacatatgtagtaatcacagttggtggtttttagctctaataatttcgtaaaacaggttctgtttccaagccatggcgagcggtatatcacaacggctctgtttagttccatcaacagagaagtccaagagatgagatattagtagcagccattagaaaagcccccaaagtttggtccttttggagagtgtaaacaacaaatctctttgcaatacagaaaagagaggtataaatggtgtttcttttttcttttcttcttgctcaaaagttcaacttcctgttgaggtaatcttacaagccaacacctgtacaggtttcagaagactgtgaggttagagctcacacgagaactgagagataaacatgtctcgagcccaaccagttttattcaaagatttgtgaatgtatagaagatcatagaccttgttgcattattcttcttcttctcactcatatgtcagggaagtatgctgaacaaataaaagtttgatcatctaaaccctgaaattgatttgagatctccaagattggaaaaactcaccgagagcaagcatgtatgtacattatatggtggttagaactcaaaactttttgcctttgatgataacaaaagatatggttttattgttccctttggatttgttaaacagttaaaagagagcaatcggtaagatacaagaatgagtgtgaaataaattttactcttggtagaaggaaattggataaaaaaaataagaagtcgaatctttaaagagatgagcacttgtgggcttttgcgcatttgacgtccattcctcaagtcgaatatccgcatgtgcctaaaagcccaacgaaatatacatgaatgcacaatttaatacactatgacccaaactctgcccaaaaatatgtatagatagaaatgagtcacaaatgtaatttccataaaagagaatgggacaagattttacagatggaggatattgggtggaacagtgtacacgtgcaatcttactttctccgtgtcttgcataacgtggcggatttgtagggacacctttgtatctgtattatcaaagtcgtagaaagaaagcattgtcgaaaacagcatgcagtccatatttattatgagtaaacaggcagtagttttcttttaagattgtaaagtaacgtgtaacgagttttgagtggtgactcagcatgatgtattatttcactctttttttttttactgattggggttgggggttgggggtggggggaatgattagaaactccagtttttaaattttcaaaacgggttgataataatctgatttcttcagtagtatgaattttggagggttagattaaagatttggtccatatctatatcgcataatgtattttattaacaagaaaacaattgtgttgtaataagttttgtatattttttccggcattaattttggatatatctaataatacagagaactacaattcaaaattttctttgtaagtttacatatgtacgaatacacacattacacacacacataggttagttttctagtacatcataatccgtttataccccttgcaaatctctattatatgtctatagattatcaacacgtttcggttttactctgacattttttcctaaaaagaggaaaaccaggtaacttcagttttacaaatttattttattttctctattattttctgttgttcgttttcgccaacctctgtctctcttctctggtcttcttcgctttgagtctttccccttgaactaaggtaactaatcactctgtacttcgtagattcagtatatataacaaaagtgcatctgtgtgttatgttttgatgaatcttttgaggtaagaaatgagtttaaacaaactttattagctcatttcttgatatataactttctcctggctgacaatttctataagaaagggattgggaagaaaaaaaaaaaagagaaataaataggattaaaaaaaaaaaaactgtttggaattgcatatactcgtgaaaacttaaaaaacagatttttttttttgtttttgttttgttgcttttttttttccaatgaaactcgttgtaaatatatgtgtgtgattttatgaattactaatatgattaatatttatccgcctaataaaacacattccattatttcgttgattaactaaacaatttttttttttaaagttcgaaagcttataaacctttatttctttcttttttttttgttagtgaaattatcagattagagttaaagaacggaagaacaaaagaacaattagaaatgagtactcaagaagaaatggaggagaggctattacgtgaaggatcagatgctgagggtcagagcaataatagggagagtatctatttgagaacgaaggtctggagtgaagtaaataaaatgtggagaatagcattaccttcttctttgttccgaatgacttcgtttgggagcatcattgtggctcaagccttcattggtcactcctctgagttgggtctagccgcttacgcactcctccaaagcacattcatccgcttcctctacggtttaatggtataaaaagctataaatgcaacgttaattaagtccgttacttaaagaggaattagtattttagtactctttgtggtgttaatatgtagggcggtatgtcaagtgcaacggagacattatgcgggcaagcatacggtgcggaacaatatcacacaatggggatatatctacaacgttcatggatcgtggacatggccgtgaccactttgtttctaccgtttattgtacttgcgggtcccattctccgtctattaggccaaaacgtggagatcacaaagaccgttgatgagatatatccttggatgattccgtatgtatatagcttaattttcactatgactatacaaatgtacctccaagcacagatgaggaacgctattgtaggcgttctttcgacattgtccttggctcttgacctcgtggtcacatggtggtgcgtgagtgttatgggtatgggcattggtggtgctctcctcggacttaatgtgggctcttgggcaatggtattagccgagtttgtgtacatttttggtggatggtgtccttttacttggaccggatttagtattgctgcttttgttgacctaattcctatgctcaagctttccatttcttcaggcttcatgatctggtaattaattacctattctttttttgtttttttttcttcttaacaacttcaatattataattccaaggcttgaagtgagatttctattgaaggagtaatattattattttttagcataaagttatgttatgttaaatgttctacttttgttctctaataatcctcttctttacaattttcgttcagcttagagtattggtacatgagcatccttgtcttaatggcggggtatacaaaagatgcgaaaatcgcaatctctgctttctcaatatggtaaaagtcaaaaccttcatagctaactaaatttcagttcaaaaggctatattaaaaataaagaaattcaatcatcttgaaaattggcagccaatacatatatacatgggaactcaacatatgccttggcttcttgggtgcggcatggtaatgctcttcatattttataaccaaagtttgaatcttgaaaaatattcatacatggatttaagtaaaaaaaactaatgtttattctatgcaaatgtaattgtagcgtccgggtggctaacgagttggggaaaggagatgcacatgcagtgagattttcaataaaagtgatactcacaatatcaacattgatgggagtgatattctcagctctatgcttagctttttgtggtcgaatttcctatttgttttcgaatagcgacgaggtttcggatgcagtgaatgatttatcggtgatccttgctgtttcaatcttactcaacagcatacaacctatactctcaggtcacacatctctataccctcttcttatctatgtgaatgttcatctgttggtatttactttgcggtattttgatttgtttggtttatgatacatcctctctctactttagtaggaatcttattttggtttagcaataactgaatcaaagtttaacaactttaaatggttataataaaacaggtgtagcagttggggcagggatgcagagtatagtggcagttgtgaacttagcctcttattatgcaattggtattcctttgggtctcatccttacttatgttttccatcttggtgttaaggtactactagttccttttgtttttttatttttcattttcttacatataactaattttttctttttttttaaaacatgataataaatgacatctattgtctaaaatttgcagggactatggtctggaatgttggctggaattgcgatccaaacaataatattatgttatataatttacaaaactgactgggaattagaggtagcaaattgaaatttcttgtttattccttgaaataatgaatttgttgctaaacagtatataacgtaaaatatttaatgtaggttaaaaggacatgtgaacgtatgaaagtgtggagcctgaagccatctaatgaagagtcgaatcccataataagagaagaaagtaggagcaagtgagaactgtttcgatattatacgtcgttaatctctcgtagtctcgtagctatatggtttctaactaaactttgattttcaacaataattattatatgtaccgcaaggaggtttcggatcattgttgaccatggaataaatttctccatttgggagattcgatttgaactgaattacttttatctttattttatttttacttatttcatcataaattgaacttaacacatatatcgatttttgagattaatcttttatccttgaatttattggattgcaattattttaaatgattatgttaaatattttttcttcctttttcgtattttagtttattctcggttaaataactctggaaaattgaatctctttgatagtaatataattctgaaaataactcgggtaaaatttatcgtatatctctgacgttaaaatgactggctacttatcgtaaaggactagtatacatcattttcacaagccacataccttccacaaacttatcttcaccatccacttcctatacattcatctacaccatccacatcctttacattcactagcatccacatcctacacattcatcatctacaccatccacttcctacacattcatctacaccatccacatcctttacattcacatataccatccacatcctacacattcatcatcgacaccatccacatccatctacaccatccacatcctacacatccatccacaacttgcacatttatctcatctatacaatgatacgtttacacacactacacatacatcctctcatcacacatcttacaagcatttgtaaatatccctatactcaaatcattattacccgtctagcaccttcaaattttgatttctctattccgtaacattctcccttcgtgaactccatcatcattactcagtctctagccagcacctttaaagttatatgaatgtgacggatcggatcagtctccattttcattttgtgttccccataaacctctgcaaaatgacaaaatcagattaatgatccatttcaatccatttctgaaattttggttcaagttaaacatgtaagtatcatacaaattcacaaaatcaaaaacaattttcccgaaactaaatacatttcaggcatgcatcgcccattctgaattttattttaataaagaaaatactaagataagagagtatgatcaaaatgattaaatgaatattcaacgcgacaaaatcaattattgttgactatcctttttcaagagaaaattctaatgtaatctaccaaatcaacgaacggtgagaaattcattaaaacattataaaaaaaacagaacctcagtttttagaattgattttgttaacttctttaccatccccataacacatgcaaatcattgaaaacaacaacaattgtaatccccatcttatcagtattttgtgacctatcagatacatatctcaaatgttttttttcttaaacttcataaaaaaatatgcaaggtgtcggaagcattgaagtttaagcaaaagtaaacaaaaaggatcagagcaaaagcgttacctcataggcttgtagggtgatgtctttcagtagcttgtggaatgaaaacaggggagagaagaaacttgagtagtcgaacatatcataagagtaaaaacagagagtatttggactttcgaacaaaagagttttagagtaagtaagaagatttttcttatgtctgaacgatggaagacgaaggtgtagtatatatagagattacttctaacggtcgaataagttaccgttcgggtaaaatattatatttttaaaagttatcgtttgctaattttgggaaatttggtattaaataaatttaaatttacaacggttagaaaagttaccgtttgctaattatggggagtttctaattaaataattcacaacggttagaaaagttactgttcggttcaatttaccttttctctaacgttccgactgatgttattggtgccatagacatgtagactacacacgtggaaaacctctttaataaattctttcatatttgatttttgattttttggttcgaatttaatatgattttctatgtcgatattaaatcttctgatgaaattatacttgccgagcaatttcagcaaaaactgattatttgttacactgaatttctcagataattattatctaaatacagatagaaattgtaggaaatttaacaatttatttgtacaaaagattgaaagcaggcaagtctgtgatgcttgaaacatcatccagtgccagctcacgttccaattgtgctctcgtcgatttcaggacgtcctgcccaaaatcaaaaaccggttaacgcataaccaccgagaaaacagattaataaccgaatcagaaattccaaattgtaacaaggcttggttcaaagacatttacattgaattccatgtaagaagctcgtctagcaagccattgtgcatccatcatttggaaagctatacagtagagattatcgaatgccatttcgtcttcttccagaaatcccaagaatcttatcccggctattgttgatggtttacctgaattgaaacacaaacacatttgacggtatgaaacaatcgatcggtttcacgggcaaagaagggaaaaggaaatgaagcttgatcagtttttagctggtttcttgagcattttttacctgattgaagatctaacatttgtgccagcatgaatgagatattgatgccagccaccgcgaaaggatattcccattccgctctagttccatcttgtttatgtaacaatctctggaatgattcctgtcataatgatatcacaaatcttgttaggatcatagcgactcagagataaaatccctatacttagaattgtaaaaagttattagttctcttaaatcaaaaatgtagatgagaattagagatgcatcacagaccggataggtcttcgcaaagaagattagattctccagtgatatataccctccacctctacaaaaaccagttaatgaaaccaaacatcagtaaaatgactagatataagaagatttgcatgaccagagctaaaattgtgtaccgaaaatctgttgaagggtctgttccttgccaacccatttccttccagagttcagatttaagaggtggtagttctctctgtggataagctagcctccatagttgtctaagagcatcctgtgaatcatgagattacataaatttcgacaaaacattgcatgtgcataattaatatagagaatcaagcaaacagagagtccatgagaacacttacttgatgctccattcgagatccatcaaatgggatttctattcttcgcttaatatttctcagcctttcttcctaataagaggcaagaaaatacagaatggagatcaaattgacagtgacagtcaaattgaccatggataactggaaacaaaacaaaccggtaaaattttaaaaagcaacaaaaacaagcaattgagaccataagagaaagtcatcattttactaagtaagcttcctaataaaccacatacacaagtaagagacttagaggcaccaagcagaaacacactctgataaattttctaattctatacatctctttgttttccagagttaccattattcttccaaacacaagccaataaaaagtatttgtagtctacaaatgagacagtgcaaatacagttacacaagtattcttacagttacaaaagtattcttacacaaactactaaagctatctcaacaatgctaagaccaagaacctaatgtgaaaatgtaaacttaaaaaagaatatggtataggctgatgaattatagtcctcttaaacgtatcttttggtatctaatgttcaaaagataaggtagaccgtttagattacctgcaacatactaagaggtggtggcagaagcctcccaccagtacctatttgaccaaatgtaggcagagaaagaaacctcccaacaagtgagccagatccaaagactattttggctgcaaaccaagaaacaagttgtaatgagataatcccccttttaaaaaatcaaggagtgatagtaacaagacaataaaagcccaacctatccactgagcccactgtgcaatcaactgagaaaagattaacgtccagtgaacttgctgtctcttccgttcttcttcccaaatatcctccagagtacgctcctaagagtaacaccacaggtaataatacataaaagggttcttctcatctctaattaaaaacacacacactgaactactaacctcaatgtactcatttctactattatcagtactactacttcctaacaagggttcacttaaagtttcagagtctgttgcatcatagcgttcatacttcctcccatctacatcaccgtgatgaagccgccttctcagagtcgcagatgccatcttgtatatcaacagatacaagcgaataagcccctgcattataccagaaataagatcaaacaaacaaaaacatgaaaattggagacagtgtcttgataatggagctatgcgattataatttaaagcttttcatttgtccagtcttccaatttttgcacactagacactaattcttcaacactagatcatagaacagacccatgcaaacagaaatcaataagagaaaacgaaccctagaactagaagcttcaacgggaatcagaacaagatagaatttttcaacctagcaaattacaaagcgatgcatctgcgctaagtcaccaaccattgaatcgttttaaaaaaattcagaagatcaaacagagctccaccacaaaccctaattgggcgataacgaaaagactcaacacaaaacaggatcgcttaaaatccccaaatctcagattcgactttttgtaatccctaatcagaaaacttgacaagaaaaacatcaccaaatccaaaaactttggaatctaagatacattataaggaaagttacgaattgggtttgatcgattctcttacagggaacgtgatctgagtgaaaagatgagagcttccttcgagagaaaggtaagaataagctcacgaaatctgaaatccaaaggaaactgtcgccgccaaatttcccagaaattttatttatttcgattaatctctcttatacgttactatttattttatttctcttttgttggtcaacgacccggtttgtcatccggtttacgatgtttggtttaggcatctgaaatctaccgaaatgggccggtaattagctcatacccaacacgaccagaccagaccgacccgacccgacggctccagattcatccatgtttcatcttcctcatcagatctaattcaatctgcgaatttctcttaaaccctaaccctctcgctgccgtccggtggtttttccgacgacgaactatgacgattcacgctgcagtaatccagaagcttctgaacaccggagcacatctcggccgtcgtgccgccgagcaccatttcaagcaatacgcttacgggacgcgtaacggaatgacaattatcgactccgacaaaaccctaatttgcctccgtagcgccgctcatttcgtcgctaacctcgcccacatgagaggtaacatcttcttcgtcaacacgaatcctctcttcgacgaaatcattgagctcacttctcgtcggatccaaggagattcgtataatcacaaccgtgcgatgaatctgtggaagatgggagggtttttgactaacagctacagtcctaagaagtttcgatctaggcataaaaagctttgctttggtccaactactatgcctgattgtgtcgttgtgtttgattctgagaggaagagctctgtgatacttgaggcatcgaagcttcagattccggttgttgcaattgtggacccgaatgtgccattggagttctttgagaagattacgtatcctgtgccagctcgtgattcggtcaagtttgtgtatttgttctgtaatgtgatcaccaagtgctttgtggcagaacagatgaagttggggatcaaagaagggagcaatgaagatttgatgaaggatttagctgcttgattttgatatttgcaacaaaagtatgaaactttacagttgtttttctgagtctggaataattgttcttcagaattgtggttacttcaactttgaaattctgggagttttttacacatggatgattttgtttctctgatggatatttctgtataagattgttgagttctagtgttctacatcttgataactgccttgtcttttccttgcacaactcattttttggaaatgctttagacattgtatatggtaatcgttacttcacaagttttggaatgagctatttacaagtaactgtctgggataactttgaatgtctcttaagacaattctatggtctttacttgaattttagtcgagtttctgtcatgttcctgattttttggggcatctctggtcatacctcttgaagttgtacttatcctcggtagagtttgttgctaatcttagtggtttgatcggcttggtttccactgcacgtgctacagagattgttagtaagaagtaagatcaagccatgttagtctccatctatcatcctccgggactaagaaaatttgcatgtaaagctcttggaactaacttagacttttcaagatggtcaagtttgattctctcttctggtcttctcacttgtggaatagttgcgatgtcgttgtgcttcagagattttctcgatggaacaaaccgacgttgtttaagctctcttaactcagttaccatcctctccaagaattatcattgttagcttttggttttctccttattattgtcactatagcttgtcaacaataccttattagttattaccttacctcgacagaatcaaagcatcttcctcagtcatatcataaccctttctttatctctgagcaattttatcattacaaatatcttcgtaatgtattaatcaatagaaagagaagcagccatgaattttgtcgaagctattacaaaggatatgaaaatgattccatggctggactgttgagaaagttggaaactttcgcatcttaatccttgaaagttgaaagctttagtgtcaaaagacaagtttcatatctcaaacgtcgtcacgtggcagagtcaaaggtcaaacctttttctcccaaaaactttcctaaattctccaaaatcacactctcagcgaaggagaagaaaaaactagattggcgagaaaatgtcttccgttgcagctatggttttcagaggagctagatcgcttctagctcctgcttctcgagccacctcttctttggtttcagctggatccactaagaaacccgcggcgaaaccaaaggccaaggctaagcctaagccaaaggcgaaatcagactctccggcaaagaagacaccgaggtctaccggaatctttaaggtgactcctgtgtctccagttctcgctcagttccttggtaccggtgaaacatcacgtaccgacgccatcaaggggatttggacctacatcaagtcccacgatcttcaggttcatagtctctttgcattttgttgtaaattttgagtatagcatcataatctctaaattggtaggtagattctctagtttctgatgatataggtcttgcatgtagacgacatttgccggaaaaattaggtggtactttgctatatttttcatggtctcttgaatcacattaacttgcttgatgatgaacatagttgaaaagattgttagttttgcttttcagatttgtgatatacaatttcactcttcttcaattttctaatccaaaagatgttagctttgtctctggttgtggcttcttgttctggttataatacttttacttagtctcttctctgaaaaatgaagttgctttgtttagagtcttcacattatcaactttgtcgacgagatttgctggattttttttttttttttttttgtggtactttgctatctgtttcctggtcactggagttttatcaacttgagtgttgaatttagttgagaggctcgatgtggtaattactcaaaagattcacatttgctattcagatttgtgatctttttcatcttcttcaattctctaatccagcagatgaattctttaatatctggttgcaacttgttgttctggttaaaatagttcacttctagagtctcttctctaaataatccaaatgaagttgttttgcttagagtctttacattttctatctgctttgttctccattgtgatgatatggtttcaagtctccaaaaaccgttctcttttgcctttaagaacacagaaagtaaccagaaataccaatatctatcaggctaaagtgcaattggaatgagacgttctaatatcaagttagggaatagtatttctttcttaattatggtgcattatgtgttggtttttggttgcagaacccagctgacaagagggagattttctgcgatgagacactgaagctaatctttgaagggaaagacaaagttgggtttctggagatttcaaaactcttgtccccgcactttgtgaagactgcttgaccaaataactagcttagtttggaaactcctgacgatttggttttttagttagctctttcaagtgatcttatcttgttaatgttgtcaatatcttttaactcttctcgttcctgttaccaaacatggtttttgactaatgaagaaatgttttggcataagttctaaactcttagtgttttctgggaacttgaatttaatacgcatgtggctgctcgagccatgttttaagatttgcaaactttgtcaagaaacagagtaagtaaacaatacaagcttattttgaatgaaactagacaattttcctagcatataacctcaatatgttaaagaagatgaaaggtttgagtccataaagaaacaagaacagagtaacttttctagatatacacaaacaatttctttcttcatagattataggatatcttttacatctttgattgtgaattgaaatctgatggtatacagatacacaaatgcagtcagagctcaagctttaaagcttgtttccaaacacaacgccatctttttgacaaaacacttgtagccacaacctctttgatcggaaggggtgacaaaatcttcaccagtaaatcgtcaggcaaatcagtgatatttttcgttccttcatgtctgttgttgagattttccatcgcagaagaaagaagaaaagccaaaaaagttttttttgttcctttccttctatgtcaaggaaaaggcaagtaagctcctctgtttcgctctaaaccctaatttcgactaattatcccaagactttatcgattatcgaatttatattctcttttttatcaacgatgaactttattatattagcctattagcatcttatcaattcaatttaaacccatatttagtttgaagaataaacattaagttgaccaaagaagttttggaagtttattaattagaggatttaaaatttagttaaaaatctaacaaaaatcttatgttattaaatcatcaatttaaatttcctgacaaaatcttgtattattgctttaatgttttacaaatactagtttaaatttagtgatattcaataaatttctttattggattttaaaattattaaattttttttattgaaccttaacatatttgaaagtgtttaaaattgaaaatacaaaggctcaaatacagctaccttgttattttgaaattaaatacatttgtttgattttaaaatcgtgagaatttccaaatagtgcatggattatcaatcaaatcaattttaatattgcaagttaagttagaaaatgatgcgttcttacttgatttctatcgagaattgttgtatttcggtaaatttatctagctagtggcttgttattgcatatgtataaaacatgatagatagctagttccaaacttgacatagtaagtaatttagatatatttacctctcatctttctctttataatcacccattctcataagtccatcggaaatccatcgattgattcaagagtcggaagaatcctctctctagtaaacagattcaaaaggtgaaaatctaggttatggtctaacagaagaaaccatctaccggaactcgccaaacaacgactcgtagccatatcaatcccgagatctcttaatgtgtaacaactattgtcacgaggatcgaacaacttacatgatgaatcattgttgctgtttttcgaatatttgtatggaatcgtgatgatccatggagttgttgttatgcatgatttcgaagccgaataccattctgaagaaacgcatctggctctatgaaaatcagcaaagctcaagcgttgcaagatcgacataaccaggtctaacaaaagtgtcggctgctttgaatcgtcgttgcatgttttttcgtggaaaagaaataagtttctcggtttaaaccgggttattccggtttgaatatttgttttgttctgttttgaataattaattcgatggaaactaaaacaatgaagaagaggtaaaactctacaatggcgaaatgcagactagagtgtcatcacctttcatctctagagctctttcgtcgtcatctaacctcaatgagcttcgtcgaattcacgcccttgtgatctctcttggtcttgacagctccgacttcttctccggtaagcttatcgacaagtactctcactttcgtgaacccgcctcttccctctctgttttccgacgagtttctccggccaaaaatgtttacctctggaattcaatcatcagagctttttctaagaatggtttgttccctgaagccctcgagttttacgggaaactccgggaatccaaggtttctcctgataagtacacgtttccttcggttatcaaagcctgcgcgggattgttcgatgcggagatgggagatttggtttatgaacagatattggatatgggttttgaatcggatttatttgtaggtaatgcacttgtggatatgtattcgagaatgggattgttaactagagcacgacaagtgttcgacgaaatgcctgtgagagatctcgtgtcctggaacagtttgatttctgggtatagttcccatggttactatgaggaagctttggaaatttatcatgagttgaagaattcgtggattgtaccagattccttcacggtttcaagtgttttgcctgcatttgggaatttgctggttgtcaaacaaggacagggacttcatggttttgctctgaagtcaggtgttaattccgttgtggtggttaacaatggactagttgcaatgtacttgaaatttcgcagaccaacggatgcaagacgagtttttgatgagatggatgttcgagattctgttagttacaatactatgatctgcggatatctcaagttagagatggttgaagaatccgtgaggatgtttttggaaaacttggatcagttcaagcctgatctcttaacagttagttctgttctccgtgcctgcggacacttacgggacttgagcttggcaaagtacatttacaactatatgttgaaagctggatttgttcttgaatctactgttagaaacattctaattgacgtgtatgcaaagtgtggtgacatgatcaccgcaagagatgttttcaacagcatggaatgcaaggatactgtttcgtggaactcgataatcagtggatatatacaaagcggagatcttatggaagccatgaaactcttcaagatgatgatgatcatggaagagcaggcggatcacatcacttatttgatgcttatatctgtctccacacgtctagcagacttgaaatttgggaaagggctacactcaaatgggataaaatctggaatttgtatcgatctttctgttagtaatgctttgattgatatgtatgcgaagtgcggggaagtaggagattccttgaagatattcagtagtatgggaactggggatacggtaacatggaacacggttatttcagcatgtgttcgttttggggatttcgcaaccggtttgcaggtaactactcaaatgaggaagagcgaagtggtgcctgatatggctactttcttagttacattgcctatgtgtgcttcacttgctgcaaaacgactaggcaaggagatccattgttgtctgttgaggtttggatatgaatcagagttgcaaatagggaatgcactaattgaaatgtactcaaaatgtggttgtttggagaattcgtctagagtctttgaacgtatgagtagaagagatgttgtgacatggacaggaatgatctatgcatatggaatgtatggcgaaggtgagaaagctcttgaaacttttgcggatatggaaaaatccggtattgttcccgatagtgttgtcttcattgccatcatatatgcttgcagccactctggtttggtagacgaaggcttggcttgctttgagaagatgaaaactcactacaaaattgacccgatgattgaacattatgcttgtgtggtcgatttgctgtcccggtcacagaagatttcaaaagccgaagaatttatccaagcaatgccgataaaaccagatgcaagcatatgggcatctgtgctaagagcttgtcgaacaagtggggacatggagactgctgaaagagtatctaggaggatcattgaactgaacccggatgatccaggttactcgattctagcatcaaacgcatatgcagccttgagaaaatgggacaaagtgagtctaatccgcaaatccttgaaagataaacacatcacgaagaatcctggatatagctggatcgaagtcggtaaaaacgttcacgtgttcagctcaggagatgattcagctcctcagtcagaagccatctacaagtcactggagatactttacagtctgatggctaaagaaggctacattcccgatccaagggaagtgtcacagaatctagaggaagaagaagagaagagacgtttaatctgtgggcacagcgagagacttgctattgcgtttggactgttgaacacagaaccagggactccattgcaggtgatgaagaaccttcgtgtttgtggtgactgtcatgaagtcacgaagctgatatcgaagattgtgggacgtgagatattagtgcgggatgctaatcgattccatctcttcaaagacggcacttgtagctgcaaagatcggtggtgaatagtttatttgatgtaatttagagcatggatttgcgaaaattagactgaaaatatacaaagaaaatagtagaagaagagaacgattacgaaatatcttgaacaagctctgaaaattttccatggccctcaataatgctgtgagaattgaaaagtgatttattatcatccaaaatcatgaatcatattttgctgcttcgttaaactgtctacgcaatttattctcttataccgacaacgcaatcaacagtggtgaacctcttattttctcgatcgaattacagaagatggtgaatttccattagactgtaaaagttgatcaatatacaaaacccaaaacgaatcctttttcaaaatgaagatacatcagagtcgatgacatgttctgcatcaaacacttactttgttcacaccaaaatgatcttgcaccattaatctcaaaagatgttcagtcataatgctccaatgacatggaagaagcattctccaaatctaataatagtataccttaccgggaaaccaaatcgagattcccgatttgaacaagaatatttcagaccgaagctcttatcgtcgcagaggtaagcttcttagaagctttcgagcattgtgatatcttgaggtatagtaaatttacttgtagcaccaaatacattggccatctgaaacacagcggattgaacagcaggagcagttggtaatagcgattctgggagagacggacagcactctggctgattttgtttgttattgaagactggagtgtacagtgccaagacagcccggcagaatatgaatctgcagataagggagacaaagtccaaaccgcagatatataagacaaaaaagttcagagatttcgacaatcgttgatagataaaaccaacaatatttatggttcctcgttcctacacaatctatgtccaaataagaacctccaatcgtctaatgttccattagatcaagttggctacagttttagacttttagaagatcccgaaggtgtcttagaacttggaagaaaaacttataccttaggagtagtcgtctcaagaagggatcttttagtatctgtgaccaaacagggtgaagggtatctgatgttgccaatgtcgaagcccattcgttcatagacgaggaaagaagcttctcggccttagtaaaaatatcctaacacatgatggtagtcagcacgcaaacaaaagaagtgaagagaaagaagtatcaagcaagtgatgaagctttatctctacctaccgtttccatatcagaggcggaaatctcacttaacaagcaaaacgcttggactggtgacgtgagaaaaatggtgaaaaggctaccactaggttgacgagagaaatcagcagagataagcggaggagtatgtgatggagacagaagtaacgcggctggttctcctttctccgctccacaaatattcttcacagttcaaggaaagaaatattcatatcttctcaatttactaaacataggtatcaaatgaattttaacataagaatgatggaatcaggtgtacttactttaaaaactgtgctgctatcactgtcaatgattatgaaaagaggtttccttgtaaatggaactaaatcagagggatatatgtagcttgatcctgagggaaagacagttcagagagacttcaggaaatagcaaattctagataaactataatgacaaaagtatatgttgccattagttgtttatgaatgtctggaaatttcggtgttgttttccttcagatgtgaaacatatttagttggattatttacagaggtccaattttaacaaagatttttctcttacaagtatcctccctctgccctctagaagataacaaggtttgatactacttagtggatcctatctctacatgcatatagccaaatatgatagtcttagatggatttttacataaaagtttcaagaactctagagtggatacctgtgagcccatgactgccaaaagacaaaccacatggggtactgactgcgtcctcactgatttgcctcaaagactgaccagatggcgtaatttgaagtgatggttctgtctcttgtttgattgtgtgagattcaaagtctctcaagatattctcctcaacactggttgcacttctagcactcaagggagatgatgaaatctgtccaatcttgcctgaataaaaatgtaaatgtttgaagcgaaggaactcaatattccaaagagaagaagcataataccagacttaaactacacacattaccagaagcagacagatataataaaagaatgccatgagaaggaagctcctcacaaatggtggccaaaacctaccaaataaaaacagggttaacagaatgaagttccatagagccaataattccagttagacaagtaaaaaaccaaaaatcgacttacagccaaaaaatgtgttatggatggacgataaaggacagctttgcgagggttaggtggcaaagtaggatcattcatgctctgggagttaatacgagcaactccaacgggagcattctgacccattttagcaccagttgattgatatagtgaaccactcggttcccactctaagcattgaagcatcctaaaagaatcgagcgtgagctccgaatacttgacctggtggaaatcatacagcaagttttcaaatttcagagggtaagatattaaatatgcgttcatactaaacatgaacaagtaaaaaattacctcgttacagtaataactgctcaagatagcatccgtcaaccttaaagacctacttgcacgcggagtaccagcatccagattaggatccaatacaagactgtatcttagaggtctaatgttcatgaatgcagtgtccgatttcagaaatctaactatttcctgcgccaccaccttccattccttaaaatcggtttcctgataacatgaaaagttgtttatgtaacaccgaaaaaaaaaaaatagatagagacgggatctcttgtaaggcaggcaacctaattgttatcattgttccactaaaacagttacacctaaagatggagagaatagggtatcagaagaaaacctggaatgtcctcttgcattcatcaatcaaccgtttaaactgatcaacgagttgatgcaccatctcacggcggccaagaaccaaacacaccataagaaaccttgcaagaaaccgaagctgcttgtttgcaatattgagatcctgaaacaatccatctttgaagtactccctagtgagtattgcttcgtagaatacataggactcggataagtaaccagcatcacttgttcgcatataatgtccatagtaaagctgggcaatgcgagaagcgatctctccaatctcccatctcttaagtccagcttcaacaagcttctgcctattctcttgctgaaacttccatagttgtgtgtatactttgaataccttgaagaaatagttctcatacctatgaacaattccatcaacaacaatcggaatcaatatctaccaactctctaatcaacaattctaggtacggttatctcaggggaatgggaagaggtacctggagcgttcatagaagggcaagtctctgatcttggagaatttcttatcggctttgttaacgagagaccagtaaacttcactcagcgggatattattattaccgctgatttgctgcgacatttttgaggtcgccacgaaagcgagagagaatcggaggaccgttgatcggagtgtttggtagtcgtcgtcgtcgtcttctagatcggcgaatcgaccttttggatgactaaaaatcttgtaccggacggtttaccaacgaaatttgtctaattgattctggtttttttataattaaacttttttggtgtaatttacaaattaggagtataaattatgttttgggtcgaaaattttgatttgtcattaatctgattgttataagtattttagatcaaagtcaacaatattgaggtttgagttagatggaagactattttgtaattttggtagttgatggtctatcgtgaaaacaatagttaagtttaggggctttatagaaatattcactttgtttcgtggagatgaaaattgactgctgattaaagttttctcatagatgaaatagagaaacaaaaaaaaacaaaaatcatagactttggaaatccgatgaccttaaagtcgagcttcgttttacgacttaaacacgatggatgataatcggagttctgaatcaatcaaaaggtatcgctgttttgccttaaacccacaaacaaagcgtttgattttgaagcagtgttgttgaatatttagtggcttgttcttcgatctgtctctcttataggcatgagattgagaaagatactattgcgtcgaggaagctagaagatactaatactaagttaatacaagatcctgaagaaatggtactggtgctgatttaagaatcttatgatttctagttcttgaatcaaacttagattagcttttgaaaattcaggcactttatgcgaaagtgagatcacaagaagaggagattcatagtctccaggaacgaattgctgctgcttgtttgaaggtatatactattatgagaacatgatgctcgctcatatgaatctttctaatcaacttgagagtgaaattgcatcttttggttacaggatatgcagctgctgaatgagaagtatggactagagagaaaatgtgctgatcttcgagtggtttgtcttttgcttttctataaagattgattcatggaattgaaagtcttcatctttggcttctgggtttgtttgactaacagtttcttatttccttaggcaattgatgagaaacaaaatgaatctgttacgtctgcgttgaatgagttggctcgtagaaaaggtgatcttgaagaaaatttgaagttggcacatgatttaaaggtgaattgtcttgcctcaaattatgtagtaacctcaaatatttgattgccttttacctttccgtctttatttctctcactttctatctttaggttacagaagacgagaggtatatattcatgacgtccttacttggtttattagctgagtatggtgtttggcctcgtgttgctaatgctaccgctatatccagcggcataaaggtatttgtttttcacttcatctttcttcaaatttatactctaaacaatctcaacatatataccatatttctttgtatgcagcacttgcatgatcagttgcaatggaagactaaagcttgcaatgtaagctctctatcctgtagtttcccaatcgaacaaccgctagaaattcttaattttagtgtttatacacatttccttggattactgttgtctgcatatgtcctttggccttattagacctctgctggaatgtgaatactcttcatggattcctttcgaacatgttgtgacgaaatttttaaatcacaggataggattagagagttatcatctattgtggaaaaccaaccgggaacagattttattagtaaagacaaccatgatcccagaaattcaaaaactcaagcttcttatggatccacggtagtctcagcaagtaatttgctaaattaattatcatttgctctttaagaccttttacaaaatgtgtgacatcttttcagaagaaatcttactttctgttttcatatgctacccttgatacaggatcgtggtaatgattatcagaccaatgaacaactcttgccaccaatggaaaatgttacgagaaacccgtatcataacattatgcaagacactgaaagtttgagatttaataatcagattggtggtggatctcaaggaattttcccgcagccgaaaaggtacggtatcgtttctcaatcctcccaaacttttcattgatttcagtttttaccgatgaagttctttcacggtgatgaatgcctgcttcattatgctcacttgtagggaaaattttggatatcctcttagtagtgtggcggggaaggaaatgattcaagaaagagaagaaaaagctgagaattcttccatgtttgatgcttataatgggaatgaagagtttgcttctcatgtttatgaaggttgagaagtgtttgttcgttttcttagagcctagtggctatacgttagaaatcttaatctgacgttggaatcttaaacagagggacctggaatcgatggatttcagattattggagatgctatacctggagaaaaagttcttggttgtgggtttccagtgcgaggaaccactctctgtatgtttcaggtataatctttgtaaatcttttggtagtaagagtttttgaaaacaaacttagtggatgaaaaattttaaaaaattcccggtttgttgtttcttcttgaaaagtgggttcggcatcttgaagatggcacaagacaatacatcgagggtaagatttgatttatttgtcttaccagcttttttcagctatttaaaaactggactatggtttaaacatatgcaggagccacccatccagagtatattgtaactgcggatgatgtagataaactgattgctgttgagtgtattccaatggatgatcaaggtcgtcaggtaaaataccgggatttctcgggtatctatagctttaatgagtcagttgtctcaaaagatgttcttttgattatgcagggagaattagtgagattgtttgctaatgatcaaaacaagattagatgtggtaatgtattcaacggaacctaatactgctttttgtagatagcgaagagcacatttaccatctcttctttgctgagaatgtttttttacttctacagatacagagatgcaaacagaaatcgacacttatatatccagaggtcaagcaagctttaatgtgcagcttctggtaagttttaagatcacatcttgaatccactgtctcaggtttaattcagctgttgatttaacaaccgttttttcatggctatttatttcgaaagatggattcatcagagagttgggaacccgcaactgttgttttgaagagatctagttaccagattaaaacgaataccacagaagctgtagtgatctcagagaaatactcaaaggaacttcaggtaaaaaagattcttagacattgagaattaaagctttcctcattttcttggtcatcataatttaaacaaactttgcagataagagtaccgtctggagaatccacacagtttgtactgataagttatgatggatcttcacatcccataagcacactcaatgtccggtacgtatatacatttctctgcatatagccatatacagtaattttgtatctcgttttaccgcaacattattttacaaactcacacctaaaatctcatgatttttggcttcttcttttttttaccagtatgcgtgatacgctagtcttgacgatgagaatgcttcaaagcaaggtatgttttgagaattactaaaactaacctataaaattgaactaattagttttatagtttcataacaatcttttttatcatgaagcaggcactggacgagcgcagaaaaggacgagtttaaaagttagtgatgactacacactacagaacagatccatcctcgagaccttcaaatttaagtttaataaaatggggtctgcgatttctatttttataattgagtaataattgttatcgctatagtttttgtattattattttttgtcgtttaggttctatgtttttctgaacaacaaaaataaatcttattgtaatagactgtaacattcactctgtactgaatcttcttttttctttttaaataatactgggaaatactatttacaatgagtgcacaacgaattaaaaagcaactgcaaattaaaaaaaaaaaatatctgtcaaatatttttgtaaaattttaagaaaatatttaatataacaattaacaaataacaatattctcccaaacaaagctaaaacaaaagaaataaaataaaagcaaagaatagacacttgaatcagtaaaataattagatttggttagacatcaagctaaagaggttttgttccaaaacatgagataacagacagtaaaatacatctaactttatagccagttggcataacaacaataacaacaacaaaagggggaacaactttaggcatgtgcaaatagatgtgtaatcaatcatttacgtcatatgacatatataattgggttttacagtttatctttgagcccacaagataatttcattaaatcagcttaacgattatgattagtagcctattattatcatttgtgtaattgttttttaatcacactttacagatatatacgatctcgtagcctattgttagcatttgtataattgtttttaatcacactttattattattattttcaacttctacatgtaaatatgttattttgtacgtagggcatatggttggcgagttcacatcaatcgtcccttgaacaactattaaaattttgtattatagttgtcataaatatgtaaactaatataaaactgtatgtattcgaatcatagcaatgatttttttggaaaatcattactttgattacaaaacaaaaatgaaaaatcgtataacgtgaatgttatactactgtagttgaaatgaaatgaaaatattcttcttccatgtaggtagtcggtaaattgtactgtatttctgaccacaactttaatagatacgtcgaggagtaaatttgtcatccacgtggcccatgttatagtattccaccttcgtcaacacttcaccaaccatttttttatgccttgaaatagactaaaccctctctctctttttatttcgtcaacactaaaacacttcttatgttacgttctcatttctcaaaataaaatcaaaaaaaaaaaaaatgaactccatttattttactaatgtattaatttatctttaaaaaaaatggaagcataaagagaaagctaaagaataaaaatgaataaagcaaattctacacctttattcatactagaaataaaaatttgataaagtagaacattcactataaacatcattcaattagtattaacaccatcatgcaaaagctttcatgaacatatatatttattcattatctcctctaataataccaattaactcgaaataaaaaaatagacacttaccagacaaaagcagagcccaaagaaaaaggagagagacacttgacacctccatcttcttccttgctctctctctctatctttctccaacaatcaaataatgggttcaacaggaaaccctaatccatggggtacaacatacgattcatacagagactgttctcaaggagtatgcagtgtctattgccctcaatggtgttacgtcatcttccctcctcctccttccttctatctcgacgacgaagacgactcttcctcctctgatttctctcctctcctcatcgctctcatcggaatcctcgctagcgccttcatcctcgtcagctactacactctcatctccaaatactgccaccgccgtcgccacaactcctcctctacctccgccgcagctataaacagaatctcatcagattacacctggcaaggaaccaacaacaacaacaacaacggagctacgaatccgaatcaaacgattggtggtggtggtggcgatggactcgatgaatctctgattaaatcgataactgtttacaaatacagaaagatggatggatttgttgaatcttcagattgctctgtttgtttaagcgagtttcaagagaacgagagcttgagattgttacctaaatgcaaccacgcgtttcacgttccttgtattgatacttggttgaaatctcactctaattgtcctctctgccgcgccttcatcgtcacttcctccgccgttgagatcgtcgatttaaccaatcaacagatcgttacggagaacaactcgatttcgaccggagatgattccgtcgttgtcgttaacttagatctggaaaattctagatctcggaatgagacggttaatgaaggatcgacgccgaaaccaccggagatgcaggattcaagagacggagaagagcggagatcggcgtcgttaaactcaggcggcggtgtggtatcgatcgcagatatactaagggagattgaagacgacgaagaatcagcgggtgtaggaacttctcggtgggtagaagaaggggaaggagagaagacgcctccgccgtcaggatcggcggcgaatcaaacaaacggaatttcgaattttctggttcggagttcaatggcggcgatgaagagatctggttacgatagagcaaaaaattaccgtttaccgaaataagttataaaaaaaaaataaaaaaatagggaatttgaaattatttttaaaaatatcaaaaaagtgctgattggcttttttaaaaaaatctatattttagttttggtaatcttattataacaatcagaatcattgtaaaccatttgagaaacagagcaatcaaagagttttgaatttaccgcccaaatattcttacgtattttttttacttataattaatctacatgttctttttcttttctagtgatgccacttcctagaaaataccagttatggtaagtttagctatatgtcaccacaatgacaccatgcaattttacgacatccatattaattgttaagcttaatatatatacaaaacgatgatatttgcaagggatttggtgaccaatagatgcactctaattatacacgagatcctaaaattgcaagatacgagagagggaaataagtcaagtatgagattaatctatgcgcctaaaacaagtttttttattgcatgggatccagggccggcctcatgacatgatcgatcacatcagcctgagatcgctgatgtttacttgatcaataaaagacggctattgtttatattccgaattttcatatgcattgataaagattattaacgtaaaacatatatgcatattttaaactttgtgtggtttgtttagttttaatatacatttttttgctaatatccaaggctagagcactgaattctttctacatgtgaatattgtgtcggtaagccttttgaataattcacaatccttagaagatttcctcaaaaacaatgttcaattttgagagaatataatgaattttcaattttacaaaaattaacttgaaagatcttttttccttcttcctaatttataattcgtaaataattacatcattttttgtgctttcttctgctcgatgaatagatgactaataaatgttagagagcaaagctgaataggagaattatgtacatcttatgtgcatcttaattttaaacatggtgttgtgttggaaaacattagagacatcgttacgttgattatgtagatatttgttatgaatgctcttctaagtggttgtgtaatgtatataaattatcacatccacctacctcctaggaacctttttgacgtggaacttgaagatcctagtttgaagaattttgagtttctactgccgacacaaagataaattagccattgtcgaagtcgcagaaaagaccatagaaaaggctgttagggatatgcaacctcatttactgcagattatagtccaatggtatatgagaggtatcatagagtcttgtgaagaagatgaagaagattttagttgagggatgttctgtctgatttttattgcattttggatatagataatcaaccgattgatctcttgttgttaaccaaggtcttttccttcataaatgttttggcccatgttcttctagtctatgtttgtgggagtgggatgggatgggtaatatacgttgctattagatgtcctcaattatgctctgagaatcgaaaaggtattttcattgtcatccaaaatcataaattcatattttgctgcttcattaaactgtgtcctgaaaaatacatctatgcaatttattctcttatacagacaatgcagaaatatggtgaatttccattagactataaaggtaatattacttctgcttctacttagaaaagcacagcaaaattggtaccatagtccaaaatgtgtgaaatagttttcagtaaaatgtatttatagtaatttttggggtaaaatgttaagtattttatagggatttgatgaggtattcttcaattgtccagatttgtatagactcaaaatgtgagagaacgaaaaatatccataactaataagcatatgatgcttataattttgatttacttctaactttaaatggggcactttacttgacgtgataccaattcaaaggacaataagcatgcatgatgcgtatttcttatttgctttttacttgtaaatatctatctcttcaatttgtcaagcactataaacccacgatcttctcaaactttcatcaataattcaattggaaaacaaatagaatggccgagacgaaaaaaggctcagaatcgtatccgatcaaaaccatcgtcgttttggttcaagagaatcgttctttcgaccacacacttggctggttcaaagagctaaaccgggaaattgacggagtcatgaaatcggaccagaaattcaacccgggtttttcctctgacctaaattcccacaacgtcgtctttggcgaccagtctcagtacgttgacccgaatccaggtcactccattcgggatatttacgaacaagtgttcggtaaaccatgggattcgggtcacccggacccaaacccgggtccagctacaatgtccggatttgcccaaaacgccgagcgaaagatgaaagggatgtcttctgcggttatgaacggatttaaaccggacgctttgccggtttacaaggaattggttcaaaatttcgctatatgtgataggtgagaccgtttgacctgtataaattacatctgtataacggttcggttcatccaactaaaaccgaattggaaattggttgtctagcaaaatcccggtttatagcaaatttcatgtattggacaggtggtttgcgtcggttccgggtgcaacacagccaaaccgattgtttatacattcggcaacatcacacggaacaacgaacaacgagaggaaattactgatcgaaggttttccacaaaagacgatattcgagtcactcgatgaagctggttttacctttgggatttattaccaatgttttcctactactctcttttataggtatcttaatcttttacgagttgcaaaagattttagtattatatactgctttgcgatattaatctttattagtattcttttgtgtttggtttttcaggaatttgagaaaactcaagtatttgacacgtttccacgactacggactacaattcaagaaagattgtaaagaagggaatctaccgaactatgttgtggttgaacaacgttggtatgatctattgttgaatcccgctaacgatgatcatccatcacatgacgtctccgaaggccaaaagctcgtgaaagaagtttacgaggccttgagatcgagtcctcaatggaatgagattttattcattataacatatgacgaacacggtggattctacgaccatgtccctactcccctcgacggagttcctaatccggatggtatcttgggacctccaccgtacaattttgaatttaaccggctcggcgttagggttccgactttcttcatctccccttggattgagcctggcacaggtaagtatgtggtagacaataatttaattatactataatgtgttaattaaatgacaatttttggtaaaatgtgtagttcttcatgggtcaaatgggccgtacctaatgtcacaatatgagcattcgtcaattcccgcaacggtcaagaaaattttcaaactcaaagattttttgacaaagagagattcgtgggctggcacttttgaatctgttattacgagaaactcaccaagacaagattgccctggtaattacattttttcatttctaataaattctatcaaaatttgtgattattttgaataaatacttcgttttttaaaaaaaaaaagaaacattgtcaaatccggtcaaaatgagagggacggtggcaaaagaaaatgcagaattgagcgactttcaagaagagcttgtaatagttgctgcgggtttaaaaggagactacaaaaacgaagaattgctatacaaactatgcaaaaaaacttgcgtttcagatgcttctaaatacgttacgaaagcgtttgataagtttgtagaagagtctaaaaaggcaagagaaaggggaggtgatgagaacgacatcgttttttgcgttgatgatgatgatgatcataatgttgtgaaaccaccaccatcacaatcagagccatcacatgctactccttggtcaaattaaaatctgatcgtctttttcaataagttaaacatttgcttcgtttgtcatgattactggactgtataagaaattttcatttagtttttttttatgtagtttttgtgtgaagagtcaatagtagtgtggatctatcaaatggcccctattgaattcaatttgttttctagtaattgaacctaaatgctggcgtaaaaagaacaaaagaaacaaaactgctgacataagtcgtataaaaattgtgactggacatgccaacataaacgatctagactcgaaaaacaaaaaaaaaacttaggcgcgactttgtattcctattcttgtatggcacgtcacaaaattgttcgagtacaagttactctttcgtcactacaaaatgatcggtaataaatggacaccgctattttagaccaagtacgttttaggaaatctaaaaagatttatcgtggtacaataaaaataggttggtggactgtcacaattacaagcataatacaaattgtacactaaaaattaattaatatcccaccttgaatcgaagatcatacgaattcttgtttctttttttcacacgaccacgagtattattttattttatgaaaaggtatcagtatcacttggaaggaatatgtactgttaatagaaaaaattaaatcaaaacgataattgttgtctttatttaatttcccatgtgtattcgcatattctttggttgatatagaatcatacgcatattctcgtttatattctttgccgtaacgtgtgttcttgtttttcttgacaattttcttctcatgtttcttgtctgtctgaaggttacaagtaaagtctcaacgtcaatttttttttttttttttgaaaacaatgttaaattatattcaaagaaaaaataacgtttgtacaactagtgcgtcgtgagtttgatatagctaacagtacacaaaattctctctatatatatatatataatgtacttttaatataaaatcaacatacaagctaattagaaagaactacatagatggtcttgaaaaagtgaatattcttgacacagaccaatttcaacacaagtaattaaaaataaatgttgtcgtaagaatatcaaccttgccacaaattataaatttccagcttatgggtgctggtagttgcgtcaattactatcctaacaaatttagtaaagattttatttccctccaactttatttgacgttataccaattcagtggataaataacccatgacgacgtgcatacttatgatttgctgtttacgtcttcttcaaatctccaatgatcactacgtatatatttatataagtataacccccacgaattgtttctacccaaaacgtttaacattcgaaaaagaaaagaaacggaatgatcgagacgaccaaaggcggttcaggatcgtatccgatcaaaaccatcgtcgttttggttcaagaaaatcgttcttttgaccacaccctaggctggtttaaagaactaaaccgggaaatcgacggcgtcacgaaatctgatcccaaatccaacacggtttcgtcatccgacacaaactctcttcgtgtagtcttcggggatcagtctcagtacgttaacccggatccaggtcactccattcaggatatctacgaacaagtgtttggtaagccatgggattcaggtaaaccggatccaaacccgggtcatcctaacatgtccggttttgctcaaaacgccgagagaaacaagaaagggatgtcctccgcggttatgaacggatttaaaccgaatgctttgccggtttacaaggagttggttcaaaatttcgccatatgtgataggtaagccggttcggttcatcctgatcttaattttgagtatagttttcccggtttaaatcaaatttggttcacattgtatacttggcaggtggtttgcgtcggttccagcgtcgacgcagccaaaccgattgtacgtacactcggcaacatcacatggagcaacgagcaacgacaagaaattgctactcgaagggtttccacagaagacgatattcgagtctctcgatgaagctggttttagctttggcatttactaccaattccctccttccactctcttttataggtatttttatcaacaatatatacgttttatttgcttttcctattgaaatcgtttattcagatattaattaatctagttatctttagctttataagaattgtataaattttgtctctttttggctatttccgtctatcattttataatgggtgttaaatcaaggttattcttttgttttggatatctaataaatatatcaaactgcaagactcgtttcagtttatgaacaagtttccttcgttgtgcagattgtaaaaccttctaattaaaacattaagatagtcgtatatataaacaaagtaaatcttatagtaaaaaggataatcatacaaaatatatatatatatatatatatataattgtattaatagtttactttttaggaatttgagaaagctgaaatatttgacacatttccaccaatacggaatacaattcaagaaagattgcaaagaaggaaagctacccaactacgtcgtggtcgaacaacgttggtttgatctattgtcaactccagccaatgacgatcacccttctcacgatgtctccgagggtcaaaagctcgtgaaagaggtctacgaggcattgagatcgagtcctcaatggaatgagattttatttatcataacgtacgacgagcatggtggattttacgaccatgtacctactccagtcgacggagttcctaatccggatggtatcttgggacctccaccatataattttgagtttaaccggctcggtgttagggttccgactttcttcatctctccttggattgagcctggcacaggtgaacataattactagtcataggcattaatcaaatttagtggtcttatattttctaatcaagatattaatgtttaaatcaaagtaaatgacaattttggtaaaatgtgtagttattcatgggccaaatgggccgtacccaaggtcacaatatgagcattcgtcaattcccgcaacggtcaagacaattttcaaactcaaagatttcttgtcaaagagagattcatgggctggcacttttgaatctgttattacgagagactcaccaagacaagattgccctggtaattacatttttttctttcatcttctctatcaatttaggtaggataatatcgactaaaacttcagttttttttctttaaatagaaacattatcaactccgattaaactaagagggacaatggcaaaagaaaatgcacaattaagcgaatttcaagaagatctcgttataatggctgcgggattaaaaggagactacaaaaacgaagaattaatccacaagctatgtaaagaaacttgcgttgcagatgcatccaaatacgttacaaatgcgtttgagaagtttctggaagagtcaagaaaggcaagagatagaggatgtgatgagaacgacatcgtttattgcgttgatgatgatgatgatcatgttgtgataccaccacaatcacattcagaagcatcaaatgctgctgctcaaccaaaaacgcaaacgtcttttttcaataagttattctcttgctttattcgccatgattgaaagagactaagagaataaatgttataataataatttgtagtcacttctcttgtgtgtgggtggaatttatttaagacaaaaaaaaagaaaaccttactagtctcttgcatatttaatttcgttgtataagaacttccacaattatttgcacatttgatattcttgtataaaaattatatgttagatgagatctactctaactagttatttgtttttcattttttcttgtcaacagctatattaaattgactaaaatgaactaataatgagagatattatttacatatgtaattatatgcgattagattcaaatttttcataccatgactgaaataaacatttaaagatttcgtgtgttcctttccactatcgttcttaccccgactcatcatgtacaattattgaatttgaattttcaagcataactcccataagacttttgatcaattctaagtctctgattcattgtagcatcacaaccctgtcacgattcaggttgagaagaaagtgcagttgtcacccctcctagagtccatattacgttaagaaacttgtgttgcagatgcttcctattacattacaaatgcgtttgagaagtttctagaggagtctagaaagcaagtgaaagaggatatgataaggacgacatcgttttttgcgtgtatgatgatgatgatgatcatgtcatactagcacaatcacattcgaacaacttgtagtaatttgtctgtgtatgtggaaattatttttgtcgtagaagaacttacacgattatttgtatatttaatcgtctttttttgttgttgttgtaaaagttgtatatttaatcttcttgtgtataaaagcaattatatcttagatgagatctactttaattattcgattggtgagtagattataccaaaagactaaaaactaattaaagtcactaaaggcaaccaatctagctactgggtcccaaattttaattgtaatgattataagaaatactgtactaactaacaccgtatgtatgcaacattctgtcataataccacatattattagttacgctatttaaacattagttagtacacagtaatcaacgaatgtatggttagttttttccctgaggaaaaactctatttaaaacgactcatgcggagacgtgctatagactatggttttagcaataataattggtcaacacctaattcaatctactccattgttattttcatagatagagagattaataagtaataatattcaatgtatatcgccaataaccttattaattttcttataataatggactaatggtagaaccgtagaaatagttatgagaagcacttgtatctatataaactttcattttggagaacgtttttcatatgcactaaataaaagatgagtaatttcttctgccacctcaccgaacgtgagagtaaacaaatgtgacgatatccaaaattcaccgtctatgttttatttatatgcaaagatcactgagttgattcgaatgtatatgattgatagtatatagaaaaatagttttttaatcttgaggcagagtttttaaggtgacaacaaaaaatgaaacaaggtgtattcaatcaaatatttaagtgtttttgtgttaaaataatagatctaatgttattaattatagatttttaaaagttttatgaaatctaatgttattaaatttgtgattttaaaatctacattaatttttttttattaaaaatattttaaaaattagatttaataattttaagagacttaaatgaattttagtgaatttccttaattaaaaaatacagaattttaagtctcatgattttaggtaaattttgagaaaattttataataaatcataacaacttccttaaattcacccaaattcttcaaaattatataaaaatttaaaataacttaaatcattcaaaatagaagattgaatacactcccgggcccaagagttttgcaaacaatcatatacatgtaaaagtttaagactataccatttatgtgatttactaatcatataaaataaattaaatacacatcgtttagttaccagtatataataaggctaccatttagacggacacagctaattatgagagatagacagagagggaaaacaactacacaagtcaaaatttctgttctaaaaaagtaaaagaagtatggtggaggaaacgagctctggtggtggctcatcggcttctccgatcaaaaccatcgtcgttttggttcaggagaacaggtcgttcgatcacatgttaggttggttcaaggagcttaacccagaaatcgatggagtatccgaatccgaaccaagatccaacccactttctacatctgacccgaactctgctcaaatcttcttcggcaaagaatctcagaacattgatcctgatcccggtcactcttttcaggtacaactccggtttagttccaaatcatcgttaattttgtatagaaatatacacttcttaaccggtctactgaaccataaatatcttcttaaataattcggttcgggatctaaaccgggaaattgatagagtggtttatcgacgatcattgaatttcaggcgatctacgaacaagtgtttggaaaaccattcagcgacgagagtccgtacccggatccgaagatgaacgggttcgtacaaaacgcagaggcgataacaaaagggatgtcggagaaagtagtgatgcaaggttttccgccggagaaacttccggtattcaaggaactagttcaagaattcgctgtctgcgatcggtggttctcgtcgttgccctcgtccacgcagcctaaccgactctacgtccacgcggcgacatcaaacggtgcgtttagtaatgacactaacacgcttgttcgtggctttcctcagaggacagtgttcgaatcacttgaagagagcggtttcacatttggaatttattaccaatcctttcctaattgcctcttttacaggtaataattggtatttctttttgttttaaatttcatataattagaaaagtaaaattcaaagttacgaattatgattttagtgtaggaaaaaatcgaatacgaatatatgttttaagaaaaaacatatggtagataatgatgaaccgatgaattgtagtgacatcttaaaaaaaaagaaggtgatgacacctggattgcaatgtctacttaattgaaacataaagaaaatgaatttaaattctccatgattgagttttattttattttattgttgaaaaagcttcctgtaatgagcatgtcctaggtatttgccacatgcctgaaatctttctatttgttgtttataagaaagtggagtagttgcttggaatatttttgaattataagaaaaaagaagaagaaaatgatttctagaaatattttggtttattaacgggattactaatcttgatatttgatttttaacctttcggatgacagagagagattcgattaggtttttgcatgtgtccaactgtccacggaaaaaatttacgtttagttaatacttttttaatactcattaaaagtgattagtgtaaaatgtaataacttaatcgctaagactcatatttaaattaggaacatgaggaaactgaagtacgtggacaacttccatcaataccacttaagcttcaagaggcattgcaaagaagggaagcttccaaactatgtggttatagaaccaaggtacttcaagattttgtcggctccagctaatgatgaccatcccaaaaacgacgtcgttgaaggccaaaatctagtcaaagaaatctacgaagccttaagagctagtcctcagtggaacgagattctcttcgttgttgtttatgatgaacatggtggttattatgaccacgtccctactccagtcattggtgtcccaaatcctgatggtctagttggacctgagccctataactttaagtttgaccggcttggtgttagggttcctgctttgctaatctcgccttggatcgaacctggaacgggtacgtatgttttgaattggaaccgagttgtgttagtttagactttagtgtggtattgtcatgttggtcaaaaccggttataataatttactggtgatgacattattttttagtgttacacgagccaaatggaccagagccaacgtcgcagttcgaacattcatcaattccggcaacactgaagaaaatattcaacctcaagagctttcttacaaagcgtgacgaatgggctggaacactcgatgctgtcatcaaccggaccagcccaaggacggactgccccggtaaaatatatagttggttatatagtccatattaaacgcaatatatgtttaatgagtttttggattattacacagtcacattaccggaacttcctagggcaagagacatagacattggaacacaagaagaagacgaagatctcactgattttcaaatcgaactgattcaagcagcggctgtactaaaaggagatcatatcaaagacatttacccgtttaagctcgcagataaaatgaaggttttggatgcggctaggtacgtagaagaagctttcactagattccatggtgagtccaagaaggctaaagaagaaggccgtgatgagcatgagatcgttgatctttctaaaggatctactcgtcactcgactcctaagtcttttgttcagaagttattctcgtgtttgatttgtgataattgatcttgagttgaaacagatttgatctctgtgagatttggtgtatttctcggattttatgtgaagagcgtttgaaatttgatatttgtttgttttccaaattttatgttttacatttccgaatgaggttcattaggagaggtacctccgcgaaaaacagagtattttaacgaagggttcaacaaaacagagcaaaaacagaacagaacagaggaatttaaattgaacaaaaagcaaattctaacaaaacaaaagagtgatcctttgttatttgtagctatgataagtcttcctcttcttgatatgacaactgcaagcatccatggtagaagaagtcatacaaccaaacttcctctttacttctctccacacacttgtcttcttcttctcgcaatgaacaacacattcaagattctcaatctttcttttcttcatgtaatcaggttctatctcgagctttaacaacttcttactcatactctccacttcatctacttgattttctgttctctccactacacctttcatttctctagccaccttatcccgaatctgcatctgagaaacaaacaaaacttgcataacaatcctcaatggaagcttctcgttctttgaagcatgttcacaagcctcgggtgaaagtttcttacaatgaagaaacctacaagcttccatcttctccgattcaatcaagtctctatgcctctccaagtaaacatcaatcgctctgtatattccatcagagtaactcagcacatcacaagacgcagcaactgcaatttctgctagttccttgaatgttcctacccttaaaccagcatcactcgcagcagcctccaacagaaactcttccaacattctcgctacactcacaaaccgcgaaagatccgggacactatcgttactatagaagctcttgagaatggttttcaagagctcgatgtcataagatccatcttctgttggtgacagaatctggagatcttttgctctagccatgtcaagctggttacttatcctaacttcaaacccttttcggcaatcagagcaagcaccaagaaaaatcgattctttcagcgatttgaacagaaatccagacgagattgttcctctttggtgaggcaaaagcctctcaacagcttcaattccttctctcttgtttcttgaaacgcttccgtctcccgaatctttctcgaaaacccatctattcgcgtaattgcagacagaggccacaaggttttctaacgagacattgtgcttactcacttctagaatcaatggttcatataaccgaagtggtaatgtaatcaaatcttggagcaacctagtatcgttgagagccttttcgataagagaatctaagaaaacttcgatgagtccaacattagctagtttgtccaaaatcttatcgctgcagatacaaagagctttcacggtctcactccagctcataagaactcgttgttccaagaacgtaactgccttgttcaacaagttgttagagctatgatcatcgctcatctctaggtaataagcaatgcataacacagagacgatattgtcagctgataattcgattttgtatccataacagaatctagtcacgaggtggaagatacttgggttgatgtccatgtctctgatgatccaacgcagttcatggagcttgttactctcgagtaatgtcgtcactttcgccgatctcttagctaaagtctcctaaccaaacaccaacaccaaatatcgaaaccctcgaaatcagaagaaaccacaaaaagagataaatctcagcgaaatcggattcaaaagcttactttgttaagatgaaaatgaacgcctttcacatagaggtcaagatcttgtgactttgaatttctacaaacgattaacattaggtttaatacatatttcacagaaaattaacacgaaatggaagagattaagagttttactggttcgatgggttcttcgaatatctatttgacattttgtactagcctttctactgaatgaatagattgtatatgtttgcgaacactagtttgtggttgtaacttgttgtccaaggaacagaagctt

SEQ ID NO: 396 - DNA, 101410 bp, Arabidopsis thaliana
gaattctttggctcaatcgtaagtacttttatcattctatattttcttaccaaccatgctcatgcagatatgctaaatttattatttttctatttggtaggatgtctccaaacatggtagcatgcattgcagtggaggcgatatctattcttgaaaaactgcatatgaaggggttagtgcgaatttttgttgtcgccaataaatccatctatttcgaacaaaaatatttacatttgcaccaaaaaattacgccattgctgagctgactgtcatgcattgttcattccctacatcaaacaaggtttgtgcatggagatgtgaaaccagaaaactttttgcttggtcagcctggaacagcagacgagaagaaactataccttatcgatcttggtctaggtgagtatctgttaaatatttacaatcgttttatttttcaaaatcttaacatatatcatctatttcagcatcaagatggaaagattcacactctggccagcatgttgaatatgatcaaaggccagatgtatttaggtattttgattggtgtatgttatctttcctactattgttggtatatatattttgctcacatctttgttacgcttcatatgcagaggaacaataaggtatgcaagttgccatgcacatcttggtcgtacaggaagtcggagggatgatctggagtcattggcttatacattaatatttctgatgcggggaaggttgccatggcaaggataccaggtgagttatttatctatctactcacaatctagaaccttgtaagtttcagttgtagtcaataatacatggtttttgttcacagggtgataacaagagctttcttgtttgcaagaaaaagatgtcaacctctcctgaattgatgtgttgtttttgtcctcccccgtttaagctgttcctcgaggcagttacgaatatgaagtttgatgaggagcccaactatgccaagcttatctcgatttttgatactcttatcgagccatgtgctatatctagaccaattagaattgatggggctctaaaggtgctgactttggttcatatgtttatttttcactatttataaataatacaataagtactgatattttacttttgcatcaataggttggccaaaagcgaggaagattgcttatcaatttggaagaggatgaacagccaaggaagaaaattagaatcggcagtcctgccacacagtggatttcagtctataatgcacgccgtcctatgaaacagaggtaattctgacacatttgaatgttttgctcatctcatttcgggagtataaaaggtttgaaccctcactaatcaaatttttctttctagctgaccagtcactctttattcctggcataacatatggtttaaggctttgcatttattttggctttagttattacctatttgggttagatgaataagttgggatgaggaagaatactgacttatatcctaatgtattgttagaaatatttgtttattttggtactttacatttctttgcataacgggtcaatctttattgctcttgtagatatcattacaacgttgcagacttaagacttgcacagcatgttgagaaaggtaatgaggatggccttttcataagctgtgtagcatcatcagctaatctctgggccatcatcatggatgctgggactggtttcagttctcaagtttatgaactgtcctcagtcttcctgcacaaggtaaaacagctgaagcattaggatccatctatctgtcatacctattctctgactgtagcagctcaccatttgtttctggattctttgcaggactggatcatggaacaatgggaaaagaactactatatcagttccatagctggtgcaaataatggaagctcgttggttgttatggctaaaggtcggtagtcacgtctcatgataactttgccaatgaacttattgattcataaagcatgaaagccgttttacttattccacttcatgtaatgcgataggaactccttatacccagcaatcttacaaagtcagcgactcatttccattcaagtggataaataaaaagtggaaagaaggttttcatgtaacatccatgaccaccgctgggagtcgttggggtgtagtaatgtccaggaactcaggctactctgaacaggttccgatctctttacctgaggcatttcaacttttctttgtttcctttttgagcactataatgtattaacgaggtttatgtggtgtatattataggtggtggagcttgacttcttgtacccaagtgaaggaatacatcgaaggtgggaaagtggatacaggataacatcaatggctgcaacagctgatcaagcagctcttatattgagtatacctaaacgaaaaataaccgatgaaacccaagagactctccggacttctgccttcccaagtacccatgtcaaggtgtgttcttaggaaacaaatgaagcatgttggctacatgaaactacaaaattcggattcttctccatttgttctatgtactgacttggacctgcattttctatttcaggagaaatgggcgaaaaatctgtacattgcatcaatatgctatggtcggacagtttgctgatgaaacatggagtatactgtttcaacctctctcactctctctctagggttttagggacgatctctctctagaagcctgacaacgtgtagccttcggtttcagtacaatccaaaggtaaaccttaaccaggagccaacctatgtgactgtgtaatgaaatgaaatttgtctctatgtatgtagtaagtacaagataaaaggaaaaaaaaaaaattgagtagaagagacgaaatcattattactagaaatgatgaagagctgcaacaagattatgcagtttctggcttatttggctttgtacctgatttgagtacagaatcaggaggaagcaacatgtttgttataatgaacatataattctaagaaggctttcatcttttggtctcaagttttttgcttccagttttggattttaacattgcaattatgttaagatatgatataaataacaatcttaatagaagtcagatatttcaaactcaaagcatcgttttcaattagtcttgagcagctccaaatcttataaacaaatgctcagtcaacgtactagtcaacattatgaaatttcaactaacagccttcaaaaagattacacaacaatcactgacaataacacaatcactgacaataattgtgaaactaacatggatttatttttaaaattttatttatttaaagtcttggatcatcatcatcaccggaactcacagagtctctcacaaggaaagaattagagaggaatctacaccagaccaggtaaaaaaaattcaatacattcgttttccagaagtttggatcatcatcgtcatcgagaaatacagagagttttgattttttttctcacaaggaaagaattagaagaagcgagagagagtatctatttattttatataagcaaagaggttcaaaagaaaaaggaaattgctaaatcacaattaacggtcacataaagatttccttttttctgtaatgggtttagacatttcacacaacaacctctttggcaaattttacaagcccagctagctaaaaacaagcttactagtagaaattcatgaaagtcctcagctagatagattcaacgatccaaacatttacgtgaacaacaacgaactctgtggaatgcaaatacaagtatcatgttctacaccacagaccgagcaaccaagaagaagtaattctggagcaatgttttcatggaatgtttcagtcataggttgtccttgtggattacttatggctgtgtttgttataatgaatatgtgattggctatttcagtgattcatcaccaccaagaccatcccccagaaacagaggattcaagaaatatttaaaactaaaaacagttaattaatcttctacaaaagcacaatcttcactttggttacttgagaagaaagaatcaaacagtactttaaacttttataaaggaacggagataaaacggtttggttaaatgttagactaattcccggttcaactaaacctaatacggttacagatttaggataatacccaatcaaaaccctaatcaaacactcgagaccgaagagacagagaggacgaaggtctctgtggaatccattagagaagtagaaaaaatgagaccaccgattagcagcggaagaattggtgatggcggacttgattcatgccctgagaagaagtaattctggatgaattagtattagttattatatagagtcatcgttgatgaaattttcaaaggtttttcttatgttttcattacgcagagaggaagagaaagactcaacaagtagactttgttcggatttgagtgatttacgaatagaaagaatcggaagtactcctgcgttccaatggatttcagtctataccaaacgtcctcctatgaaacagaggttcgaatgaatgttttgctccatcattcttttcttgagtatcaaggtttgaaattttttaggtttgcgtttgttgctcttgtagatttcaccacaacattgcaaattcaaggttgtcgcatcatgcagaaaaaggtaaaagggatggccttttcataagctgtgtagcatcagaagctaatctctgggccttagtcatggatgctggaactggtttcacttctcaagtttataaattttcttctaccttcctccccaaggtattaccatcatgtccactatgtatgctctgactatatatatagtagcagctcaccacttttttttttttttttatggattcttggcaggactggattatgaaacaatgggagaagaactactatatcagttccatagctggtgcaaataatgggagctcattggtcgttatgtcaaaaggttggtacttatttgattcattgtgtcatcatcaagccgggtttttacttaaaattcaacttcatgtaatgttataggaactcgttatatccagcaatcatacaaaaccggtgactcaattccattaaagtggatggataaaaagtggaaagaaggttttcatgtaacatccatgaccacgggtgggagccgttggggtgtagtaatgtccaggaactcaggcttctctgaacaggttcagacttttactacctatttcttctttgccctagagtctagactataatatattgatgatgtttatatactataggtgatggaggttgactttttgaacccaagtgaagatataaatcgaaggttggaaagtggatacatgataacatcaatggctgcaacagctgatcaagcagctcttatattgagtatacctagacgtaaaataaccgatgaaatccaagagactttacgcacttcttccttccctagctcctatgtcaaggtgtgttcttaggatttcaaacatgaaacttataaattttttgatccttctccattttattgttttctattgtactgacttttgttttcaggacaaatgggggaaaaatatgttcataacatcaatatgttatggtcggacagtttgataatgaaacatggagcatattcttgtatctgttgcggtaatgtatgaggttagctggatatttcagatattcaatgcgtaaacagagttgtcacctagtcaatgaaatgaggtcatgaagagaaacagatacatctttagtatttacatgtttacagtagaaaaacaaaaaaattatctgtttcttgtaagaacatggataatcgtactattatgagtgttgcaagcttcatatactttctcataacggcaccacatgtcttaccacaacttgatgccatgtactcgcggctcagagcatgatacatttaaccaaattattcttcctctctggtttcgtgacgcctttacttgctgatacagcactgtggagaatccaacgagtttctctgtttttgactctccacttctcattgctcaatgacatttgtttgaccttccttgaaagtagtcctctcacattggtctctttttgccctatctttctaggaataattctgttttcttactcttctctgcttcttctacttctgcttcgacaacatctttcgtctttgaatgagttcttgacagtatcctgcaacaaatttatatcatcagactgggttctttgcttcaagacttgttgttcctttctttcccatgatatttaatttgtaatgaaaaaaaacaaattattatttactatttgaattctcactatattgggctaagatgatatatatgaggcccattagttttaatgttacacccacggcccggtttgcgtataaacagtcatgatcagatctagaccgtccaaaatagggatctcaaaaacaacaaatttcaagaagcacttgtaacggtcagagatggagaaccgatttggttcaatgttagatagatatctggttcaactaaccaaacccggtcgaacgattacagaaaaaccctaaatacccagagtcttctaccatttgagcgtcgtcgctctcaattaaaccctaaaaccctcctcagaagagaggcagagagaaaaaaaacgcagtctttgcggaatctgtgaaaggagaaaagatgagaccaccaatgagaggcggcgggggtttccgtggaaggggaggacgagacggtggtggtggcggtaggttcggtggaggaggcggtagattcggtggaggaggaggacgctttggtggtggaggcggtcgctttggtggttttagagacgaaggtcctcctagcgaagtcgtgggttcgtttctttacttgacatagcttttacttgttaattggtttttgaaagcaactattaaagatgttcgatttgtagtcggagctttgaaatgaatgagcttgttcctgcttgaatgtgtagttgtaatggacaagttctaaagttcatttctttttttatcattgatttctcattgacgaatcgtatcatgctacttttttacccttgagctagtttacaagtatgatgcttttgacgggtttgtgtgtcttttattccgagtttcagctttgagttgagtatatatggtttttaatgctagttgatgtatatacttccctgactgcttttctttttgttcgtttgtgatgaggtttctctcttttggtttacagaggttgcaactttcgttcatgcttgcgagggagatgctgtgaccaaactctcacaggagaagattcctcattttaacgctccgatctacctagagaacaagactcagattgggaaagtagatgaaatctttggcccaattaatgaatctgtaagttctctattcttctttcagttgtaagcaaactagaggtttctgacattaattctgttttgattcttcttcagttgttttctatcaaaatgatggaaggtattgtagccacctcgtattctccaggagataagttcttcatcgacccttacaagcttttgccactcgctcgattccttcctcagccaaagtaagccccacttcttaacacatcattggtcaatatataagtttcttttcctgaacttgaaataacattagtgagctcgtttaactttagcaattagctttttcctcttaacaatcgagactttagatacactattagttgagagttgttaattgtatcaaactccatctaactgcgtgtctttgttcttccaggggtcagtcaacgggtggacgtggaggtgcaggtcgtggaagaggtgatagtagaggtcgtggaagaggtggatcatttagtagaggtagaggtgctccaagaggtggtagatttccaccacgcggtggctctcgtggaagctttagaggccgaggaagattttaggttcttctcctgctttataagccttatccaaacttgtaccctttgttttatgaatgactatcgttctcccgtattctcaattttcaagactttggttttatctatggagtaaaaatatttgcatcaaattagattcgttgatagaaaatttgagaaggttaaactgcaattagcacatagtttttattactctagaattgactcaaatcacaaagcaaatcaacaacatagaaagattttctgaattcttgttctttagcttcccatgggggggtatcaagaaccccagcctctgatagtggtagcttgagcgacacgattaataccgagggtgaaagctcccatacggagatcacatgagtgcgtctgacacatttctttcaagtctttgaacccgcgagtcatgtaggtctttagctccctattcaccttttcctcatcccacatgaatccttgtatgttcttcacacagatataacacaaatcagtgttttgatcgagtggctttagattcgattaggtcatacagtcttgattttcgagtcttacctgaacccactcgaagtaacttacagtgactcctcctgagtttgcgtatatatctgggaggatcataacacctttcttcttcaagatctgcggagacagatattacagagtttctgttacgcgagtttgagaagaagaaagagcaaaaacaaagtatcagattttcgaataacctcgtcagcctcaggatcagttgggtgattagcaccttcaatgatgaatttggcttttatttcgtttgcattttccctaaaacagaccaaagccagaggtttagaggaaatcatgatagagaatagattaatatttttgagacaagaaactataaaagacctgttgatgactccccctagagctgcagggacaagaatatcacaatcttcgacaagaatcgaatcaggatcgattgaatcagcaccatcaaaccctttgattcctctgttttcttcagcatgctcgagcaaactcaagatgtcaattccattattgttcttgattgctcctgtgacatcactcaccgccacaatcttaccacctttgtcacttatcaacttcgctgcccaagaacccacatttccaaagccctaaaacgcagagacagtatgagtaccctgacaccgaagtaatctctctgactaaacattgtaacttcttttacctggatggcgaatcgctgtccagatatggtctttccatgttcgttgagtaaagcttctgttgcaaacaacactcctcttcctgtagcagcatctctcccaagagatccaccaagatcctgctcaaaacatcatcctcaaaaatcaaatctcattcagttttagattagttgaacacataaaccgaaccaacctaaaaccgcgattagaacggtcacttacaatgggttttccagtgacaacagcaggagaatgtccatggaattttgagtattcatcaagaatccaagccattgtctgaaaattttcatcactatatttcagacaagaacaacacgtaaaatacaagatgaagacttcaagatcatgttttcgaaacctgaggaccggttcccatatcaggagctggaacatcagtatgaatcccaataagatcgtgaatcttctgagtgaaaactcgagtcaaacgttcgagctctgagagacttagctcgctcgggtcacaaccgattcctcctttggctcctccataaggtatcttagccactgctgttttccatgtcataagttgagccaaagcgtttacttcatccggttcaacctgtcgattaccgaaatctggtttacttcatgccaatattgaatttgttttggtttgatgaaaaaaaaacagagtaaaacaaacctctggatgatatctgattccacctttcatgggacctcttgcattgtcgtgttgaactctgaatccaacaaaggatgctagagttccatcgtcttttggtatggtacattccacctgcaatagttggttagttccgttcaaatgatcttgaaccggatcggttctgcagatctgttatagatggaagaagaaaacagaggaaaacatcgaaccttgatctctctgaagggaatgagaagacttttctcgagctttgagtctaaaccaagaagcctagaagcaagcttgaagtttctgttggttgctgctaaagcattcatggctttcttctctcttctttattttgggtttatttgatcagagagtctgatatgaagacagttggaaaaatgtgagtcttgcttatgttattgcaagtttatttatatagagtgatacgtacacacttcgtgttatggaatatgagaatgaaaattttgttatttatatttataataaaagataatttatataaggaatatgaataatcatataagatgatacccataattgatcctgattttgagtattcagaatactatgtgtctgtttagcaaagttctcacacaaaaaaaatatatagattatagaaatagcccatgtcttcaccatgtgtataaactagatcagaataatggaatattcattaatgaaaaggaaatccgtagactaatcaagcagaataaatatattcttttcattacaaaaagatcagaataaaaataggaaaaatcaagatttcacaagattataaatattacatggatgaaagagatagctcgtaaaatttatcttattgtgtcacacactgtcattttattcattttaaatctagattaaaggaaaaaataacatttcgtattacctaattagtacccacctaataagcaaggaccaagatattgtttttcagaatttgtttttttttttaaataagaaaatatgatacaataatgatctagcaatagcatgcattggaccggatgactatactcgtgcatgaaaaatcatagtcaaattgtaatacgttaatgtgggacgataataatactttttttttgttttattatctacgattatatatatattaataatcatttacatatttgtgatatacgacccgaaatgaatcttgcatgtcataagatctttacgtgttattaacttattcaattctacttgcccctacacatataggcatagcgtatacacttttgtgagagggtgacaaaaaaaaacgtatacactttagtgagctagtgggaaaaaaacgtataaacttatcacacacatacaatattcagttttaattgaaaagattctacggatatatgtttttttagatactcaaatcagaatctttttggaattagaggaggacacgagaggatgcaacaaatcaagaaacatatagaattacaagattccaccatgaaagaatctttttggaaaagagattccccatgatttatgcttccactaatataattgatttattgtggatttccaccaagatttctttctctttcaatttccaaaagaagatatcaatttcgtaataacaacattgaccgtaaatagtgtttccaaatttgatctcaccctctttggtcaaaccaatatatagaaataataccccaataaagaatccggttcatggtaggcttggtagctaatgtcaaggatttagtatttttaaaacgttatgcattagctttctatcactttttaatacatgaaaaaaaaaaaaaaaaaaaaaaccaattggactttctcctaaaaggccattccctaataaacaacaaactacgaaaagctaaacatgtatttaaaatattaaagtgatagaaagctaatgcataacaattaaatgaagcaatttttttatattctttggtcaaaccaatatatatacagaaataataccccattaaagaatactgttcatggtagctaatgtcaaggatttagtatttttaaaacgttatgcattagctttctatcactttttaataaatgaaaaataataactcaaacaaatataaaaggccattccctctacgaaaagcaaaacatgtatttagaatattaaaaagtctaaaatcaaacctaaaattcaaaaatcaattaaaggccacaattgtcctataaaattatgggcttgaagcccaataatatctaagtgaaaaactaaacttaaatgctctctcaagggaccaagtctcattattaccatcacctccgagcgttctcttctctccatctgtctgccgctcctttaacgtcggttcccattttcttattcacaatgaccccaagaaactcgaggagatggaaaaaagcaaaaggtaaaacaaaaacaaaaaagctttcttcgagaaccagagcacattgattccaaggtaattactttctcaatgccatggaaaaggacccattttgttcccctttcctgtaatctaatcgtttcaatccgtgattatctctgtcagcttggaggaaatgacttagatttcataaatcgattcatgagttgtcagaaaggatttaaattttgttggtttgttcttatttcttctgtagctgctatgaatttttagatttagtttggctatgattctaaacctacgtctttatgaaagcacttacattttctagacacaagatcatagtgagttcatatgatgcggaaaagttattattctcttggtcttccagtttatatttatggaggaacatagtctcattaacaagcttgcattgttctgttccattggattgttataaaaatattcattggtcaattgagaaatcagtgtctaattttttttgaacgtgtctttgcagattgaatgctgtttctggtggattagtttctctgagttttggtgatagatcagattaacaggcagaattttgagaatgtcgacagtgggaaattcaacgaacatattttggcaagaatcccccattgggaaaactgaaaggcagaagttgttaaatcagaagggttgtgtggtgtggatcacagggctcagtggctcaggtcaatcttctaaaaaatcttaaattcttttcccattgtgatacttacttaagatgccttctttatatctctgtctatattctaaaatcttagcctcaaactttgtgcagggaaaagcacgttagcttgctcgcttagtagagagctgaacaaccggggaaagctatcatatattcttgatggtgacaatcttcgtcatggtttgaacaaagatcttggtttcaaggcagaggatagagtggaaaatatacgcagggtcggtaagtagtacatagttgcttactatcttttgctttcagttgatgaaagtctgattccgaagaaactcactaatacaaatgcaaatcctttaaaaaggtgtctcatatgtagtgatagtttacatggtaccaatacctcattgatatacatattggtatacacctaaaagctgatagattctggttaatgttgaaagaaacttctctaaagggcaaaatactaaagaagaccaacaatttgttctaaatgcaggagaagtagccaaactctttgcggatgctggtttaatctgtattgccagcctcatatccccgtatagaaaagaccgtgacgcctgcagggaaatgatacagaattcatcttttattgaggcaagctattcaaaaccaggctttacagtttgtaacccccattcggttggatcttaaaaacatcttgtttgatattgtggccaaatttgttaggttttcatgaacatgtctctgcaattgtgtgaagcaagggaccctaaaggcctatacaagcttgcacgtgcaggaaagatcaaaggtgagataacatagcttcaaggttccatataaacagaagatagcaagttgcttcaatatcatttgagttgttctataaaagtttttttttcttcatacccttttgtgtaggtttcacaggaatagatgatccgtatgagtctcccttgaactgtgaggtatgtgatccatgtgaacataagattcttcttcaagaatattgcaaacaacgcgtatgtgaatacgtttctctgtttcttttgtatgttttgaaacataacagatagagttgaaagagaaagagggagagtgtccttcccctgtagctatggctgaggaagtgatctcttatctagaagacaaaggtttccttcaaaacgagtaacgtccatcataatctaacgaccgagatttgtttttccttttactttttatgggtgttctctgtttgttactttcctgaaacactgcaaattcttaagaagtttcaactaatgaagacatatatagcttcttctccttcttctgaaacttgtcttctacactgaaactctagtcagtcaataccagaattcgatcctatacaacaacaagagccatgccattgttttcattgttaatttatactacgatacaacgattatactaagacaaccattaatttacatagtgtcatagtatttagaattttagtttttttgggggtcaaaaacaatagttttagttatgttagtgaataaatagattcagaaaaaactgtcgatcttatttgaatagttcgtaaaagagagggttctgtttgcaattttcctaacttttagatcctgagttctgcaatataaataaagaacaaaacaaaacacgatcacgaggcaattttgagacaagaatggtgttgaatagtcgattggtggagacaacagttaatctgtcggcggatctctggcaatatgttgcgtgtaaccccgagatacttcctcgcgccaccgtcatccatttcatcttctgcatccctctcctccaactccgccgtctcgcttcctctctaggatcatacctatgcttcgattccggcgccggagttgatcaccgtactcattccgattaagttaccggcgcgtttccatgaatcgtctgttaaatttcgacttttgattgtgtaatttttgttctgattgtaatgtaattttgtttgtttgtaaaccgaaagggacatacaaatttaataccagaataaaccggaaacatttaaatacacacagaaccaaaccgggttgtgtggaattgttgtcgtcacaggagagaaataagcagagacgtgtaaaccaaagaacaacgaaggtttcgtttcgtggggaagaagatgaagtcgcttgtggctcatttctcaacgcctttaatcaccgctagattagttcctagatgtatcatccatcgagcttcaatctccgccgtctctttttccaccgtccgccgtcgattttctcctctcaccatggcctcagcagctcagtcttcttctcaggtacctatctggaggattcaatgtttggagttttattgatgaatctgtgttctggttttggattgtagacttgtagtgggtgagttttattggtcaggaaaatcagtgaatctgtatcttgattgatgtggctcgttgatctgtaatttttgcgccgattatatatatgaattttattttttatgatcagagaaagaaaaggtcgaatctttttcaaaatgccagacttgtgcatataaagctctacgagtatgctatgttaacttgaaaggggaaagttatattcgtcaactgttgaaaacttctaactttgtgtcatgtacttctactaatcaggctgtgtcttacgggagtggcaacagtgatacagatgtttttaaattgattcaagctcacgaggtaactaatttgccaattttgtaaccatgctagctgaatatatctatgttctcaatgcgatgtgaaatgagttttaaagtagtgatatgtggtcgtctaattttcaggagaaggctgctcgtctttccccagtcgaagaaatccgaactgtgcttaatggtagcatatgcggtatgctttccactttttctcaggtgagcaattagttatgaatatgatttctcatagagaaataagggtgtgtactgaagtcctaggattctgattattggtcaccatgtcatatgatgtaatttcaaaagccactgtgactttctctcatttaccgaaattttgatctggtgcagaagtatgagggttatccttcagggtcaatggttgattttgcatgtgatgctgatggttctccgattctggcagttagtagcttggcagttcatacaaaggtttgcttcttattcaaggacttaggataagtcactgtctactttttcagttctagatgtcatgtggagaatttctgccgttttcaggatctcttagctaatccaaaatgctcattactaattgctagagacccagaggataggactggtttgaggatcaccttacatggtgatgcagtgttggtatgtatttagctgtgctgctttatatgcacttacattcaaatacaatgcttgaatgtttttctatgtattattcaggtttctgaaaaagatcaagcagctgttcgatctgcctatttagccaagcatcccaaagctttctgggtaaataccctttcttgtaatgactagaaaatgaagaacttcccaatgacaatgtatcatgacatctcaattaagttaactgaacctttttttcttgaaactccaaaggttgattttggggacttcagctttatgcgaattgaaccgaaagtggtcagatatgtttcaggggttgcaactgcttttcttggatctggaggtatcttactgcttcttcttgttaactcttatgcgatccagtttacttactcactgaaatctccatttgcagaatttagcaaagaggagtaccaagcagccaaagtcgatcctatagctcagtatgcaaaacctgtaacggtataacaatgatatccccagtacaactttttttcaacatatagtagtggatgtttactaattccttttcattttggcagtctcacatgaataaagaccatgaagaggataccaaagccattgtacataatataacatccatacctgtaagtaatactattcagttctatgaaatctggttaagcctagtactgtttttcttcgacagacgatcacattataccaatatattcatatacatcacaattaaactatagaatgagtaaacttccttgaatgtcaggtggaaagcgccttgatgctggatttggatagccttggtttcaatgttaaggtgtgttttctaaacatgaaatccctccttcctctcatccatatctttcagtgtatgaaacatttgtccatttccttgtggcaggctactcttcaagggaacaccttcaaactccgagttccgtttccaagacgcgcacaagacagaaagtaagacactctgcattacagttatgttcagggtttctgtctagagttaaaaccactgattctctttctccatcagagtgctccaaaactgattaactcttgaatggtggtggtgtttccagggatgtaaagacattgattgtggaaatgcttcaagctgccaagtccaattagttgctaaaataaagatggaaaagctcttccatctgaatcctgctacaacaagaaaagcttcctccaatacacattttatcttatctatcagttgcaaaaagaacactcatttagtcctgtatatatctcaacaagactagaactagatgtatacatgaaaaaaagttatcaataaagatttctgaagttgtattggcattcatgaatgcttaatccctttaccatgcgtttgatttcagaaaagttaagtagaacttgcattacttttctatcttttcccagtcaaatccagtgaccgattctcatttcaaacgcattttgtaacagatttgtcattgttccatcacaaagaaaatgaagatagtatatgtcatacaataattggttacacttgagcccatgattaagtgccgccaaataggactaaagtacattatctgaaacaatagattaggatagggttacaagttacaacaggtacatacattgtcacaaagaaatgatatatccttgtgttcaaagtgctcaaccgaataatttcatctaaaatacattcttaaagattgcttaaggaaacccacgaaagttagcttaaatcaatacgcaaacatttctagtaaactaatcttaaaacttgtcaatctgaatcagtctccatgtttcccatggcttttagccctcttgctcgcctctgcaacacaaacacaacacacaccatcatcattttcatatctctaacaaaaagtaaagcaaatacaatctcaatcactattgatggatcactggaatgaaattgataaaaaggtcataccttcttagagctcttcttcaccctaacatcgtatctatcagggcacaaatcagccaaccatgttccaggactcaccaactgtttaaaatcagacaacacattattctcaaaactataaacagacaactgaagaatcttcagaacacttttctaaaaacgacaaaaaagagtatgggaaactaacaagtaagcttctttggatgagtttagctctcttcttaggcctatgagaaggtttgcaacctttcatagccatgaaatcttcttctttctctttgtttgataatgttataaagagcttaggccacatactctcttccttgttgttgctatcttctccattgatgtttccatctaaacaatctttcccaatgttatccactacacctctcgtagtataatacctctcctctttctccggagacggtctccggcgatctggtagtccagatctgaggattgctccttctgatcctctacaaaaacccaccaagaaattatgagtctttggcttcgatgccaagagtggaattgagcaatttcacaacagtaaataaaggaatcacaaagttaacctggagaatctagaggattgaaggaggacggtatcttgacctagaaagcgagaagagtttttagaacgagagatctttttggctttggctctaagacatctcaatctcttcttgtttccccactgtaagaagatttcttgttctaacgatgacgacatttttcacaatcgtcctaactgaaaaatttatccaaaagtgaagattattttcaatgttaggaactgaaaatcaaaagagagattgattcaaattgatgtgaagagaaattagacaaggaagcgtgagctctgcaaattgttctcaagttacctagaagttccggtgaatctgattggcaaacacagatcgatgattttgtcggggaagaaaggaagtgaagattacgatgaattctacgacgtcagacgggttcgaccaccgtagtcgctagtttctccggcgggtttaacgaaaactgaccagaagcgtctttctctctatctaccgactctgtaaaatgggaggtaaaggtggtttatatgcctttagggcatctctttgggttctttactaaccgttcgattataaaattgacggtctgatttgagaccgagtgtggtaatttacggtctagccctttttcccactggcaaatgacttttattaccttttaaaaattactgccaatggtctttaaggaacaatagcttgaaaatggagctattttcctctctttttggggataattcataatagcttaaaaaatctattccaataatcaatatccttttaaaaaatactaatgttggtaatattcagcaattcatatcctttatatattaaaaaaaattgaagtatggctttatgagtaattgagtattcaaggaaagtaaaataaaagtatggctttatgtgacatacatgccttgagaaaattataaaatgatttatgcgttcttaacttcttactgacaataataataataaaaaattacatgaaatttcacaaagatctattaacaccacataattaatcaatatttgaacaaaataatagaaatttacaaaaccttatactacattcatgtatgtacattatgaactattatgatggctgagattcaaagtccatcgtagtgacccccaaaagatatttgagctcttacgacaggaacacctttcataccaaagattgcttcattgagctttgttgcatgattcacaacttctttcatcctctgcatccaccaacaatgaaacaaaattttatcaacaaattcaaattgtagagattggtgaagtattgatgatcaacaaatgttagtatattactacaaacatgtttaaacagttatcaagtatgttattgtaatgcttttaattaggattttgatatgtctttaatgggtttgttacatggctatatgctatatttagtaaacgaagaaaatttcttcttatcgctttgacgttagcacaagaaacaatcataaaacaaaacgtacgtacaaaggtaaaacaagaatagttctcttcaattctaaagattgttcacttaaacacgtaaacttgaccttatcatttggtgagattaaaatattcaaaacttatttctatagtttgaatcaaaagtgttatcaatcagttaatcatacaatttatagaatacatcaaaactataacttttatacaatcaagcagacagattacgaactaatcgtcatgaaccattaacattagaaaataatattccaccaccccttttcactattttggttcatcttaacaaatactaattttttgtaggtggattatatattctatacagtctcttatccaaatctatcactcccttttctttcatatcatataatttatcaatatacaaaacaccatctcggaaataaaacacaaaaactttttacatttatcgttttctgattaaatatgtaaaacaattgttagtatatattcgcctcaagacgaaactactcacataaaaccaataatttttcattaaattatttaactgagaacattcaaagatatatcataaagaaaaataaaataaattcatttaactaattaagaacattaccttattatcatcggagtaaatctggaaccgaagcatctggttcttgttcttacagattttgatattgttgtgtccgaggaagaagacacatacggtagcagcagcagctgcaaccccaaaagaacagattgctccaatcccattgagaccagccttccacagattcaatctctcaccaccactaccatcttcatcttcttcctccaaaacaacttctttcttgtctcgcaagtcatcccctccttctaaatcagagggtttcgaagcagcatcatcgatctgaggcagaggactcgtgatcctcgctggtgggtcaattttcatgtcggcaaattcagtgtccttcatgatcttgaaggaaactcttggtgacgaaacagagtccgtcgaaagggtcggttttgaatccggatccggatgcggatccggttcaagatcagggttattgggtatcttcgtgttgtcttgatccaacacggcttcccaagctatgggaacttgaagaatctttttagggaccactttggatcttggaggagactctgtcttggggagaggatctttagtagatgggcagaggaagtagtccatcaccatggctccatgatgatcctcgtcatgatcaagatcaagatccttgaagctgttcttggggagtactaattcccaatcctcgagatccatcttctccttgatcgatcttgttggaacttcaattagggttttagaaattagaaaagaaagagagaagtttttttgtttgagaaagtgaaatcttttgaattattagagcgaagtgggtttggtattctcatggagtaacatctctcgctatctctctttctttctctctcccatgtgaaggggtctcaagatcctttaataaaagattcaaactagttctgagaatgtttggattaataataataattaagagaaataagattgagaccctaatttcgtttcttaaacgaagcaacacaatatgctttgataacgcgtgtgccgtgtggtataaaaagtaatgaattgatttgaagatgtgggtgacgaaaatgaattagagcttatctaacgcaatgaagtgacaaaagaagaagtggtcctttggggaccccattcgaagaagaaccattgattgccttctttgacaaggtccttaattcttcctctttcatgaagtcttcgttcctaaattcaaatcatttttttggatcactaggttttcggttagaccgatcatataataatttgttcaaataaattttaatagtaaaatttgagtcggctacatatttatttctttatacctatctagctaaaacgttattccttggttaactataaaagaaacagaaaatatatctgacacaatcagaattcagaaccgtaacccaataaaaacgcaattaatgataccatactaaaccaaaccgacatatcctcagtttcaactttcaataatatttgtagagagtgagcaaggctaacactcataaaatgctatgttgtatcctatataatgcaacatgcactgatgcacatgatgataatgtaccataacatgaaaccatggtagagccaaccaaactcgaactgacattacaagacaaagctgcgtaagataattcagacaaatttacctgactcaatcaaattattcagtaaaagaaatgaggccaaaaacagacatctcaaatttatagaacaaaaaagggagaaagatattcacaaacagaagcaaagctgttcctggatttacatgcttcgttgcagacaaatcaaactcaaataagtcatataacattcattaaaggaactctcagatttccagcacacacttaaaagctcatctcttcccaatactgacatgatcttacccttgagatcaggattggtctgatgaagtttggcctagagagacagatgccagcgatgaagcccaagcttgtgcgttctttgccctttcatggaagtttcttgttttgacgagacttagtttcaaccataacctcctcacatcgaccatgtgaataccacggttgaacagttggcttatctctccaaatcttcccaagttcaaattggcaacgtaagaagcccataacgctctcatgcgggattcagctatggggaagacaaggattgccatttgtaaacagataaacagcagagatagtaccaagaacggatcttgtttgaatatttctctaatagatgtccccttgcgcaaccatgtgatcaagttaccatcaccggcatttaagcctgttggttccccttcagccacatactggacaggttggaggcctggaaagccagaacaacaaccagttatttctaaatcgatccacccaaaatgtgctagtcataggttggacataaaacaaagactactcaggtagactgaaagaaattaaaagcagacgatgtggtttggtgtatcacctgttgcctcttcataaaactcaatcagggatataagatcctttcgaccatggtaccgagcatttaaagtttgatttaccatcaggattgaaggtaagctatggataccatacctagaaaagacactgcaacaaagcaattaatgaaaccagttagtaagacaaaagaaacagccagacacatgaagaaacctaaaagcacttgaacctactagtaacttagtatacacaaggcagataaggtaatgatgaactaactagttaatgatagatcaaatgaatatttgctaatgaaatgtaagataacgtaacagcaaacacacatgaccttctactaaagtgaaaagaagaagcaccttatatggatcaagttattaaataactgatatgcaatttaagttttttttactctcaaactaaactatcagtacccaaaaattcttgatgtgaatcattcaatcccacttccttgctatttatcctaattagtatggaaatagaacaatagacaatgtagtctttggaaaaacaatagtaagtagacttcttacgatggcagtgcttgagaatgctccacagctaggtgttgtatttgaggaaacatggaactcaacatatcaaacttagggcgcacagcacgtgagaatgggcaccaggaagcataaaagagtacagacatataagcatttccatgttgtgaagccattagcctgtctagtgagtctccatctacctgcatagtgaaaattttgacactgctttagttaagaataaagcttcagatccccttagaagaaacaaagaacacctattcaaaatttgctatatcatatttgcggacagagcagctactacacaatctgcattacaagagcattaaactatgaacctaaacagagtttcaagtcacagtagtaggtaagatgataatccaaacttgaagaacaagaggacgaatctgagcttcaacttcaatgcttaatagttatcaaaatccatcaatgtttcctaattcaatatttgcattggaagagtagtctaatccgcatagataataagttacataacctcacgcttatttcaaacaaaccttagagctcacaatatgagaaacgtacctcaataggaggagttggatacagagaaggaggacatttggcctctaaatcgaatcgaaacagctcgaattcgtaattgcaaacggaaaagtccactggtgatgaagcagacccagacgtaaagcatgacacggctattgcacagacgaagagaatcgaaactcgagaatccatgaaacttgacgtagtacaagagccagaaaaactaggatcctttaataacggaattgcaaaattcgaggagggaagcgaaacaaaggtagaatcaaaccttaatgaataagataacgataaaactaagctagggctagaaatgaagaacaaaacctaattttacgatttggggaaatccccgatccgatttttttttatttttatttgggagcagaaacaacagatcgagaaacgccaaagtcgaaatgtatcagaagctagctctattggtctcgttcgacgtgtttctgatattggatttaaatagcaccacccgatcttacaaattctggagcaccatttaattctgctttgttcattgctgaaaaaaatattaaattttccagatcttttactaatttaacattatcttttgcaagtgagtaagaataaataaatgaaaaacgtgacttaatattttcattttcaagaaactaaaaaatttaacattgaattttttttccgtataactatatttatgtttttattatttgtttccaataatttttttattttctgtaaattcttttcccaaaatatgatatcatgccatagttgactttttttttttgttgggatggttatggttctttcattctttgttttacaggtaaattcgtttttttttttagacagctcaattctattaattatgattgaaaagtaacacagttaatcaagatccttaaatttgggtttgaaacatatatgggcctatgaatatgtgaggccttaaattcagcccaaattgggtcatcctccagctaaaacaaagggctctgcagaagagaaagctcgaaatcgagtagaaaaatggaggttacagagacgagggaagaagaagagattaaagaaacaaagtttcagtatatctccacgattaagtttccgatggtttcgattaaccctatttttgtgagctcaaagctggttttgcatcctctaccgtctcgccttcatttgcttctgttgatcaataatcatatgcatttttttgatgtgaactttgatttagtacaatttctcccatataagcctaatccagttcttacaattcacaaagcattaattctatctacgactaagacagctgaatcttaagaacaaatggcttagtattgctatcattgttgatgcacgctttgattaattgagatttagtgcttggcctttactacagtggctctataatctcttaccatgttttcagtacaagtttgcagtttggtacacacgacgaacaccaggagttcggagccagacagtcttatgaggatgacattcagcaaaatcgtggagttcagcacagtaagttgacatttatacttgagactgtatctaaatccttgctgctgtcacctgtttgtcttcatctccactattttacggctaggatccgcccattgtggcaggtagagatattaactattacagtgttacgtataagataacaaccaaaatcttcaaaaacactaaatcccaagatgattttcaggatgctgattgtctttctttatcttttgggtcagcttcatatagataaagttctacattctgttgactgtgtagacatatgctgagcaagaaatcatttgcaaagaagaaatgtctcactgttttatgcaaagacatacatacataagcagatcagtattatgaattcagatgtacataaaccaacatcaccacgataatcaaacaagtttacaacatgaaaatgcacatataatctcacgttccatcaacatgaagagacttaggagagttgaagtactccacattcttttacatcccattctttacagtagactgtgagctcaaagcaaagctcgttggaagtcacatctacttctaaattaaaggtatacaaatgcccgacaaatgttactgcgcgaggtagagagagatatcccggtgggcatggaacaatgacgccattctgtttgtccatgatcttatattgcagatacatactgtacgtaccaccacatggcggattgtcaacattatcaaccaacataacgcaagccttgaatctcaaaggtttatgaggaggcctctcattcagcttcactgttacaatacttccagtagctcggtcactaaagtaggcaggcacttctccaccgggtacgactgaaactggacgattcgatgcctggatgatgagatctctcgcttcttgatttagtttgaagcagttatagaagttgagagacatatctggattgcaaaaagagcaatctagtttctcaagggattcacaattttcggcatctaggaacaaaagggaatccggaagttgtgggagtgataccagcttctgcgatccgtttagtacaagtcgacgtagacgagagaatcccttgatccatggaccgagctcttgtatttctgtatcggtcaagtgcaaatctgtgatactgtcaagagcatgtggcgagttcttgaggttttcgcaatatgacatatgcaattcttcaagacgagaccatgacctaatccccaaggggacttcttctactgcagtcctggtgaggtggagaagtttgatgtttgtggaaatctcaggaaaagttttcaagagcgagcaattttggagataaagttcctcaagagactccaggttgatgttggtcggcagaacctctagctttgagcaccctctcataatcaatctcaataacttatgaaggtttccgattgagaaaggaagctccaccagatttgagcagtcgtcgagaaccaattccttgatgttagtagcatttccgatggaggaggggagctccacaagacttgaacatcctcgaagagacaaatacgtgagattagtggcattcgcattcccgggtaaggaggggagctccattagacttgaacagctgtctagattcaaggttttgagactagtggcagttaaaagatcaggaagcttcgtcagacttgaacaaccttctagaatcaaagtttcgaggttagtggcagttgagagatccggaagctccttcaagtctatagaagattccaaatccatcatcttgagatttcttagtggctgtccaaaagcacaaataaagccaacatacaaaaacattattattgatacgattagtgaacggtgaagtaattaggattttttttctcacagctataacattgtatcagcaaacaatctagagattcgagagaaatctgaaaataataaatgttagataaactaaaatttttgcttactttatttccgtcccacaacttctcaagcttgcttctcctcatggttagattgaccagggactgtggattaaaattagaaggcaaaagtgtcatcggaaactgaccccaagatagtaatataagttttcgagatatggagttcagacgtggcggaaagtacaatctactgcaatcaccactaatttttaagaattggaggttagtcatattttcaaatgctctttcacttatataaaattcttcgtcctcgtcggccttctcaggtaatgtgagatctattcctataacagtgctgctaccctgaaaaggatacaatacaatatatcaaataaactgttagttatcaattaaactcagcttgtagggagcaatgcaacgaaatattagtagtaaaacttactgctgtatcatcactcagtacttgacaaatatctcctgcagcaaccaaaaactggcgtttcccaggctcacgaatggagacctcactaccataatttttttcgcacaatttctcttcccagtagggttagcaaatgatttatctctaaatatccagagactatggatatgagaaatctctcaactaagagatcaagccgttgcctgaagtccgagaacgtcttggcaagataaacttctatattctcaatacttccaaagttgaaaaagcaagttagatgaaggaataacgatttatctttctccgataaggcatcgtagttgaactttaaaacggtttcaatttctccgtcaaggtgactccttaactctggtagtgcctcttcccacatcttcttcgagtactttcctcgaaaataagagcctataacccttagtcccaaagggagttgacaagcaagaattgtagcttcccaggcaagcatctcgaaaccctctttaggggatttttgctcgaaagcatacatacaaaagatttcaagagcctcagcaggtggtggaaaatccaccttataaatgtgggtgatcccatgtgccttcaaaagttttagatctggtgttgtaatgataatacgacttccatgaccgaaccaccgagtttcttttgccatggcttccaattgaaataactgatcaacgccatcaagaacaacaagaactttctcgtccttgagcctttcttgtgcaacccctaaatgaggaatcttgatatccttttcgttgataatttgagacatgaacttctgctgcaaatccaactttgcactatagtcatctgagccaattggtattgtatacattgctttgatattatccataaagacaatcaaaccaaaattgccaaatagttggttgaaaagaaatctggcaatggtggtcttgccaattccaggaggaccccagatccctatcatcctcacttcctctgactctaggcatagcaacggtttcatcttctccatatgagatcccattccaattatgccgacgaaatcccttgattgcgttgacttagtcaacatattcgaaacatcagtggcaatttcttcgatcatttctgtttcagtatccctaacaaagacgaatacatctgattaaattgtcatccaaaaatcacaaactcaagttcttggctgcatatcgtttcaaagtttgatgtgttcagaaagttcaagagcaagttgaaattaaaagggacgaaccagctgcttgaaaggtaactagtgacagttgccacttttgcaagagcttgactccatttctcaatgtcctcagctgttttaccctcacaagtttctgtgaagacttccccaaaacctccggtctgcttctctacatcagttggatccacttcgtagaaaatggccatcactgtttgaccaaaagcttccttgcacttcataatctccgccaattcgtcaagacaccacgacgaagaagcgtatcttttcgagagcaagacaatcgcgagcctcgatccatggatcgcttttttgagctcagggccgataaattctcctctcaagatatcattatcaatgaataagtcgatacctttgcttctgagctccttcagagtgtgactcagaaacgatttgcggacatctgcaccgtggaagctcgggaagacatcgtgtatccaattacgacgcatggaagatgaagagattgaattcattttgttgctatttcggtgtagaaaagattgagaattgcttttagaaacaatctgaagtggagagggcttgtcttggtcaacagttggaaagacaagggtttttaattttttattatgaacagagaaaaagacgacttgttacaatttgaattttttttctaatatccttctacttttatttattacaaataattccccttactttttagtttatccaaactataccgaatccaaatcaaaagtcaaaagtgtattgaatccggattgtaaccgaaatttccaatttaataggaaacaatatcgtatatctattaaacggactaggttgataacaacgtaattatgtttcgatatcttgataattattttgttaaagctattctgataattattgctatatagtgtagggctctttctttatacttttatagtgtatggatcttccgccaatgatatagaattgttttgtttttctattaaaaaaaagcatatatgccaaactcggtcgtcgattcatttttgagcaaacttcgtcatttaagggaaatttgcaaatctaacacaaaaaaatactatatttaagaaaataacaccaacaaaaaagtgatgatatttttaatattttgtgtattaatcacaaattttattttgcccttccttccttctttcctctctctccctctcctatctctctccctctctctctcctctctctccctctctctctccctccctctctctccctctctctctccctctccctctccctctccctctccctctccctctccctctctttctatgtttctagcttctattctattctaacaaaaaaatattacatataagaaaatccataaaattcttcacgttatggtggtattggtgacagacatatacaattctattttttttggttaaagtatattattctttagattgaaattcttgggttccctatatattatctccttagggtttagtatccttccatcaaaaacatttaatgattataatgttatattaacgcaacctaaactattatcccatcaccactgctaacactattactttatattaaaaatatttcgctttatactaaaattaattgatttacgaataatttatgaaaatagtatagaacaacattttatttctatacatcctaaatagtacaacataatttttacttacaaacactattttctattttttaaattcaaatccgattttaaaaattcaaactattctgtatgtagaaaaaaacatatatttttctctaataaattttagaattgaaatctattttttagaaaatatatatagcaaacaaatataaatgggtgaaaactacactaaaggttagtaaatcatctcacctataactcaacactaaaattgtctttttcctatccttacatgttactttcttaatttatatatatacgatgctatattcttaattacattatcaaaaatggttagttttgcaattcaccgtcatttaactcgaagtcaaaaaaaaaaaaaaaagtcacttaaaaaaagacaacttgattttaagaaatcatatactcttctcaagttgctaacagaatttgccaataattatcaaaggcaaacaaaaagaggcgacttcaaaagataacttggtcaatacatatatagctctattcttctcaatagaattcaccaataatattcgcttaaagaagatgacttgatcaatagctctacaattatcaagatacatataatttaccatgaaatcttgaagtcaaacaaaaaaggtcacttgaaaattattaaaaaaataataatttaacttaaaaggacaacttggtttaaatcatataactcttcttaagttgctaatagaatttaccaataatttccgaagtcggacgaaaagatgcaacttgaaaaagataacgtggtcaatagctctattcttctcaatatgcttagattcgaagtcaaacaaaaaaaaggtcacttaaaagatgacttggtcaatagctctactttctttttttcgtttgtgaaagtcaatagctctactcttgtcacattaccaagttaccaacaaatctcaaagtaaaaaaaaaaaaaaaaaagtcacttgaaaaaatgacatggtcaataaatcaactcttcttaagatgctaccaaggaaaacactctctgaagacgctaattaatacaattaccatttaactatgatttttctgtaacttcctttcgttattttccattttaaattttcaaatacacactgaaatatatcatattcataagcacgcaaattactgttgaatattagtttcatttcactttcagttttttttttcttccttttttcgtttgatttgaaaaatggaaaagttcccgccaaaatgaaatctaatccaacatggatcaatttggtaagatttatctaaatgaaagtcttaaaaaggggataaatctcatcgtttattaaacttccattcgtttatggcccttcttaatttgtctctgcacattcatccccatttacctctgatgttctctccgtgtccatgaacgtgaatggacttagagacttagagtttacgttatccgcatccatagaaggatggttgcaaaaatacttgcatgattgttcgtcctctagaaataactgaatttggaattcaagcaaatcacaatttactgtttcagaactctttcaaggagagatcatcgacagtcgaaatcttatctctgccccttaagagattacaggttgaattgaaacgcaaagggcaaagctggaaatagcctaacggcgaacgctatgttgaatgtgccgaccgacactacgtaaaaaaatattccggaatttattgttcgggggatttgaacccgacgtgaatcgaacacgcaaccttctgatctggagtcagacgcgctaccattgcgccacggatccggataatactcttaaccttaaccctaatcataacgctaatcatagtcacataattatgtttctgtagtggtgaaattgcttaaacttgattctctttactcttgaactgtctctgtttactgatcgacgtcgaccaacaaacttgatgatatagagtctgacatgattgtgtaatctgatatttgtattgatttttacatttgagtttttcaatataaataaatatagagaagataaaagattctttgttccatcttcgttcctaatccaatctcagtttcaagatttgctgcaacgaagagatcttttatgacattttacatttttgcaataactgatatttagattgctaagtcgtcaagtgatatctttgattagtttgtttcatactcgttgaacaattggatcaagcaaaaagctaccgcaacttgtaaatgatttgatctttgttatacaaaaacggcaatcacattcgaaattttctaatcgtctagaacaaactctatcaaataggaaagaggagaaaaaaatgttatctattcacatggaatactcctccatctctagtttgagtaaaaaaaaaaaattgttaatgtatttttgttggatcatcatcatcttcatccttggagctgagatgttatactgataaaagtatctacaggacaagggattgtcaagccgcccatcggatgatcaaaaccaaactcttcttcacatttgcttagaagatcttgaaacaaaggctggttcaagtatgagactggtacaaaatgtctctgcttcttctggctctcgccgacgtacactgcaagaaacccttttggcggtgccttgcttgtttttactaaagaaccgccaagaatcttctttgcgctaaagagacttctcaccaaagccattttcttgtcttgaagtttgattcttgaagcttgtgaagatgtatggatacaaatgagagagattctagattgcttgtaagttgatgatgttaaaagacttcgtttcttctgtatatatagatctgtgagtgagttgaaacttcaaacttgacttatcaattgaaaacaatggtgtctaaaagtgtggggcatacatgaacaaaattttcctcacatggttatgttctcacattttaagcaaaaccattacaagttgtattcacataggaccaagagaacaagatcacatgtacaaggacatgcatatatagatgaagtttctctgtagtgactgaatccatcctaactaaccctgtcacagtctgtctgcagaactttgatcaatagatgggaccatgttagctaggccacttaattaatgtatatagcagcatttgtcatgtgatctgctcttgaataaattgtgatataaacttgttgtttaataacttgaaacctgaccccattctgaccattgtttgttcagaggaggatttttttggccacagagatccattccacatcttaaattcaagaaacaggacagaaattattacaaaacaatgaaacatgacagagcagaacgatacagctggacaaaaccatgtcaaactctctgcccctacgcttttagaccacaaaacaaaacaccattgtcatatcatcaataaccagcaatcaaataactcatatatgcttcaaaccaagactttcaagattcaaatggctttggttagaggtatttatgcttcaaagaagacacttgaccgctctatagcagctgcagcagcaacattgagcaaaagacatgtgggttctgcgctagcctttgtcctagcttcttacttgaaccagcctttgtttcaagctcttctcagtaaatccgaagaggagttagggtttgattatccgatggttggcctgacgattcgttgcccaggagataactttctcactatactgtaacttaataggattcaaggatgatctaaattagagttggactacacgtgcattttgctatcttccattgtagacattggacaaagaacgttgactccattgactaaaaacatgtcaaaaaaaagatattccggaatatatagttcgggggatttgaacccgacgtgaatcgaacacgcaaccttctgatctggagtcagacgcgctaccattgcgccacggatccggatatacaatgattactcaaccttacatatatttcaatgatgtctttgctaaagtagtttatctctcccattgatatgagtttagtatttgttgtgtaaattatagcatggttaaatctttattttgattatggttctctggttttagaaacatgacaaatcgttccgattttatactttatagtatataactgttgataaacacatcatataaacagaacttagaaatctgtctggatcttttgtttgattccataaataaaatgacaaatgacaaaactggcatttacattggaatttctatcttcttgatcaaataattcaagaaaaatgaaaaaaattctcatctatctacagtaattaaagtgttgctgtcaaaaaaagaaagaaagaaaagtgttaagtttttcttcagatgatgatcatccttggatccgagaagttacagtgaggaaggtatcttcaggacaagggatcgtcaagccccccatcggatgatcaaatccgaactcttcctcggatttactgagaagatcttgaaacaatggctggctcaagtatgagactagcactaagtatctctgcttcttctggctctcccctacgtacactgcaagaaacccttttggtgctgaagttgattttctcattcctgctaatgagcctccaagtatcttgtttgaaacaaagagacttctcaccaaagccatttttgtttataagtcttgatcttttgaagcttagagttcttagattgcttattgttaataggtatgaagatgttgttctgttttgggtcttttaaatagatcaataagagagttgaacattttaagggatatttgaaaactgtggggacgtatatgaattgagagtttcacatgcttctgtctgccttcaaatgctaatcaggaaaatattaatacaataaaagaaatattgggctggttctgttccatcatgtttcattggttggtaatgatttctgtcatgtttcttgagtttaagacgtagaatggatctctgtggtcaaaacgtcttcacaacaaactatggtcagatggggctggttctaagttgttaaacaacaagttaatatcacaatctaaccaagaacatatcacatgacaaatgctatatatagatattggaagtttctgtggtccagctaatttcgtcccatgtattgattaatttctcatctgtgtcaaaatctgataaagattctgccgacagactatgacagggttagtcagatggattttcttatatatcaatcaacgtagctagagaaacttcttctacggccttaacatgcgatcttgttctcttggtcctatgtgagtacagattgtaatagctctgctttaaatgtgataacaaaaccatgtgaaaaactttgtccttgtgtgtcccacattgttttcaatggattagtttgatctatatatatatacacatctccgcatcagagagaatatcatcaaccacaagcaatccagaactttagtccttcctttgatcccatacatattcagaagcttcgagaatcaaacttctagacaagaaaatggctttggtgagaagtatcttcagtgcaaagaagattcttggcggctccttagcaagaacgagcaaagcaccaaaaggttttcttgcggtgtacgtcggtgagaaccaagagaagaagcagagatactttgtaccagtctcatacttgaagcagccttcatttcaggcccttctcagtaaatgcgaagaagagtttggttttgatcatccaatgggcggcttgacaatttgttgtcctgaatacacatttatcagcataacttctaggatccaatgatgatcatcagtaggaaaaacaataattttcttgtaaatagattgacaaattttcatcttattaaccaaaagatttgttccaaacatatgaaagccagttttgtgtaagaaacaatgctattaacatataatcagtatatagttttcaaagttttgattgaaaatcaaaatattgttgaatgaacaaaagcccaataatcttccacgtagttcaaataattactgataatatgttatatgtttgaaggtttatgattagtactgataaaacaaaagcccaataattttttattactgataaaacgtacagtatcttatttgtattcgattaactgaaatttagcatagacaaacacaaaaagacccgatctcgcgaaaataacattgcacatgacacggtttcgggcattgttgaccttgtggtatgacaactgatggtgaagcttcatgatccaacacagataattgagaagtttcttcaggtaataaacgtttcccttcaacattttgaactgttacaatattcatcactacaaaaccaaactaattaatttattaatataaataaaattttgtatgtaagatttatttatttttaatatatatgaaatgtaatattacctgatgtaacagctaagaacagaacgaaaacaaacttcattgacatttttcacccttttttttaacttataaaaatggttattgcaaaatgatgttaattaaagataatggtacatatatgtgggttttcgtagaaccatatttatagaatggagaaatgctctcgttttagtcatagatcatttggtcaagataatcaaatcttgaccaaattataagtagaaaatcattaaattctattagtctgtgactaaaatcaaataattaactactttgattttcttaccaaattctgtagaatgataagaccaaatcatccggagattgaacgtaacaaaattaatacactttgactaaaatggtggggtcgacataataaggttaaaaacctaaatagacatttgcataacactcattgattttgctaacctcaactttaattgtgttagcaaaattaaaattaaaattaaaatttgtgttgatacgcatacatttagactggaaattagtcataattgcgttcatctatgattagaaagttgtatccgttatgatctgattagatccttaatttgaaattatttccaaaaaagattagatctctctacaaaagtgttctaaccatcgtttagctcatagctggcagtttctaatattatgactaatgaatacatgcaattagtacgttgtcaaagttttgagcgacactttttgaataaccaatacaccaatggcactttttgaataacaatacccgacggcgtaaaactatcgtatatgtataaggtatattgtatttaaatatttcagtgagtttttcccatacaattctcgaatgtaatgatcattactataggcaataaatgtcaaataattttattactttgtgaaaacaaaatttacctaaaaatcgagatgatatgaaaatttagcatacacaaaagcattcaacagcaaatggatttggaacacatttcacaccacaccttttttcgcagtgaaaactttgtggtctaataacttgcgttgaaacttcatgatgcaacataatttgcggagtttcttcacgtaataaacgttttgcctcaacattttgaattgttacgatactcatcactacaaaaccaaaacatacattgttagaaattaacacttgcatgtaaattttttttttttttttttaatgaaatttaccggatataacaactaaaatgataaggaaagcacacttcattgatattttctccattgcttcagaatttgagatgatggtgtttgctcgattgtgaaacaaaaagcttaggagagattaatatagtagaaaagtttcctaaactattatggatacgaatatatcaatatcgtctaaataataaatatgtatattctaattgatcttattatgatctcttccatagaaatggcatggtctttagtcaagtattcttataaattataatgaaacgaaactcactcatttttattttttaaaatacagaagacgaaatctcgaaattgacttgaattattatcaaattcagtaaaaaaactaaattacataagactaaactgagttttgaccaaattcactagatagacttgtatcaatagattctttagtagctagatttttctgtaaaattctatggaaatacataacttggtagattctttggaaacctcatgaaaaagattgtcaatcacgtattcacgttagtggaaagtaagctgagtttcagaagtgtttgtgctcagcttaaaatgactgtgttcaagtactgttcatcaccatatcaacatcaaaaagacaaaatcgtaaattttagccacttaaattaagccacttaaatttcctttatagcattgtcatgtgatcctatttctagctatgtttgagaacaaaataattagtgacagagactctttgttctgctggtgaacaacttcatgtccccacaaaagtttgtacttatagaaagatttggtaatgtgagaaatcaatttcaaccagagaagcttgaaagaagaggataaaaagtatcagagaatataaatttctatgggaacatgaagaaacaagagcacatgccaatatctaatacaatctgcgaaaacataaccatgtgatactctattcttgcatgtcccacgaaacacttgatagatttatctatatataccgacctctaacaacatcttcatatcatcaacaacaagaagcaatccaagaacttgaaactacaaaaatcaagagtttaagtttcaggaaacaaaaatggctttggtaagaggtttcatggctgcaaagaagattcttggtggctcagtagcaggaacgaggaaagaaacttcagcaccaaaagggtttcttgcagtgtacgtcggtgagagccagaggaagaagcagagacaccttgtgccggtctcatacttgaaccagcctttgtttcaagctctactcatcaaagctgaagaagagttcggattcaatcatccgatgggcggcttgacgatcccttgtcctgaagatactttcctcactgtaacgtctcagatccaaggatgatcatcatctgaagaaaaaacttttttaactgtagatagataacaattttttcatctttctcaatgaaagatttgatctagaagatatcatgtaaatgccaattttttgtgtttaatgaacgatgaaatcaaacaaaagatccagaaagatttctcagatttgtttagctgatgtatatattaacagtttctatactaaagattcttcatgttgctacagaatcagagaataaatgatcgaataatttacccaaaccgggtttatacgtagtgacgcagcggtaaatggtgtcaattgaaccgacgccataaataacctaccattgaaccggaaagtcaattgggtttccagttaaagaatgagtctaaaccgggtttacttttacatactagatacccggtttctttgtcggttactagaactaatcgtacagataaatgaaccggggaaaatactaatcaaatttcgataaattgatagggatttggtatttttgttttcaaccgagaattgtaaaccaaaatctgagccggttatcgctactgtagagtcaagtgaataaactggagttcataatattgtgcagagtttgtctgttaacaaagcaaccctcgtcgcaggaaaaatcataaataaatttgcgttcttcgatttctggaaaatctgtcagtgagtcttgtctcctataagtctccttctctcttcctcttgatctgactctgaattaaattcaactacttcctcctctgcctggcacgggttttttgtttgttttctcctggaaagttcgaagatgcgagaaatctccagttttttaatcagatcctaagcgtgcttcgtttcgaggctctttcagtgatcatttacctcgtttgaccctggatctcgccttgatttgggtaaagcagcttcttctccgagtttggaatttttgaaattctgtgaacgactggatttgaattttcgacggttaatttggattcttagggttctttagctggggaaagagctcgatttcgggctggtggaagatggtgtttaaatctagaataaaatggattgcgctatttgtgttgatcttatcaatgggatctctggttgttcatctttccatgacgaagtcttcaggtgtacagttggcgtattctgcaagagataacctttggcaggattttgattctttgttaggtgcacaggtatatatatctatcaattgaattggattccttggttttactctaaatgtgtgattgaagaatttgtgtttactgttgcaggattttagaaataagcacttatggcggcctgtcaaatcgttagagaccttgcagccttatgccaatccaagaaatagttatcctggtattattctatcttacttttgtttgcaatgcacaaaatgcatttaaacgacttcttagagacacaaattatatatctttagctgctatgatgggaaatgttttcttattttgcattgatcgttgctgcctaaatgctcattcatatcctagttggactgtttaatctgcagcagtgtttttttccattttctatcgaaacatagggatataaagggccattagggagggtgtatgttttgtttaatacctgtttgagcatgaaaatctgtttgggatcgtttgtgatgttttttttttcttggtactgtctatttgcagcgcccagttcgaaaaacaatggtttcatttatgcaaagatatttggtggatttgacaagattagatcttctgtaagtttcagttgacactattatttaagattcctcttcattttctctgttatgcatgttgataacgtctttgcaaattttctagatatgtgatcttgtcaccatatccaggcttctaaatgctactcttgtcattccagagcttcaagaaagtcttcgctcaaaaggcattaggtgcgcctagctctatccattttcttgttctttttatctttacttgttttattttctgttaaagcgtacttctttgccgtggtactagactcttctttactctagtttatttttcacatgctgtgcagcaacaagttcaagagtttctcctatctttatgatgaagagcagtttatagcctttcttaaaaatgatgttatagttatgaagaccctccctgagagcttgaaagccgcaagaaaaaggaatgagttccctctttttaagcccaaaaactctgcgtcaccaaaattttacctcgaggatgtgttgccaaagttaaagaaagctaatgttattggattgatcgtctctgatgggggatgcttgcaggtactgagtgtttttttctccttagagtcttatatcttgtatgcagtaatttttatatctatagagatatttgagtatatatccttctgcctgctaactaccatcactcgtcataacatgttctagtcatttaatgtttaaatgtaagtagaagtcgtgggactagttaaacaaggtgttttatcctgaacgaagttgtcttgttttcagtcagctttgcccgcttcaatgcctgaacttcaaagattaaggtgtagagttgccttccatgccctccagcttcgtccagaaattcaggtgctggccaaggagatggttgacaggtatttgtgatacttgcaattcaaaaattcattgaagaatgggacgaatacatgatataggattactaagggggagaagaacattagatgctaagcttttctttctttgataatgaagtatatctagctgagagctataataattaagtttaggggttaccattttcttaatttagattgggacttgatgtaaatgttaagattttatgtgtcatggttttgtctatctacccctaaaaaccgtgcattccttacataattgaggaagataatttcccttttctaggttacgtaaatcaggtcaacctttcctagcttatcatcctggcttagtaagggagaaattggcatatcatggttgtgctgagcttttccaggtaaaagttttcaaccttctcaatctgtatatttttgatagaacaaactgtttatatcagctacgtttttttcctgtgtatcctttgtgattgagatacatggggaagtagtttctgactctacgcattttttcaatcctcaaaggatattcacagtgaactcatccaatatcggcgtgctcagatgatcaagcagaggtttattttagaagaacttattgtagactcgcgcttgcgcagggataatggcttatgtcctctcatgccagaagaggtacggagcttctctcaaataatgctatatggatgtattattatatctcggtaccctttgcttgaattcttggagtttacgacgaagctaatttttttttatttatttttttgtcaagcaacgtagctaaatttaaattttctatgtttgtatgtaattcccatgtgatacactgttttcaagctccaattggattgcttacttacttctgttctgatggaactaaattggctttatgatgccaagagttaattggaattgaaattttgcaggttggaattcttttgaaagcattgggttattctcaaaaagcgatcatatacttggctggttctgaaatatttggcggccaacgggttttgatccctctacgtgccatgttccctaatttagtggatcggacttctttatgcagcacggaggaattatcagaattggttggtcctgagacacctcttccagagaatacatataaaatgcctcctcgaaaaagcgataagcagctcaaggaagagtggaacaaggcaggtcctcgacctcgacctctacctcctcctccagacagacctatctaccagcacgaaaaagaaggatggtatggttggcttacagagaatgacacagaaccaagcccttcgcctatggatcttaggaatcaagcacacaggttactgtgggatgcccttgattttgctgtttctgtagaagctgatgtgttcttccctgggttcaacaacgatggtagtggatggccagatttttcaagtttggtgatgggtcaaaggctctatgaaagaccctcttcacgaacatatagactggacaggtaagcagaattattgataaaaaattacttactgcatctaccgtccttcctcatagttaggttgattgcacaccttttatgccgataatcttcttattcttttgggttcattgatccgtaattttagctgatacatgcatcttatgagttactagcttttacaaaatttctcttttgcaaaattcattaactgttcactgatttgctcaaacaggaaagttattcaagaacttttcaacattactcgtgaggacatgtaccatcccaaccgtaactggacacttcgtgtgaggaaacatcttaactcaagtttgggtgaaagtgggcttatcaggcagtctatgttgtcgaaacctaggtcgttcctttcgcatccacttcctgaatgctcatgcagaacctcagcccttgaggattccaggcaaatacagagtgatgatggtagatttctctatggaggtgaggatgaatgccctaaatggataaaatcagcgggagtggaaaagagtaaaactgatgatggtgatcagcctgattatgaccatgaccttctcgctgaacagtcagaaactgaagaagaatttgcaaaaagtaaggtagcttcagcttttgaccaagatgaagagtgggatcctaatgactagcgtgactactatgcaaattctgctgtgaggtgttatttgattttacccagattctttcaggaaaggcgaagaagcaaacatacagaggttttttttattgttttttacagttcccggctttttttccctttctgagaataagcttttagtattattcttttgttagtagctccttgcaagttagttgcatactctttatacgtcagaccttctcaaagatatcggtattgcctccggacgcccttatgcatcgaaggacggacaactgatgcagcaaaggatgtccgttatgcttcatccttctctgagggcttcccttgaagcaaatttgaagctggaggtatcttttgctcttctttttctcatcattgtaaatctgattaaaggttcatattcagattctttatccctttttctccaatagtttttttctggatttgttttgacacactacagataaaagataaaggtatatttcaacagaattttaatataaacttgctgtgtcctgattcatattcatattcatattcatattcgttgggccgagattgttcactgaaatggtattcgactttggcctctgtaaaatagttgattcattgatccgatcaaaagaatacatcatttttatagtgatagtgtaaggtcaatagtacttgatgcgatgatacacgtatatactgttgtatacagaagcctcagaagcagggcagagagaatagaaccttaggcaccatttttctgtgtccatggtttgagaacagagatgacagtaatgataataatgataagaaggataaggatggcaatgcacatccatttccttgaacttttctggctttttactgcctttgttagttgattgtttccggattgaacatgatccacagcacttgagacctgttagaacagaaacagagtaagaaaggattttgaagagatctaagctcagggatttaaacaggtactgaagagattgttaccatattctctatgttgtctaacatctctccctgtgcatccaccagcacggccatatcgagaaacacctaaccggaaacataaaagagaagaatcaatgatgagaattcttgagagtttttggtgaatcggatcgaggtttacctgttgcaggtcaaggagtttcttctctaaatctctgacagcgtcatggcgttcctgaatctcagccagtgtgtccattatctgcacagaaccagtagaaaagcatgttatagttgtcgtgttgcacagatgagtgccggaacatagataccaacctgtcctcgtccttgctccctgattgctttctggaaaatttgctcactgtctccagtttcaatcaatctatcaactgtctacacacccgaaaattaacaatcatgaactaattcaatagggtattaatcaattaaatcggagttataagaacttgcctcttcatcagctcgttggccagtcactaaccattgtcaagaatcagaacaacaaaaatacaattagctcttaaacgatcattaatggaacaggtgaatcttcagacagattctcaattcaaacctgtaaacacacgcctctctacaacttctctgtattcttgttgaatgttttgtcttagagtctgcaggtgacaaagataagagcttaggacaactttcttagagaacattttcttttcagaatttgctaaacttacttggaattcagatatcttgtccttaaatttcttcttcaccgcactgccgaagaaaaaagcgtcaaggaagactgaaagatacttgtatatagacaatcttgagttttaataggctaaaactcacatagttgtggctgttcttgttctgtctacacctgttcctttcccacaacccggtttagtccggttctccagattctgaagatatcaatccaagtcttaaacaaaagatgaccagatcatagaaacagatgcaacaaacaatgtattcatctctaagcctaacctctcggtccagttcctcgatctttcctttgatgaaacgagaaattcttcccacttcatcaacatctctctccatcctttgcttgattgctgcggaacaaaaaacaaagagaaaccaaatttcagttcatctaaatcttccatcatgaacttgtttctgtggtctaaaatcgaactcgttttggattacatttcattgcaggagccttggtgacggctttagtctcctcatgtgccccctgaagcttgttgagatgcttgtcaagcttctcatattgcttttcgatttcctggacctaaacaattgatatgatgatctcaatagtcatacacatatgtagcactgattgagaagagttgcagagggatacaaaagctttacctttttgaagaaaccagagagcccgagatctccagagttaccagggccatgtcctgactcaatatcgcttctattagagcgatccctggagaactctaacgaaccctgtccaatcaaaacatctgtcacatcatcttagaaacttacaagcttcacaacgtttgatctttgatttatcccactaaatccaacataaacctccagatttatttgatcattttacttctataaacgattttttgaatctcacaggagcattcttcatcatggattttctcggaataaatgccgaactaaagaaacgtcaattctgagaaaccttgtataccaagcgaatttaaaccccaagattcggagtttctaatttcaaaatttagagagaaattaataaagatacacgaaaaggttgtttggattagagcagaaatctccttgatcacgtaatgtcaaagcgaaacagagaaaatgtgtgaagaaaaagataagacaaacctttaagaggtcgttcattgtcggagagaacgggaacagagcaaaagatctataaaagcatcaggaaacttgtcaaacaattaacaaaattttggcaaaatcaatgaaaaagaaaatggccacaattagaagataaacaaacctggttttgtaataaacccagatctcttttgttctcttccttctttttgtttttgtttttttggttatcctataaaaatcaatagaagagacaagggagcttcgtcaccgtataaagcagagcacaaatgtgagattgttaggcacgtaaggttcgagtcaacggttaagatttcatttgaaattctatgctctttataaaacaacaaaaaagagaggtaaatttcgttgttaacagattactaatcaaatctttagtcaaactcttattttgggacagtatctttacaatgagactcaaaccaaacaacagtcagtagctggtttcgacgctttcttgctacacaagaaaaaaactaatattacatatagggaccattaggtcaattacagtcatctacaaaaccaatgtgtaaaatagttaagtccgtctcagattctacttgttcaaaggtatctatctcctttagctctcaagaaaaccagaaaaaaagcactaatcagcgcctcattggcttcattcagtaaaaattcaagagattcagaaagatctatccgatcaatcaaagatttcaattaactgtagaaaaacaagacacgtggtaagggaaacttaagaaatttgataatattaatgttaatgttaatattacgggccgcaagctagtacttcaccagcttagcctttgggccggattcatataacccagaaaaggcccattcgtttggttttatattaagaaaatgcccaattttgggttgggttgtgttaacaaaaggccctattctcgtttgggttgtgtttgttttttgtctgttaattatatccaatctaaccgatccgatttaaccggacttaaatcaaaatccgaaattgccgttatccgttttgaaatctcaggaagattgatgattgatttgcacaagagagtactctgcttctgtgtctttatatcttcttaggaaacagttacactttacaccttctacatttctgactttgttaagtcaatgttttagattacacaagggaatattactgaaataaatcatataagctttttcttattattacgaaatatatacatctaaaatggtttgtgaagactactaaagagcttcatgtacaccagtgatgtacataagcatgagtattactttgacagctactaccaaagactaacacattgaaagaaagagaaaaaaaatggctgaccagttaagaggagacccaatgaacagtggagacatcatctgtacagttacaactacaacacttttgagttttgagaatgagagctcttgaaaagtaatgtctcattcactcacatcatcaaggctggtttctgactaccttcacgctactgtagaagcggcggagatccttcatggctttttcttctatctggattgatcggattgctgatggagcatctatctctggtttgaaccagcgattagttccaggcgaatctgatggagatccttgcccggttgcgactgtgaagcctgatgtttttgtctttggactgtgggacagagactgttgcttcttcacctgcattagacaagacaaagacaccgaaagaaaaatgagctttaaaacataaactatgatgcaacaagataatcttgtctacggtatcagtattcttcaaacagaggacaacgtacctcctgcatctggatatctctgagagaaggtcgagacagtttacgcggagtttcagaggaagcccaaggaggagttcctttttccacatcagattgctgcaaacttttggctggttccatcggaatcggcttcgaagtcaagaaggaactcagtaatatctttccttcacttttaccaggagaatcatcccctgactgatttttagtagtcctaacaggttcatgagagcgggtcttgctttgttcatcttgaatatcccgcagggaagataatcctttagaaatcttagccccaccccacacaggaccttcaatcttaggccttggtggaggagcaacaacaggtttagggacatcatcaagagcaccagtcaagaacatggaaagcccaccctttctgttcttcttcttgtttgctgccgttgcaagtttcttgcttctcggcgaatcgggtggattatctttcttttgcgagagtgagacaaagtctgattctttggggaacccactaatcatcgtcgtatccaacatggttttgccaccctagtagaataaatacaaagcaaaaataattcaactgacgcagatggataatatgatcaagtgttaacaaaggacatttcatcatgaaaaaccagtacccaaactaacctttggcttgatagcttcacagatttcttcaatttctttgtcttgcatcgtatctatttccactttaacttcaccaaattcagggaatgtctcaacttgtacaaatctctgattaccctttttcttcttttttcccttcttgttggcctttccttctagcggtaaagctgttgttgcttttgcctctggaaactcttccacaggaataccaagttctaccagtgaactttcgatatctagtttcttttgaagttttgctatttgctgaccatcaagaagttgtcctctcgattgttttgcttcaagtatctcaatttgttgcaactttttcctcaaagctcggacttctttggaattgtgttgagtcagctcatcttctggttgcaagaatgaatccattcgagtaccaccaatactggaaaagtgtttcacatggctgtcacgagttcttagaatgtcgctctcactttcctcctcttcactgtcaataacaacaggaaatgtggctgttggggttggaagtggtcgggagctccatgtttcagatgatctgtcatccagtaatttctcaagattggcaagaacatcaggtgatgtatttgcaatagattggggagaaaatgtcaaaataaagtcaaggtttcgaatcacaatgtcctgcagggagaacacacgtgtaaggtaatcatcagccacaacatagaaagagaacactgaacataaacttctctaagttttgtatctctacggtttagtgtgcaatcatcacatagggaaggtttgcattacctcacagtacttcttaagatcctctgctccaagcgaatccgcaatttcaagcaattgaatagcatttcgtggctctacaatacactccgcggccaccttctcgcataaacttttcaagctaggcactatcctctccttaggattatcgtattgcacggattgcaacacgttcacggattccacatcgtcaaacataaaaccctcatccagttcttcattttcttcttccctacatttatcagcttgcagtgtctgagacttcttaagcacaataggagcatatgcaggatgatacagagaaccaacaaccagaagatgagtttcgccaacagcaactgtggttgcccttttcaagttgtggaggcgagaaagagatggtgcaatatctttaccattcttcccatcccacatgtaaacttcacctgtactagtaacagcagatgcccagtatttacccgctgaaatgctcacaactgttttaccgtgcagcgaatgcaactgcaggaatcaggattaaccaaattttggttattactatgcgagacatattgagttatatgtttttttaagataaaaaaagaaggttgaatccaacctgttggcatctaagattggagtcagaggaaacccaataaaagaatgcaccatcttctgctagagccaagctgtgtaccattcccgcagctattgcagtcaatcgaagaggtctccttcgatgaaaattcaatagtgtgttcccagctttctttaaattccgggaaatgataacacgtcttggagtcaccagccgatgaccccaggtgtacacctggtcacagaagaaagaaagaaatactgaagaaaaataaatttttatccaaattgagttctcatactctagttcatacattctataaactttacacactgaaataatagtattaaaacgtttaacttaacatgtagtaagaaattttacctctccatcatttcgcagcactagagtgtgatattttgaagatgcaatagccgtgaacacttttcctttcaagtaatcaaccaatctgggagagtagtttgatgctgagttggaggttccataaccaagctgaccttccttgttgcatccccaagtgaaaacttcaccgcagtcagaaactacggcggtgtgtttgtttgctgcagaaacagctacaatcttcgccttcaatgaagtcactttgcggggtgttgcctgagtatccacagaggtataaccaagctgaccctctacaagagcatcacaaacaacatcagactctaagataaaagaccacgaggtgacccaaatagattgaatatatttccatctaattcagattaactaagaaactgggcttagaggtcgaaactaaaacttgagtatactatagcactaaagatccattcctgaaatataggaagccgtttaagtgttttacctctattggaaccccatgtgtacacatccccgccttctgtagcaataacagtgtggtgcttagctgccgcaactgcttttacacggcgagatcctaaaccagatatcacctggcggggagtaatcactgcagcttgaccactgagatagcaaaccagaaaaataaactcaattgtggtttatataaacttacgaaaagcctatggtaagctacaaaaaaaactaccaacctatgattctatgtacgcttagaatagaagactgtttttatctttcaatgttccatcagaaatcaagcaaggtaaattttgaaaccacagtaacgccataggcaagtagaaatcttcatatagacgcaacaaactagaccatgaaaactttgtcggaataaaagcaattaagctcctcctccagtcaccatatcagtgaatttacaacaatgcatacctatgaatgtcaaattcaggatgtccaaggcggccaccccttccaaatccccacgtgtagacttctccatgagtactaatggcaacactatgaaactttgcagcggagaccaacttaataaaacaaccatgcagtgaatcaactctccctggtaccttctgaacatgttgattgccagttccaagttggtagtttgcaccatttccccagctgaaaacctctgtagccactgaaaagaaaaatgaagccaacatttcagcttctcaaaagttgcgtaagaaaaagtgtcaagactgattaaggttctccttaaagatcaaagagaaaatattagttacccgaactttgttgctcgccaataacctgagccactggacctgagaccaaatcaaccggtgttcgcagttttatgtcttctagagtaaaagaagcacctgagtcaatcaatacgctagctaccgcgagatggccaaaatgcaaagctcggtgaagactactccaaccagattctccatcctgaaatggacattgtacaatatagagcaagctcaattttccaagcattatgaacacaatatatgcaacaaacatagagacagatactgaaaagagacataaataggtagaattaattacaaacatggaacttgtagattaaagattataaactgaagaaacagatatttaaatatatgatgacacaaaaagaggaaaagtcacaaaccctagcatctggatcagcgccagcagcaagcagtctcctaacaataggaatgtgatttctccatacagcaatatgcagaggagtgagaccataggcattccttaaatttatattgccaccagtcttcttgagtatgctaagtgctgaatccacatcaaccaacgaaccttcccgtatagcaaaccacaaatctttcctagatcctgaaagtgagcttttacgaggagtttgcaggttcatcttttgggtttgaggagagactgacaattccatatttctagacggtaagaattcccactaaaaccttgttcgccacaaatgttgtgtctagaccaaatgtctccaaagaaaaagactcggataactctcactaaacggacaactaaaaggatttctatagccctcaacggagtttacgccatccatctttgctagagctcatttttcatcttgaaagtgagtcaaacaaatcactcaactttctgaagcaaaggcttagtgtacgcaaatcttcacaatcacttcataagagcgccgagagtcctgatgataaaagataaggatatagattatattggattaataatattcatgtagcttctttgagaaatctagagaagaaagaataaacaagtaaacccgagtagtggaaagcatcgctccttttctaaaaacaaaacacaaaaagatgcatctagagactaatacttccaccaaccacaaagcaaagaatctcatttagtgtcactcaaacagaactaaagagatgttctaccaacaagtacattgttttgaaccaaaacaaggaaggatctccagtaaggacatttgttaagcaacaacatacaattagtaaaaattagtccacgaatgtgacacgctacaaaagatcacgcctttaacattaaacttagatctcttgtgaagtgtgaaacagagacaaagtgaagccaaaacaaaaaaaaaaatctccacaaagcacacaaatcgagaatggcaaacagataaaactcgatctccaagacacaatgagtagcacaattcgatagaaaatgttcaaaattcatcgagaaaatacataaatcacggaaatttacaactttcggaagctccaattcgagacttcaatagaaccaaagaaaaaaaaaactgttttttttgggtaaaaatcaaaaactggaattgagtttaaaataatcagacaagagagaaaccaataaaataaataaaaactaattttccgttacctgaaattgaactccgatgagatttaacaagagagagagatagagagaagcgattaaagacaggtatttaaaacagagagaaagagaagaggattaaaagagcacaatggaatcttctatggaaaatttcaatgtgttaagacagaagcgaatcaaaacagagaatataccctcttccccataagaaacagaggcgtataaaaaagtttctgaatgagccagacagagagagagaaacggggagaagagagatctccgagcctaagggtaatacagtaattaagatagaaattacggcgaatgacgatagagtcctttgaagttgtgacgtgctaaagactcggagaagagatgaagtccatatctctctctccagacacctaactggtttgctttacatcgttatgacacgtggtgacatgtgcgacacgtcagacgttgacaaggtcatacacagtcatcatatgtctgaaacttctctgttttttttttgtagcctttcaataattttgtgaatttctgtggcatcatcagtttttcaagaatttattgtggattaattctattttttttaattagagggaatgaaaatttgagggacaaaatggtaaaagaagttaaacagatgcttaatcaaatgcataatgtgtaaaaaaaaaaaaaaaatgcataatgtgacgcgtcagctctcgtgacataaatcggactacgtggatatctttgattggatgttatgccttttctttgccagccaaatgtccacgtcacggagcggtgaaagaatgttaagtttaagcaaatttttacttttacagggtttttttttttgggttcacttttgcagtgttattgtgtaacttgcgttcggtgataaagtttataaatttctggaaaagaaattccacataaaatgaaataccgcacttttggtactttgaaaagaaatgcttacaccatgcaaaagaaatggttaacaagacatgaaaatatagtactacttttggttctctggtataccacgtcaagtgatctttacatgcacgaatcgagcattccaaaggttcgaaactgtgtcctttttcatggtatcaaatcaaatctttttgtagtatggtggatgatcttataacaataatggattattttcagcaaattctttagttctacaacactagtagtgattttaagatttcacattttgggggcttgtataacaaattaattcgtatccacactttcaagagatcaaagaagcatatatttcattagagaaaacaaagatacatataacattgcaacaagagaaacatatagtataaagccgtaaactctcttcaacgaaagcgagagagtgtgactccattccctcaaaacctaactttggctaaaatatttttcttggaagaaaagttattgaaactgaacaaacacaaaccacgtagaaaaatcccggaatatagaaataatatcttcaagctcttcacttggcactaccgagctgggagcggataagcttagccgcgtcaaccatggctttaagtgctggtttaacctcagtgtacttccttgtcttcagaccacagtcagggttaacccacaagatgttctgctcaagaaccgcaagcatcttgttgatcctgtctgcaatttcatctgtggatggtattctcggagagtgaatgtcgtaaacaccaggaccgattcctgcaccgtacttcactccttcacggaacactgagagaagcttctcgtctgaacgagagttctcaatggtgatgacatcagcgtccatgtcaatgattgagtggatgatgtcgttgaagtttgagtaacacatgtgagtgtgaatctagaagataaaataaagaagttagttgcagaaacattcatcactatttgagattttaagtgtacagtgttgttacctgagtgctgtcttggacgccacagttggtgattctgaaagagtgaacagcccagtccaagtagaaagagtgttcggctttcctaagaggcaatccttctctaagtgcggcttcatcgatctgaatgactccaataccgcctttctcgaggtcttccacttcatctttgatggccaaagcgatctggtaacaggtttcgtgcctgggctggtcgtttctgacaaaagaccagttgagaattgtgactggacctgtaagcatacccttcattggacgtttggtcatgctctgagctgttgaggaccagaagactgtcattggcttggggcggctcacgtcaccatagataactggtggcttcacacagcgagatccataggattgcacccatccgtttgctgtgaatgcgaaacctgacaattgctctccaaagtactcaaccatgtcgtttctctataatattgtcaaagcatggctgagtcagaaacaggacgttgtaattagttttagggtctagtaagagacaaagactgacctcaggctctccgtgaacaagaacatcaatgtcaaggtcctcttggatgtcaacaactttcttgatctcttccttgatggccttgacgtaatcctcttcagagattctagtagaagaaagagttccagttagcatcacaatcaacttactaaacatgcttaaatgatcaatgcaaaaaaattatgattaagagactaacttcttggccttgtattcacggcgaactctcctgagttccacggtctgtgggaaggatccaatggttgtggttgggaggattggaaggttaagcttcttctgctgagcatctagccttgcgctaacttcagttgtacggcggtggtcagatcccttcaaagcagcagcctgagattgcaggaattacaaatcattaggatcaatagaaacatatatcatacagagaaaaccatcataatagtaaagaaagcttgagtatgaaagcaagaacttacagccttctggacagactcattggtgactcttggggaagacctcctcgaagacaatgcgtcagcgttggcagtgaagaaactctgaaagagagaaatattagagacttgaagtctttttcaaacaaagggttcacttgggaaacatgtttgtaggatttttacaatacctcatttgtctgaccggccaaagccttggccaatgcgtcaacttcaacaaccttctgggcagcaaaagctagccacgacttgatttcagcatcaagcttagtctcgttaataaggtcaacggcagtgtggagaagagagcaagaggttgagaccacaagcttgtctgcaccaattcacaaataacaaaaccaacgagttagagaaagataacaaattaaacacttctaattgagtaatccacataagagattctggaagaatataatacctttaccaacaacaccctcaagtgactgcaaggtgatgagagaggcagcgaggtcattggcccagatgttccttccgtcaacaacaccagcaaagaggtacttgccctgtgggaaacctgacttgatcaagtcaatggtcttggtgccacgaaccaaatcaaatccgaaggcagtcacacccttcaaggaagtaagggtcttgtatgcttcagcagggatatcagcgaagtaggtctccacaagaacattcagaccagagagagttgattcaagctcagcataggcaccgctaaaagcctggagtttgtgaccctcgagatccatgacaaagagaggctcatcaagctgaatccaggaggcaccagctgccttaagctctgcaatgacttccctgagaaaagattcaccattccaatagtatgtcagaaacaaatttcctagcgtcaaagagaataattgagtactagagcaaaagtaatctcttacttgtaaactgggaggattttggggagaagggagagaagatcaaatgacttgtcaacacccttagcaagcttggaaagaagcaagtaagagacagggccaacaagtacagggacggtctcaacaccaagctgcattaacaacaccacattactatattagaacattcaataccagaccaaaagaagcctatatatgttcaaataggaaaattagttgagtacgtacagccttggcctccttgtactcattgacagccttgtgagatgcgtaagaaaatttcacttcagggcccaactctgggacgatgtaatggctgcatcaaacagaaacattaaaaaaatacgttaataacacaactcacaaatccaataacaatgtcaacacacaagttaaagagtagagaagaaactcactagttggtgtcaaaccacttggtcatctccatagctggaacagaggcatttcctctagccatggagaagtaaacatcgagaccgatctcaccactggtaaatccatatctagatggaacagcaccaagcatggcggtggtgtcaagcacctggtcataatgagaaaaggtgttgcttgggatatacttaatcccagcagcagacatctgtttccagatatcagacctgagatcagcagacaccttctgcaaatcatcggcactgctcttgccatcccagaaagactccaatgcaaacttgagctctctcttaggtcccatacgtggatatccaacaatgtgggaagccatttttgtttgttttttgtttttttactacatttgaaccacaaacaaaaccaaaatcagtcagtaaaccaaacacaatcctaaaatgtacttcttgtcatatggtaaaagccaccaatcgttaaaaaagtaaaaaacttttgcagttttttttgtcgtatttattgaaaacagagtatgagagagtttaaagatcaaaacgaatcacaactagggaaaacagagatctaacgcagagaaagatcgcaaaacagagattttacgaatctgatcgtataaaaaatccagatctgtgtttcatagaatttcactcaccggattaagatctaagtattaacgaacgaagaagaaacggaatcaaacgaaaattgaattgagaagaaaacgaagagacggaaggtaaataagagagtgggaagggagagagcaagaatagtcatgcggaagccatggaaactcggaagcgtaccttacggaatgagaagagtggagatgagagatgggcaaagagagcgacgatggagagtgttctgtgttaagcttatttatagcaaatcaattacacatcgttccttggtttctctcactcactcgtggtggctgattatttttctatttaaattaataatacgtacatgtacatcaaaatacgtatatttaggtttttaccctctctacaacattatactatatgataaataaaaatacgtgtaatccatgtatccagaatgatactaatttttatctttcaaatttaagggcacggtcaattatatacaactttcgagaattatacgtataacgacggtttacataataaaaaaatgtatttgatcatggcatgacattacaattatataagctggtagaacttaattccgttgaattagtactagtttactggtaattttagttgacttttgtcaagtcctcactggctagttaaagcttaaaacaattgtttaagggttaattaaggggttagtgtatgttgtattgtaaagcgtagtattaattaagatataagagcttaagaggggattaattatggaattgaaaatgtgaaggtggggaggagagttggtgtgtgttgtttgtgaagagtatacatgaggagaaggaggtagcgggattggtgggtggagcccattagggagttggtgagatattcacttttaatttcatttttgggagtcagtaccaacaattcttgccacacaaatttggagatttgtttggtaaacaaagttggtgaatgattatgagatcctccacgtccctcttatggtttgatcttcacataattttttttattcaacaatgacgtttgaaacctattaaccataagttgtcataatattcaccttaatgaggaatatacgtctataatgtatgtaaagaagtctagtatgaaatggtaaactagttcagtaaagaatattcaatgctctgtttggacgactaatacgaaaattctatgtttcgaataaagaagtgtatttctaccatctcttgtaacttgttttgtagcaagaactcttttttttaatgctttcacatgagaaagtccgttcttttgtttttcgactcaaaaaactttaatccatcaagacgcttaacaagtaacttcaaatttcaaaacaaaacacagaaatatttgtatccggtaaattttatatttcctcacaatatccaacatcggtctattccgaagcattagtagatcagtagatgccttgctatggttttgtcggctgtcggtgggatatagatataaaaacgcacgaccatttaatgagacattttttttttcttatttctcgctaatgcctaatgtatcatgcgtattcggtattcccaaagtaaaagaatttgacaaaatgttccgactaatatatacttgtgcgtcttgaaatatcgcattacacattacatacctaatttactttcaattttttttgtaagaaagttaaatgaataaacacgtttacatatcatcaatcctacagaatatactataagttttaacggcgagatcacatgcaagagacgataaagtttccatactttgaaaagagaatatgatattcaatatataaggaaactaaaagaattcatatatccatagattgatatctcttatcataaggaaaataaaaaattcatagacgatatactgatatccatagatcgaaattttttactaattaaggaaaataaaaaattcatagattgatatctcttatcatcatatatccatatttccaaaatataataaaagaagaaacttttcttcaccacccaaaacctcccaaattttttgttttcctaaggtttctcaagagcaggaacaaataacaaaacatatctaatctagatcgatggaatcatcttccaatcacatggtatgcgtaaacgcataatagattgtaagatttgtgtatatattttatgtttatttgaaagtgtgtataaatcttatgtttttaagcgcagatatgtcttttgaagatagaatctcctacgccgggatggaagaaatccttggaaaaattactcaagacaattaatggtttcttaatctatcacttttctcgtttaattatcttaattttatcatttcatttcttactttgtcttcacttctttttctgaatgcataatgtttttcttttgtatttatacatacataattttcaagatttaacttatgtgtatcgtttgcacttacaaaacccaattatttaaaacaattgttgtgtatcatctccggaatataaccatgaccatcgaattaatctttcggatagttttgtgtagtctagagatgatagtactataaacatgtttccgtttcaatctcttcgctttatcgaacaaatcgttattgtagccagtttgttaatattggactctttttaatatgaaatgcaagaatatattttcataattcttcccttctcttttgtttgtttacagatgtgagtttcatgatcgacaagcaaagcaaaacagtatatctatcgggaaaagtcgacccacaaataatacttgaaaagattacaaaagcaggcaaaaaagcggttatattatggagcaataacggacagagtaagcagccggaaaatcggaaagaccatttgatggaacaacgttatgcgtcgggacacataaatgttcctgatggtttctcaaactatcatccgccatacatgaatggtcctaatggtttctcaaactatcatctgccggattattggatgaatcaacctcaactatacaatcccactatatgtcccccaccaccaccaccgtatccacgtcaggtccatccgcagccaccagcaccaccaccgtacaaattccatcagaaagaaccggtggctaagagtttcccgcctacaccagctccgcctaaaaactttacgatgggagatttgcaactatgccggataatgtgaaaacttttagtgttgcacgatgttgtccttttttcattcgttgatgtctgtttgtggatcatgagaaagatttatgtttattaaggatcttattatgatttcaaacaaaatattccaaactggatatttgagattctcctaaagtaacacacgcagacttctcagaaaaagttttgttttgttatacagtctaggattcttgttgtatcagaagcttttaagtttggtctgaaataatccctgcatcttcttcttcgtcggatgatcaattcacggcgacatcacatgctaaagacgataaagtatccgaaccattgaaaaagacatagtcattcaacggtattagtctattagagttcaacccttacattactttataagttcctactctcggtagaattcacataccgaaccctaacttgtgaaccaaccataacagaaaaaaaagccaaactacatcagagacaactaatgctgattaccctacgaaacctaaatcagaggtaaacctgagtaaaccggaagagataggtggtcggtttagtcaggtacagaacaaaccggatcatcctaaagcactatgtttcagctcgtagtcttttactttttcttcatcttccagagttggttggttggttgttgttgcggttaagctacttgtttcttgccttttccagatcaggaagatctgaccaaatataatgttattagtaagatcagtacagacaagttcagatttatatttggcactaaccagaactgaatcacagaatagtttgctactaatactttggcctttaacacaataatccatcaatcttcacttaatctctacttgcaggtatacatagatataatatgtgaaatgtacgtaatcattgctataagaagataaagattcttgaaacttacagagcaatccatcgtcatcgctgctttcactatcttgattaacaaactatgaaaataaagagggaaaataatcaaacagggtggctttactaaacaacaatagaaagatatacattaggcgattatgagaaaacacttactgcactctcatcatcagaggctgtttcagctgaaacagaaacgaaaaagagtctaacgttagaaacaaattatcatatagagatcagaatacttgtgattttcctatgtcttttcaaacaaggtttacttaatcaagcatgtaatatgagaagattttcgattatcatctagagattgaactgaaaagagaactttggcttgtaacatatatttttacgacttacagttgacctcctcatcctcatcacaccatttattccagtcgactttgatgtaaggtgcaggtttctcttccgatttcagcagtcgtgtccaccagcttctctcttctttctgaattgaaaatatgatgttccttagtcctacattcttccgatattcctgcatcatacatattacatagatttgttataagaagtatatgtggatacttatcgatttagagatgcaatggttactttccacttgatactttacagttgctgctagttcttatcatttaaaggaagaaatggtacttactgtcataatcttcccatataactccaagctgaattcaaagcgctcgccttgggcaccaagagcagagaaactgaatagaccctgaggctcacacttcaccgaaatgtccttcgcatcaggtaaggcgacagttaggtaaactttatcagaacgctgagcccaaagaacctccggattacgactgcacacaaggtgaaacaacaatataatacgatgttactctactcagcggactttgtgcaacatactacctcaatcacacaaccgtaacagaagattacgactaacttgttacatcatacgaatatcaatcacaaagattctcaattttgaacttcacaagtaaaacaaaagccaatgcttatatagattgtaaacatgaatgctgctgaagccaatcatcatcacaagtaaagaaaagttgtaagatctgtgcaaacaagtctctcatcatcacaaagaacactactctctataaggctatataactaatgaaaacccctttagtaaaagaacttaaaggtaagggctttatatagtctggttagagaaaatgtgacgaggaagtcaaactcagctcacaaatcacgcaaaacctttttgtgagttaagcaaacatacacacaaatcgaattcgagattatactttttcaaaaaaacctagaaatcgaacagctacctcatgttttcagccaagtgtagattttggataaacggtgccggaattatgaacggaggatggagaaaaacggcgatcgatttcaagagacaaatgttgaaacctttgaaacgatctgtcttaggtaaaaacgattcttagagtgaagaaggtgaatagaaaatatttacacattgggccccaatagttttagaatattccacaaagacccataacttcacgagtttattaaaaaaccataaaacttacacctatcacacattcggccacaattagagattttatttcacaatttggcattttgcaataataataatttaagctagttactataaagtaaaaacaagagcaaaatggaaaaatagggataaatgaaatgaaaagacaacatgtgtcatagtttgttacaaatcatagatcaatgatgacacatcacacatgctacttgcataacacttacaactacacagataagtaaaagaaaaattggtcacgagatgtgtataaataaaattcctttacgttgattgcattatataacactaaatttattcaaacttgtctatatggcatcgtcaaattttgacatattaagatattactattcttaatgaattctaaagtcgaataaaattaaaggattagtttgaggatgcggttgataaattagcaaatgatcacttcacaattacgacatacctaacaaaaaccacaataaatcttaatgttgaacaaaccatctaacctaatttattacaccgcaagacgaaaatgacacacacacacacactcctctaggctctaacgtacgtcttaattaagtatttgctttcgctttctacaaatcactttaatgtagtgtatatatatttatgtgataaaaacagaataatgtaacatatgaatgcatgatagtaatcaagaaaaaaacataaaatagtcgtataaatgtatttctatgaaataatctcaaattacttcacttagccaataaattttcataatatattaattttatagttgccagtcgatcaattttcactaccagttaaaatagtcgtataaatgtatttctagccgttattaattttcttttcgtctaccaaattaaagatcaatctttttttgttaaggaaaaagaaatcgaaattggaaattaccacgttctatttcgtattgtttaaagttggctagtcgattataagctgcaccaacaatttttagttttatttaaactatgattgtatacgacgacattgactattgagacatgcaaccaacagatacaaaacaaaactaaccaaaaaatgaaacacgcaaaatgaaggaaaaaaataagataaattaaaattaaatatttattcctaaacgatgcacagaaaaatctaacagaagaagatgcttatataaaaccaggtggactaaaatttcacagaattttgttttcttatgtttgtaagcatttactttacttgttttcttatacctgcaactatgaatcatattaaaaaaaactacaagattaataaaaagatgaatcactcatggcacgtgagagtagtcaagagattaagacatcatgccttagtttcaatttaatatgattaaatacacgagtttagtttaaattgtttgttaatttgatttccaattccttgcatgttattctttattgatcatattatatgtgagctaatttgttgtattaagattgttttcttgaactttgaaaaggtcggagaagattgggacctacatgtgtcactttaaaagtctggtgtgacctttctgatggagatgccttcgtgcgaaagcttacattacagtatgtgtcacaacttcgctttctttttattttcaccttaaatatatatattacctctttcagatttaagtttttggatggatcttttttttttctttcagtttggttttaagcctagtttttgataaaattccggtgtagttgttgtggtttttatgtttagtttgttttcagctttcttacatgatcaaaattcaaaacaaaattagagttacactaatttacttggttttgtttactcattcttgattaatcttgtttaacttagcatacccaattaattgatagacagacttttctcaatcaaattaatattcatataagaaactttaaaaaaatatcaaaattaaatctatactatataaagacttgtttgcctcagactcgtatttgtagatcatccccctaaaggcctaaaccctaaaagaatatttctcttatcattacctttttatctttctttttttttttgtctttttactttttcttggccacagctttggctggagtggatttctctttggtccctatttttttgaaagtgataatataatatgaacatatttaatgctgataaaataatttactttgtgtactgtataaatagtgagacaaccaaaaataaaaagatcagaaaaaaacgtcggccagaccctgttggattcgcttttttttttttcttttttaatttgttaaaaatgcatgtgaacacttacaagattattttttggacaaaaaaattctatttctattttgtttgtttgttttaaaattatttttgtaaaaagaatttatcgttgtcttcatctcgtgatggagacttagagaggaggaccaaactctctgtcgttagccactgacaatttactaaatcgtatggttgctaaaatgtttttgcattgattttacagaatttgtttttgtttattgtctatttaaaaaataaaaaaagtttgttgggttaatattgttcccagagtatcctctgttttattcttataagatataataatcactcgtgaaggaatcttgaatgtttttaaagctccttgaggaactttcatctcttacagaggattttcttgggaacttttctcactttcttctttaaatcaagttgctactttttttgtttctttagataaaatcgatattccattcacagttacttcataagtttgcagaggtatttcttcatctcaaaggaaacgatttgtcttttcattttctcattcttcttactctgatgaaaccaaattttgtttccaggaaaaataaaatttaatctcttgtgctcaaaagtttcctgcatcttttcttcttgcaaggtgtcttaaagaggagattctgtaacacatgtggtgagttcttcctgtttttctggaattcacatgcaaaaatcatatttttttagtttgaagattgatttctaagattctcttctgtttaatgcattaacgagaaagtggttaaaatatcaagatcttgagagtggaccctgttttgtaagtacattatatataaatgtgattcttgaatgaaatgtgtctctctctttgcaggttttgatgatgatgcttatatgattttatttagtagttgtgtgtgttttatggtcttgtgtggctatggagaaactctattgtggcatgccgttactgcttctggttctgcttttagcttccattgatggctctacacagctacaatcatctcaatctcaaaccctcttgaggctgcaacagcttctctactatcccaaagtgttaaacagctggaacaactatacagatttctgcaattctgagccaagcccttcgctaaccgttgtgtgttatgaagatagtgtaacgcagcttcacattataggagacaatggaactcatatgttaccaaagagtttctcaataaactcgtttgttactactcttgttaagctccctgatgttaaagttctcacgtttgtgtcccttgggttatggggttggttacctcagaaaatcaaccgtttatcctctttggagattctcaatgtgagttccaatttcctctttggaccaatccctcatgaactctcgtcgcttgctactcttcagacgcttatactcgacgagaatatgttttctggtgagttaccggattggattgattctttgccgagtttagctgtgttgagcttgagaaagaacgtgcttaatgggtcattgccttcttctttgagtagcttgtcaggtcttagagttcttgctttagctaataaccggtttaatggagctttgcctgatttaagccatttgacaaaccttcaagtgcttgatcttgaaggaaactcttttggaccgttgtttcctcggttaagtaacaagctggttactcttatactcagcaagaacaagtttagatctgcagtttcagctgaagaagtaagttctctgtatcagcttcaacatttggatctttcctacaatacattcgttggtccatttcctacttccttgatgtctcttcccgcgataacttacttgaacatttcacacaacaaactcaccgggcggctttcagcaaatctttcttgcaactcacagctgatgtttgtagatatgtcatcaaatcttcttaccggaagtttgcctacttgccttaaaccgagttccggcactagcagagatgttgtctatgcaagcaactgtttggctactacgaatgaagatcaacgtccagtttctttttgtagtaatgaagctcttgctgttggaatcctaccacagaggaggaacaaagtttccaaagtgggtattgctttaggtgtaaccgcaagcattctcggggtacttctcctcgccggtgccttatttgtggttcttaggagattaaatgctaagaaaacagtgacgaaatcttccccaagattgattagagagaatgcttcaatggggtacacatcgaaactactatcagatgcaagtaagaggataaaatatctctcacatattgtcacatagattacatagaacttgtcttcattgataacttgtgctgtaactgcaatactttgaagggtatatctctcaaacaatgaagctaggagggctcggtcttccagcttacaggacattctcactggaggagctcgagtatgcaacaaataactttgaatcctctgctttcatgggtgaaggttctcaaggacaggtacagcagtgaagcttcaatctttctttagctagtttccattttttgaacagttgaatcaaacaagatttttgttttcattgttcttttcagatttatagagggagattgaaagatggatcctttgtggcaattaggtgtctgaaaatgaagaaaagttgcagcacacaaaacttgatgcatcacattgagctcatcgctaaactgcggcaccgtcacttggttagtgtgctcgggcactgcttcgagtgctacttggatgattcaacagtcagcagaatgttctttgtctttgagtatgtcccaaatggagaactcaggacctggatttctggtaccacactgaaacatcatgtgttttaagaatgaagatgatcattatatattttttaataactaaatcggattgttcttgtctctgctgtgctagatgggcacatgggaagattgcttacttgggaacaacgcataagcgtagcgataggtgtagcaaaagggatccagttcttgcataccggtattgtgcctggtgtttatgataacaaccttaaaatgacagacattttgcttgacaataaccttgcggcgaaactcagtagctataatcttccattgcttgtggaaggtcttggaaaggtaaatgacgatgtcaaaagttcgaatgtttttgtttcttgaattttgaatctcttttgctttcctttctaaggtggggcaagtaggatctcggagcggacctaaaggcactccaaggtgtgtaataatcttctttactctgtttctcatcagcttgtaaacccggttatatggtttaatcctctgtttctcaaaagaatcaaaaacggtttatatggtttaatcctctgtttctcatcagcttgtaaaccggtttatatggtttaatcctctgtttcttaacagcatcaaagacgaagataaaatcgatatctatgattttggagtgatattgcttgaacttatagtgggaagaccattgagagcaaagagtcaagtcgatgttctaaaagagcaggtaacaccattcgatatatatgtagcttgatgtggaatcgctatcatctactttaaaaactcttttttatttgttgtagttacaagcaagcatttcagcggatgatggagcacgtaggagcatggtggatccaacggtccatagagcttgttcagaccaatcactgaagacaatgatggagatatgtgtaaggtgtctccttaaagaccctttagaacgtccttccattgaagatgtcctgtggaatcttcagtttgcttctcaagttcaagaaggttggctacaaaacagcaatccctcgagcaatctcggctcgccttctcctgctgcttcctctcttcctcctccctctcgtttacacgtaacaacactcgaatctccccgagattcaggtatttttgaactcgatcttttatgatcaattgattcagttcagaatagaatttgattgttaaagatttgagattgaataagtttattgatctgagacttatttgtgtggttgtaattgcaggatgtgaagaacatgagaggtagagagacgagggtttttgtttggtcttgttcactgatcactactctttggaaagaacataacctttttgtttgtaatttgatgtttgtttttgtttttttgtctttagttgtgttgagcttaaacgatcataacagttaataatatagttaatttttcttataaactttacttaaaagaacagtgtcggttaatttttattcttcaaaaggaatacaagtccaacaatggtgagataattttggaaaattcaatcgttttttcttcctgttttgttcagcgaaaataaattaaaattgtatatagaaattgagatggaaccgatttctagggtttagaaaagatttgcttgattgattcttcttgtccaagaaatcaaaatagaggataatggctggtgttggatcatcaaatcctttacttatttattaatttggattcgtatgtaaattcagttaattccaactagtatgataattaaccaataactacatgcatatatctcattcaaatatttcacgacaactctacatgtatagtatacgtctgctggatatacttattctctttctcaacattattataaaaacggagatatatttaaattaaagacaaaccctaggtaatacattcatctccggtgaaaatcctccgccggaaatataaccttcgaagccaccgccgtcgatccaacagccaccgaaaaatcagcaccgctctcttcctcatcctcatgctgataatctcctctcctttgctgatgcggtggcattggctgcaacgaatgttctaagttagtcggagccatgacgtcatagctgacggctgctgcatctgccgtcatggtgaagctgttcatggcggctccggcgagagtggtggaggcggaggagttgttggagtattcgggttgttgcataacgactaattgttgttgctgttgttggtgatgagtttgttgttgcataacgttggccattgcgactctactgtttatcagttgtgattgcaccaccgataactccgcctgtagcgaggccacctaattaatttatggttagaaaagtattttttatttaattatgagcatcaattatttattagtcttaatatagcataggaaatgaatttgcatttaacaaaaaatcttacgaaatattcggttcgattttaaccgttacaagctttactaaataacaaaatttggacacctgatcattagtatatcttattagaaaaagttaatcaagtattaattttacctgttgttggagagcaaggatggttgagacgcagccatagacaggatcagagagcctagcttgagcctcgtatgagatcgtaaccaccgcatcatgacgacggttcaccggaatatgatgcaacagtttcgacacgttgctggctccgaaaaccttatgaaccgccgcgaacctagccgctccttggtctgacccaaaatgtggagcgaaaatgcatccactcacacacttccttctcaagaacttgcaagccccacaaggcgaagccgtccctgtccccgtcgttgcagctgccatggatactccgccggaactaagtgatgacgtcggagtttgctgtgaggttctttttccggctagagatttccggcgagaatctgaggtgttgtggcctcgctgctgatcagccatatcaccaaacaaacattaaataattagctttagttgatgagagtttcttgcgagataaacgatatctctacttatatgtgtatgttaatttatatgaagtgtatatgtacatgtgtgaatgtggatatataagtaaaagaagaaacggagtaggccacgtttgtttcatgaaggaggtcgcgaggtaaatgtggtaatctttttttttgttatttagtttgtttataaatttatttcatttccaaaattagtttggtcaatgactttttttttggtgttttgcattttatagctttaaatgttattcaaagatttttcaccattttcccccaattatgttatttactaattaaattattttcttcctttaagttaagattttaatatatgacattaatagtatttcacacgtgttttcgcatttgactattttagtcgttgtaagctttttttttgtcgtctataaattttacttatgttcatgggtaacattaactgaaatttaaagactgacaaaaaaaatatcataacatctaaattagtcaattgcgacactggtgagtggtgactaattaaatgtttgaaatagagtaatggaagtataacacaatgtatctatctattgacgagtaaatcacataaatatttactataattggcgtgtcaatattattttattgatatataaccttttcacatttgagaaggtggcaaataataaattatatatcttgtaacccaaatataacaaatttgctcaccataacttattaatggattaatatgtaatattagttaggttatatatttacgtattgttaggtacaagaacgagcgtatcaatgggaagaaggtgtgaggcacacgtgcaaagagagtgtttaataaagtaataagtttataattagtatttcgctatatatatatatatatatatatatatatatatatttattatcttaggtcttattaaatgtaaatatattagttatggttagaactagtataacaaacttatggaaatgcgtacattgcgtctgaaaccattaattagcgatatatacatttgagatttataatcataaaaatctagagtccttttgcttatacaagacgaacacttataaacgtttccaaaggggggaactttcgaaagttgttgaaatgagagatatacaattgcgaagtatagagaaataaacttcaggacattgacaataatatgaaatgaagtacacgatttagttgataagaaaagaaaagaaaaaaagtatacacgattaatttccttttagaaaaaccaatcatacatcgatttgatgtttaagtctagaatatgtgatgcaatttaaattatctgtttttgttttccctgagtacccaagaatattgggcggagcagattgatgccaatatcaatatgtaatcagtacatgcatgcatgtggtatatatagagagaaaattgtatgtttttgcttacataacttaaatcaaccagacaaccagtgatgcatgcatgtggtatataacgaaattcacatgaatgttctttatcttaaggaaaaaaggaagataaatcagacgaaagttaattgtctcaaaaggtaaaacaaatgtacgatacaatgattaataacaaattgtatagtatagctagctaccacaatctaagtatcgtattcgtacgtaatttcgtatggatagagaagtaagtatatatgtgagagtgtctgagagaggagaggcacgagaatcgtgttgaccgtttcgtgtggagttctttagtaagctaaccaaccttcatgtctgtcgtgctccttttcttcacaacattaatcctcccttttctttttccgtactttgccattttcaaaattagttttatttcacgaaattcttagtatttcatgacttcattttggtgggttcattttcgtgaattacttctaaatttcccccattccttctccaaatcagtagagccgctattaataagaaagtgtaacttccgaatgacaatgacggtgcttggttgtgtttgctacaaacatagaactcgaatttttcaaataataagagtgttggacattagtatagcgagacaagatgatgatgaattcaggtattctcacaaggcaacgttcccaaacagcaggaactaccacaagagcagtttagcttgtcgtctctgttctctccggccacacttacgtctccataactgaaacttaactcctcctctgcgattatgtcctttgctgcaaagaaacagagccgaggaagcaacgctcctgagcttctcaacagaacagtggagagatttccaccgtcacaagaatggttgatgaatctagcaacgttcccaattcttgtggcgtcgatgtttatccttaaacaagcttgtcctgaagggaggtgttcgcgtacgaccaaaagagctgaagcgaaggattgtgttgatctgagtttgtcgtaaatgttttgacgtctacgtgcttcatctgttgtcaatagctcacctataagaagagacgacaaaatcaagtttatgacttttgcataaaccaagtcattaaggcagatcacaaagaaaaaacacattcaagaaagaagaaagatttgtcattatctctaatctccaaatccagcattgtgatactacctctaaacgattgaaacaagaacatttcgaaagctcagatctttcactgatggagatcactcttaataccatgctagaatctcatctcaacgcatcgagctaaatcatatgcagtccaagtgtaaaaggctaataactaatgctaatattcctcaaatcatgtaatcttaagcttgattttcaagttccaattatcaatcttccaaaattagtgacctactgcaataaaacgaatcactatactattaggaaaccaaaagttggttaacgttacctaatgctaatattcctctaatcatgtaatatgaaatcgaaatgtaattgtaacctgcatattcacagatgaattggccttgcttgataagctggtcagcgtacaagcaccaacctttcttctcatctctcacaatcttcaaactaaccgaaacccccttctgcgtaacccggttcgaacaatcggacccgcatccacaacccgacccacattcgttagctatctcttccatccccgcgaaagctaaacacttgcagtatccttcctcacacctctcgcattcgcatcctgactcgtccactaaactcaccccaaaacgtccgctttcactcactgagtcaaaacaaggtctagactccgatccacattcattagcagcagctccccaccattgtcgcggcggaggaggagatgaagcggggatctgaaaaggtgtgtagatgaagtacgcgtatcgttgagaatcgatggagttgtgaaacgggattgagatgttttccaaggatcgtgcagcgtcgagagatcggtgaatggttagagatttcgagattagggataaggttttgcaggtttgagcaacaacggcgagttctcgagggtttagccatgggagaatcaaattcgcacatcggagaaatcgatcggcggccggaataatgtcggaagcttctccaagacaacgcgtcttcggtggtggtgactctcgcagtcgctgcatattttttctcagccagcgatatacaaacgacgtcgttgcgtttaattctatttatatccttaaattctattttaatttcacttcagtaagaattttttaaagaaaaatggcgagtttttttgtgttaatcataactatagatttactaccgtcgctttggtctgtgtaatgaaatctgtcattttcacagaggaaaaaaacttacaaagacaaaatccattgcaaaagagcgagcaacaacgacgaaatttcgaaatgccatcgccaccgacgacgacttctctctcggtgacacagaccataaacggatcacacagcttcacaatcaaaggctattctttggctaaaggaatcgggatcggaaaacacatcgccagcgatactttcaccgtcgggggttatcaatgggctatctatttctatcctgatggcaagaatcctgaggataattcggcttatgtctccgttttcattgctttagctagcgatggtaccgatgttagggctctttttgagctttctttgcttgatcagagtggtaaagggaagcataaggttcatagccacttcgatcgtgctcttgagagcggtccttatactctcaagtatcgtggcagcatgtggttcgtttcttcgatttcttcttttcaatttttttatttttctcttagccattttgctagggtttggtgaagaattggcttagggtctctgatttctagtgaaagctcattacttttagaacaaattttgctcctttgttggggtttatatgaggttacggatgttattagtggtcaagactcaagagtgtagattgttgaaggcaaaatgagattgagctcacaacattaaaaaatataaaagagattgagaaattcagaggaaataaagatacattagctgtggatttctcaatctgtttgtttcttttttgttgtgtgacctgtatatgaaattgaaagatgggtggtgagagcgataaacaatgttctttattttttatgctggaggctgcttggctttatttttgtggtctgcttgaaactgtgagtctgtgacgtatggaaagagagagggctttgagtagaagaagcaagtttctagaatatgaaggttctattacctgttttggacattctgtaactagtttacctgaacttttcataaacagaatttggttcctgctgcttcaccagcatgtagcgttggttctgtagttaaggaaacttgattgggaacgagagagggtttggactgatgatatttaggattttcttgaaaagtattgtgttttcacatgttggcatgatttcaaagacctgtcattgtgatgttttactatataggcaccaattctttcaatatggtaggctaattctgaagtaggaacattgcttactgtttacctgcatatagcagcacaaaccttgcttttatgaaactgttcatgttaggtttgaaacttcttgtatgagttaagcaacagagtattgtcttttgctctcaatattcgtacatttggttttcctgcttttttaaacatctgttgttaagtctgcttgtatgaattaatcaaccattgtctctggtttcttcttcttgaaggtgatgcctttggctttgatttgtctctctattagaaagatctcattgcttattaatgcagaggaataattccctcttagagttttgtacttccctgtttcgctcaacggatccttattcaattttatatgcttacaggggctacaagcgcttttttcgaagacttatgctggaaacatctgattttctgaaggatgattgtctgaaaattaattgcaccgtgggagttgtggtctcagaaatagattgcccacggttacattctattcatgtccctgcatctgatattggatctcatttcgggatgcttctagagaacgaggacggttcagatataacttttaacgtctctggtgaaaagttccgtgctcacaggttagtattggctgctcgatctcctgtctttgaaagcgagttcctcgatgttacgggagaagaagatcgtgatatcgaagttactgacatggagcctaaggttttcaaggtaaactttctctcaactttttgacaccaagtatgtaacatcacacaatgtaaacgcatcgcatttctctctaattgttttgatgcatttctggtgaaggctttgctccactacatatacaaggatgctctcattgaagatgcagagtcatcatcatcttccggttcatctgttggtccatctgcctcagacacattagctgcaaagctactaggagccgctgataaatacaagttgcctagattaagtctaatgtgcgagtcagtgctctgcaaggatatatcagtagattccgttgcaaatattttggcgcttgctgaccgttacaatgcttccgccttgaaatccgtttgtctgaaattcgcagcagaaaatctcatcggtaatgatcttttctgacaggctcatcactgaaattgatttcacaccaaacttacattgcataaacatttttcttgatgcagctgttatgaggtcagatgggtttgattatctaagggaacactgcccgtcacttcagtctgagcttctgaaaacagttgcgggttgcgaagaggagttaagcggaggaggagggaagacgagaagcgtatggggccaattctcagacggtggagctgagacaaacggaagacaagcacagacttggggagatatcaatggaggagcagagagaagccagagtgtttgggtcgaagttgtgaacgctaatggaagcggtagaaacaataatgacaacaataacagtgatgacccaatggcagaactagaagattgagcaaataaaaggtaataaaaaagccaaaggacaatccgagtaagctgaagttaggatcagacatcatgaagcggagatcttgtaacttagtgtttccactgtcgaatactatgtggatcataggagacgatttagtattgttgttgtaatacgctttccgtgtaataattggagttactagtatgataaactaaaacactcatcatcaatataaattcagtaagcttgttcagttttctacaagtgttaactccttggataaatactaagagcataaagtaaaagaaataatcttttaccaaaacacacaaaactcgacagccttcaacttcaaagcaaccatttgccaccaaaagttgggtaaagccgtttgataaccacggattcgggaacgaaaatatatttcagactaaattaaatggaaaagttttagtaagaaattgaggaactaattaaaaggaaaatgttatgaaaatataaatttgacaaattgggctacactatattgatcctctaaaaaaaaaactatatatgttaaagagtgaagatggaatcgtggaacaggacaatatcttaatttgaatcaagaattaggaaataaaataaggaaaatatttgtaatttataagtaatttattaagatagtttaaaaggaaaaatcaaataatatgttaattcaataatatacaaattgttgattaggtcgctgagaaacgaaagggaagcgttatataattagggttttgtgcttggccgtgacacagaagaaacagaagaagaaggagatgagcgattccaacaaaaagacatgcaacgatgcgaagcagccaatacttgtcctggacttggttagattggtcttggaacgcttgagctttgtagattttcatcgagctagatgtgtttcttcagtatggtattccgcttcgaaatcatgcattggaggaacaaatccaacagctccatggatcatcctctttccaaacgaacatgtgaaaaccaacaacgattcgtgtaagtcaattgatcctcgtgatcatagttcatacacaataagagatctcgggtttgatatggttaggagtcgttgtttggcaagttccggtagctggttccttatgttagaccataaaactgattttcatctcttgaatctatttactcgagagagaattcctcttccgtctctggaatcaattgatggattgcagatgaagtttgtgagaaccggtgactgtggtttcgagatgtctatgtattacaaagctcatggacttatttcttatggtaaaaacagcgatcttagaataagcgatgcggttttgtgggtagatgaaaaaaacggagattactttgttgtttggtttcatcatagcacttttgcatatcacaagaaaggaggtgacaataatagctggaaagtgtttcaaccttcaaagcatcaaggatgcatcaacatggtgtttaaagaaggcaaactttacgtgcttaatccagctcgaaatatttctgtgtttgatttctccggtggtcattctccagtggaatatgcaactcccccatctccgaatgatgattactatgtcaggaatcttgctgtgacattgtctggagaagttttgatcatttcaagcaatccaaagaaatgcttcgtcaaactctacaagatagatcctaaatcatcagaatggagattaatcaagtctataggagacgaagcattgattttggacctaggaatcacggttgcagccaaagatggagttatgagaaattgcatatattttagtcatcatgagttacttagatataaaggggttagtctatgcaatgatgataagtacgggatttgcatctaccatattaaaaccaagaagaaggtccaagagtttgaacatcttactacttcatcgccaatactatttaaggatgctcgttggttttttcccacttttggtggaaactagttgctctaaacctataccaagttttgtcttttggtaagggttgattattttctcttttttttttctagatatctaaaagtagcatttgacatttgaataaaaagacaccatcactttgcttctaataaagctggaaattgcttcaaacttttgtgggaagaaaaagtctttataaatgggcagtagcattttaattggtttttggattttgtttttaacaacatgtgtatggtaatctgttttagacttttagcttttattttataactggagtttccaatattttacttataaaaaaatatatatatattttacttataagatgatttttttagatttattttattgtttataatgatataatttcttaaaacacatattgttttatgaacaactgataaaatatttcttataaaaaagaaagtatatatatatgtacaaatgcttatggattttgtatttgttatttccaaaagaaaaaaagaacagattctttaatgaaaaaactcaaatattagttttctttctttctttctcaatggataataatgttggtcttttaaaacaaaaataataatattattttaaaaaccacaacaaactcatagcgtcagattacttgagtcccctgtttagaacagagcataaaccctaatattcaaaatcgtaaaaaaatgtccctgaagaaggagatgtgggattccaacgaaaagacatgcgacgattcgaaccagcctatacttgtcgtggacctgattagatcaatcttggaacgtttgagctttgttgatttccatcgagccagatgcatttcttcattatggtacactgcttcggaatcatgcatcggaggaccatcaactccatggatcatcctctttccgaacgaatttgttgaaagaaacaacgattcatgtaagttgtatgatcctcgtaactatagttcctacatagtaagagatctcaggtttgatatggctaggagtcgttgtttggccagtccgatagctggttccttatgttagactataacaacgatttccacgttttgaatctgtttactcgagagaggattcctcttccgtctctagaatcaaccgatggatttccgatgaatattacgaatagactagacactgcggttttgtgggtagatgaaaaaagcagagattacttagttgcttggagttacggtgacatttttgcatatcgcaagaatggagatggaaacaatagctggaaagtgattgagcctttaaagaatcaacgatgcgttgatatggtgtgtaaagaaagcaagctttacgtgtttagtgatactcgagtcactgtgtttgatttctcccgtagtgattctccaatggaatgtgcaagtttattttttatctggagtttcacaaaagtcctgttgtgactttgtctggagaagttttggtcattgctagcagagtggaaccacatcctgggacgttcttattcttcgtctacaagttggatcctaagtcatcaaaatggagcataatcaaatctataggggacgaagcattgattttggatcttggaataattgttgcagcaaaagatggagttatgaaaaattgcatatatttagtaatgatcattttcataagtacagtgggattagtctatgcggtgataacggtaacagtattttcatctaccatattgggaccaaaaaggtgatccaagtgtttgaacatcttactgcttcattgccaatactattcaggatgctcgttggtttttccccactatcggtggaaaatgtttgctttaaaactatctagttttgtcttttttgtaaggctacattatttgcttgtctctcgtggaacaagagtgtttacaagttttctttttatattcaagtgttttggacttagaaaggtttgaaaaatcgtactcaaattatctatatatcaacaactaatcctctttagatggttttgtttttgtagataaatttggcttttagttcccatcaacatttcttccatgggtttaagtgttgatcatgagcttaacaagtcattagctatatcaaattaccaaaagactgattctcaaaaccgatcaagaaagagcatcattttataatctaactcgtgtagagtactgaaattttgatttggaaattaattctcaccgacttaacatggaccaaatgtacttgatgtgcaccgacttaacatggaccaacttggtcgatatcaatacaattctggacatctagaggacgcttatggtacgttgattaggcttcccgtgtgtattttgcttgtgatctcggcattccattgccgaaggttcgaggatgcgcgcattctttcgattgaactatctacaaacgcacccaagcttgatgacgctgatgacaggaaagcaatccattataaatccttatgtggacgaggcttagccaacatggctttaggccactattacacagccgctgttttggtacgtaaactcatatagatatatttatgttttgtttataattatgtttggtataacttatattcatcaatatttattgttttcgcagtttgcgcatttggtcaaatgctatgccaagtggtcaaaaaactcttttgacctctttacttgggaggatttgttcatgtacacggcatggtgtggtcttgccacgatgaaaaaagatgagcttgaggtaatacaatattaatcgattatatatatataaaaataaataagccgacttgtaaactttttttattgatgattttttaggagatttctgagaggatgggaagtcaaaaagttggccaccatttccaacacttgattagaaaaactcttggagggtaatatataactcttaaaaaatttctattgaatacacttgtcggcaattaaacaagcttggtttatttgttgcaggatgtttaaaccaccatgcttggattttttgaaaactcattcaaaaccaaagcacttttggacttatacctccacgaccatgtgaatgctcttgagatcctcatccaggagaaatttagggtgtgatgcatggttgctttaaaactatctagttttgtcttttttgtaaggctacagtattttcttgtctctcttggaacaagagtgtttgcaagttttcttttatattcaagtgtgttggacttagaaaagtttgaaaaatcgtactcaatatcaacaacgaatcctcttaagatggttttgtttttgtagataaatttggcttttagttcccaccaacatttcttccatgggtttaagtgttgatcatgagcttaacaagtcattagctatatcaaattgccaaaagactgattctcaaaaccgatcaagaaagaaagcatcattttataatctaacttgtgtagagtactgaaaatttgatttggaaattaattctcaccgacttaacatggaccaaatgtacttgatcattttcaatataacaaactagtgcaccgtaccgtattataaagtctttatgtatttttttttaatataaaaacattttcagatatatttatttccaataaattcatttattttaagaaattaaccaaaaagaaataaaaatgaacaaacatatataagtatcttgattagaagaagcaggagacaaaccctagatgagtgagtccgaggaaaagacatgcaacgacgatccaaagcagccgacacttgtccgagacctggttatatcgatcttggatcgcttgagattctctgattttcatcgagccagatgcatttcttcagaatggtattacgcctcgaaatcgtgcatcagagtaacaactccatggatcataatgtttccatacaacacagattggaaagaaaattcatcatgtaagttgttcaatcctcgtgaccatagttgctacactttaagagatgtcgggtttgatctagctagtagtcgttgtttggccagttccggtagatggttccttatgttagaccatagaaacgattttcatctcttgaatctgtttactcgagagaggatttatcttccttgtctgggtgcaaccgatggatgtccgatagaattttggagaatcaataataataatttttgggtgactctcaatgaccaaaacaattctgcaaaaaaaaaaaaaaacttcacatatggtcatgtgtcttagaataggcaaagctgttttgtgggtagatgaagaaaccagagactacttagttgtttggaattatgatggcttttttgcatatcacaagaaaggagatgacaagaataactggaaagtgattcaacctttaatgaatcaacgatgcgtggatatggtgtgtaaagaaagcaagctttacgtgcttactgatactcacgtcactgttcttgatttctcccacgctgatgcttctccaatacaatgtgcaagtttcaaatctccgaattatggtaatgattcgttttgcggcaagaatcttgctgtgactttgtcaggacaagttttgatcgttatacacagtgggggtgtctacaagatggatcctaaatcattagaatggagcagaaccaattctttaggagacgaagcatttatttttgatctaggaataactgttgcagccaaagatggagttatgaaaaattgcatatatttttatgctgacccgccttatcgacctaggaggaggtttgtacgcaatgctgaaagcggtattagcgtataccatattaaaaccaagaaagtggtccaagtgtatcaaccagctcttactgcttcgtctccaatatctttctcttctgctcgatggttcttaaatagttgcttcaaacctaaatcaagttttgtctcttggtaaagtttggagtattttcttttgttttgtactggaacaagatttgttgcaacttttcttttttatatattcaagtgttttggactaaaggattgatgaattggagattagacgggtgattattgattgtctataacatttgggcgtaatctgttataatttacattaccgttctgtttttggtaaagagaagatccacatgtccatcaatttttactgtgacattgtaaaaaaagtaaaatctgttaatctgtttttaagctgaggtgcagataaatctcttaggatagagaattcatgaatcaagagttgcccattgcacaaattagcccaattgttaataaaaaggaagaaataaacaaaatcacaaaagtcatctaaactttgaagaatctttaccaacgagaatctcacaaaagttggaatcgtgcacgcctctcgagttatctccggctccgatactccatctggtggattctgtagaagaaaaaatttcaatctttgttggattttctgggaaaaactcagatgggtttgctctgaatcgattggaaaatcaaaccggtgtggactctgcaaagttggttgatatgaacagtcttgtgagaagaaaacaagttgattctgttcatcttatcaaaaacgatggacctcatcagcttgccaagaaactatccgccgttgatcttgttgctattggtatgagaaagcttcaagctttggccaattttgatcaaaattccttatgggtgttgattgtgttcctttcggtgttaatttgtcaggagttgggacaacaattggagcaggagtgtatattcttgtgggaacggtagctagagagcacacaggacctgctcttgctgtatcattcttcattgctggagtagctgctgctctctctgcctgttgttatgctgagcttgcttctcgttgtccatctgctgggagtgcttatcattatgcgtacatttgtcttggagaagggtatatatatatggattttaataggattgaccttgttgttcgtcttaaagctgatactcatggattttcttatttcataggattgcttggttggttggttgggcactggtgttggattatacaattggtggatcagccattgcccgtggcataactccaaatctggtatttgcctttgagttatatgtgtttggtttcagtcaagaagttaatcacttagctccttttctttcttttttcaaaactattctcagctctaattctcaaacccaagatgcacttgttgtaaaaacgtttttctttggaatataatttaacattattttcaaaaaaaaaatatatgtatttgtggtcttttgttgatttaattctgactggtgtttcttttgttttaggcatctttttttggtggtttggacaatcttcctgtgttcttagctcgacaaactatacccggggttggtattgtggttgatccatgtgctgcacttttgattatgattgtcacgatactactatgttttgggataaaggaggtactttattgaagacattttaaatggattcatttcaggattatcagatcgtctaatagtgttataccgggttattttgttcttacagagttcaacagtacaagcaattgtaacatcagtgaatgtttgcaccttggttttcatcatagtagttggtggatatttagcttgcaagactggatgggttggatatgatctccccagtgggtaattagcctgttctcttctccattgagcgtagcttttgtcaaaagttatttcttaaagtcaatgtttaatacttgtctttacaggtactttccttttggactaaatgggatacttgccggatctgctgtagtattcttctcatacattggatttgatactgtaactagtacggctgaggaggtatacagtttattgaataatactctcattctttttgatttattatccttctcttttctctacaaaggactcactttgacgattccatatagaactagtaataaaggatgatttttggtcttagtatagtgaactttttttccataattctggcgattttctctgttaagctcttaaccttttggtattgccacaacaggtgaaaaatcctcaaagggatcttccattgggaatcgggattgcattactgatatgctgcattttgtatatgcttttatcagtagttattgttggattggtcccatactattcattgaatcctgatactcctatctcctctgcatttggagacagtgggatgcaatgggcagcgtaagtatgatacatctcttgacactcaaatttctttgtattaattagtcacgatgcatatacacatacttccttttgtctttgcttttttttttcttattattcctatatatttcaggtacatcttaaccactggggcaataactgctctatgtgcgagtttgttgggttcccttctggctcaggtactaaccaattctatcgttctgaaaatccaagttcaagagattttgtaattgagatatcttagtagtaaaagtaacatgctggttctgtgtgggttttggaaatgcttacatgtcgttttgacagagctttgtattttttttttattagccacgaatattcatggcaatggctagggatggattgttgccagctttcttttcagaaattagcccacgaactcaagtaccagtgaaaagcacaatagctattggtgttcttgccgctgcactcgcatttttcatggatgttgcacagttgtccgagatggtaagctggtatttgcctacattacatgtctcaagtcttaaggaaggattttcacctacaattagtggcaaacagaaaattgagggttcattattagtagtatagttttgatattgttgaagcagttagtattatataatttagttgagacacgcctaaacacactctattacggtaacagatccttctctgagtagctcacatcggtaatttatccaacaggttagtgtaggcactctaatggcattcactgccgttgcagtctgtgtgctagttcttagatatgtaccaccagatggagttcccctatcatcttcctcccaaactttgagtgataccgatgaaagtagagctgaaactgaaaattttcttgtggatgctatagaatcttctgattcccctctacttggaaatgaaactgctcgaggtactaaaatgtgctcaatcacgtagttaccatttggatatgttgtaaagatacatccaacaattcaatcttttctgccttttatctgcatttaagaaatatgacttttttgcttctttttaattgaacagatgaaaagtattttggaaagaggagaaaaattgctgcctggagtatagctcttgtgtgcataggtgtcctaggtcttgcttcagcagcttcagctgagcgtcttccaaggtcgtttcatcatctgatatcttatgtctgtataacccgtcctgcatatattccccacatctaattatgtctactaaacaaatctatttagtttggttgagatgcttgattagctgtgaacgatatcactgctacttgcatgtcaaagcggttaagtatgctcaattagaaaatgcattcctgtttcagaattttgtgaagcacttttcaacttgctgtgttgaaagatttgcatgttattatctttgtaatatggttatgaactctaatgggttatttcttgacttttgcagttttcctcgtttcactatatgtggtgtcagtgcagtcatcttgcttggcagtttgattactcttggctacattgacgaggatgaagaaaggcacaactttggacacaaaggaggtaaggcctgaaccttattcaagcctttttttttgcctactcatacatcacaaaatgagaagtttaattgaatataagattcagcgagccatcaattggttggtcttactttcatcaaaaacgctgcttagttattagtttcttgctgagttggttattacctggttaggacgaaaattttgaggttttagcaaaaaccataaacttggatttatacttgagcagcgttttctaactggcattctatatatgattctatttcagggtttctctgcccattcgtcccataccttccagttctttgcattttgatcaacacctacttgatcatcaacattgggtgagttagtctgatggacccatgtatgattcagtatattgggatgtttctaaacccttgctggttatttgtaatggcagagctgggacatggatcagggtcttgatatggctacttattggaagcatgatctatatcttctatggccgatctcacagcttactgaacaatgcggtttacgttcccacaatgacttgtacgagaaaaacaacagatcatcttgcttaagattggtggatcaatgctgcagttaaagggactcgagctcaagctttgttgttgctgaagtagcatctaaagagaattaaacagtttggcacaagagtaaacacaagccaatatatacaacaacattttatgtacattgatagtcattccattttcatgtacacaagccaatgtatatctcttaaatgccaatttcatgttttattcctttttccatttccagttataaagtttgccaatattggttaaatgatcttgaaactgccaagtccatctagtaagtcgaaacataacaaaaactgggaaactttgatactctgcagataaagagtgcaagaacatttaaaagttgcagatcatcttgcttaatatgggcggttcaatgcagcagttaaagggactcgacctcaagctgttgttgcttgtacaggcttagaaatatatgtgctcttgttgtgaaatgtatccagttatatagttttcttcacttagctaagtgatctttaaaactcttgaagttgccaagtccatctaataactcgaaacataacaaaaattgggaaactttgacaagctgaagaaaaatcatctatcccaaataaaatttagtcaaaaacattaatatatcaagtaacctaaacggactaatgagtttgcaagagagaagacaacagaaagaactgatgaaatgtctgagaatctcccaacatatgacgtcttcaaaaatgttatcctcctccacaccagacttgccaacatatatgcacagcttcaagaaactgccaagaaacataattacaaaacattagaaaaaaaatcaagaaaagacatttgcaacttgtcttgtctcaagttttcaagatttctcaagtcgcacctgtggttccgttggaagaaactctcctcctttcgtaatgagtctcacgagacacagatatgaacagtgatcttgtttgcattccactagctgattgtagcttcaccgttgactaaactttcttcgttggtactgctattgctattcattgtcttgtcactactaccaccagttgctctccttacatctttcttcttcaggacaagttcatccccagatgaaacctttgatgctcctgcagctgcacggtcctttgacgaagtatttacatatttcctttgcgaactcttgtctttggtagaatcacctgccggctgttgtttctgactgtctttgtctgtctctgattcgggaagtaaagcccgtacactaagtcgaagctgacccttttcatttacctgcattatccatgtttctttgttcaacaactctctaattatcatttccgattagttatattgtctcttgagttataaagacacaataactcgctgacctctattaatttgacgtcaatgcggtctcctactttataggcctgaaaggacaagaatgagcgtatgtgaaaacctgaataaaagatgaaacaatttctataaaggaagggaatcaatgagtaatgctcacatcctctggttttgcaagccattcagcactcagctcactgatatggcaaagaccttcccgcccaggcgctatctctacaaatgcaccataaggagccattgacttgatttcacaattcctgatacaaaaagaaaggtaagaatccaaatctatttacgctttttggtcagagaaggtatatgaaggatacatacctgtagatatcaccaacagagggaaccattgtcaatccactaataatcgctttcgccctttctagactcgctacatcaattgccataattttgaccttgacaaagataaatattaagaagttaggataaagaatacccaataaatataaaatcacatttttttgcatgtatatctcacagttccatcatcttgcatgtcaatggcctcaactccagattcttcaatgatgctctttactttcttacctccagaaccaataagagagtatactttgcttggatgaacctgcagcacatgaaacgccaacaatctttagttcaaggcagaaaggcattagactgggcaatcctggaaaaactagttgaagccaaaccttcataataagtatcaatggagcatattttgagaggcttagcgtgggaggcggtgagcactttgccatttcagctgcacaaaaaggaaaaaaaaaaatatagtaaattacatcttttgtggcatacattttccaaggaactaaatctccccaagtctactatcttgagactaataattcatgaataacattccttaccaagaatatggcgacgcccagcttttgcctgtattagagccttttccattatctctaaagtaattcctcctacctagttcatgattaaagagaagaagtaagaaaagatgttaccaacatattaattcaattgccatttaaaaccatttcggtagtgtaaattaagaaacggatgatgaccttgatgtccatctgaaaggcggtaacgccatcttcattcccagcaacctattgacaaacatatcaaaacttcagcattcaagtcaatgcaaggtccttcaagggaatcctcatattttctgaccttaaagtccatatcaccagatgcatcttcagctccagtgatgtcagaaaggataaggggagatccatcacctccaaattcttcagtatcccaaaccattcccattgctatcccagcaacagaacatttgactggaactccagcatcttgcaaagccaagcaaccgccacaaacagatgccatactgtcacattttgagatcaacgtaagaagcaattaccaaatttgtcattcaaacaaactaggcgtgcagatcataaaaccagataaaaaagctgaccttgaagaaccattgctttcaattactgtactttcaacacgtattgtgtaaggaaagtcatcatcactaggtagaatggtctccaatgctcgctctgctagtgtcccatgacctatttctcttctactgggtgcaccaattcgtccaacttcaccaacagacgatggaggaaaagtgtactgcaacatcacaatgactagcttagaaaatctctttaagcacaacaagaaaaatgaagaacgacactaagcaactaaccacatcaaaaagtttactttgtctaataaaaagtcaactgtaataataataacaaagtgagaagaacaaatataaaagagacctgaagatagaacctcttgtattcatcagaaccctcaaggttgtcaattctctgcgccatttgtttatcaccaagcgtaacaactgccagtgcctgaaagaatcatactaaatgttcattagcaaaccaattgccttaaaatacataaaaggcgataagagaaaggatcgacatatgaaatagccacgcaggatttctccagaagacaacattcctatgttacctgtgtttccccacgtgtgaacagagtacttccatgtgccctgggaagcagtccacatcttgaattaattggacgaatctcatccagagtccgaccatcacttcttttacctccctatggatgaagaaagatgtcatatggaatcaataaagctcattccgaaaaagtgaaaacaaaaatgaaaatttaggaaagaattactaggagacaatgtgaaagatgtgtggcttcaaacatgttagattctttaatgtagtgtagttcataaaatgcttcagtgagaaaataaatccttaaacatacatgtctagggtataaataccaagaaatcagatgttgtacctcaacaattcgcctacgtagaagcttcgacgatacttctttgaagactagcttgacatctacttcagaaaatagctagcaaagggaaatgactagtttgttagcattacatttaagaaaaaatgaatatgataaaaggtcacattcaagttatcatgttgaaaaggttaagagactcactaaaggaataggtttccgagggatgggtctaatgtgaacatcgccttggtccacctcaccttcaggaacaacttcctcatcctcgtcttcatcctccaacagatccggttgtgcttctatggttccaaaagctacctcatcaataacatatcccttctctgtcagtattgtcaagaccttttcttccagggacgatatggctttccttctcgatattttactcttaatttgtaacgcttttgtcaattcctcaccagcaagttcctgtgtacataaaacaattcattttaaacatgaattacaaaataatatcaatgcaattccattctggcaaaacgaaacagaaacaaagtgtataacatactttcacatgcttgtatagctctggaggtggtaatctgatagcgtcaagcattttaggctttccatatttctttgctaaaacttcaatagcaatgcatgtagcctgtacagcatcctggtaaaaatgaaaaagcctcacatttagtatctaattcagacttttaaaaattgaaataatccgaattaaaaatcgaaatacctgtccaactttaacagcttggagaagcatttcctcaggaagaaaattactgtatccctgcaatcccagatttttcaatgagcaagggctgagtatagaaaaaaaaaaaaaaacaggagagaaagggcaaatcttgcaaactcaagtaaagattagagtttacctctatcgttagaattgcagtatctgttccagctagaaacaaatctagctgtgattcttccatctccttcacggttggattgacaatgaattcacccccaataagaccaacccgaactcctgcaatcgctttcgcatttggtacttctgaaagagctctgcggtattcatttattacatagccatgtcaactttgccaagataaaaaagcttcactcatatgtaaacggaaaaagatgaccctacatacacagcaattccagcagatgtaacagctaaagcatcaggtgcgtgtaatccatcgtagctcaaaacctgaaaccacaaacaagcaacaggtcaattacgaatgagactcaaacaaaggagatgaatacaaccatcccatatatgtttaagtataaaaaaacaatgtacatcattttccgaaaaaggtagtaggcacacaaaacaggagacgccatcatacagagacaaaagaaagcgcaagtcaaaaggtattttgttcaaccaaagagaggcaaaacagacaaaaaaagggcctatcggaacataaagatatccatggagaagaagcatacccaggataaaatctgagtttcattgtagaaacctttgggcatagtggggcgtagaggtctatcgatcaacctacaaatcagaacctgcataaaaatcaaaagtagaaacatgttaagaaggatggcgaattagacgaaaccaaaaccatcattagtacatacctcgtgatctttggttctcccttctcgcttaaaaaatccaccactgtaccataagaaggtccatttagatcatcatttaggcaatgatatggtcttcttatagcaagagactccaaaattgcaagagcttgaaagacgcttacctagttcgacctacagctgagaatcgctcctgatagtgaacataaaggggaagaaaatctgatggctcactcggaacatcagctagacaaacggatgtgtagacaatctacaatgacaagtagacagagtaaaaaataaaacaaagcttccgcatctaacaaaccgattaagagataagcaaaaacatttaaaaagttgaaagttttggaaattgaatgaagcagcacacttacagtttctccatctgtgaccgtgactgcagaacttgcttgtctccccatgagaccagtctcaactaaaatctacagagtagacaaaaagaaagaaaagatgaaaaactttgaacaatgttcaacacattcatctaaacagcgagctttgcttctctactatggagctaaaggtctcaaatcctaccaatcaactccgaattcaaacttgcaaccaatgaaatcaaaagagtacagctttttgaagaaattacctctctatttccgaatggaattttgacagaaacgtggttaggaaaagccagagacccatcgccgacggagtcagcgtcgtcggtatcatcaggcctaactagagctctgacactgaatttaccggcgccacttccggagagaagagagagcgagcacaattttcctcctccgccgctgctgcgttcgccggagtgaaaacgagggaaattccgggaacggcaaagcttgctccggcgaagtggccagaattgtggagtactactgtgaagtgcgttactgggactcgtcaacatcttcttcttctttgagagagagagagagagagagagtgagaaagagagagactttatccgttccttgcagacgcgggagcttctcctgtgactctgtgtgaggcgtagctagtcttgtttccggtttcaaattgaaccgggttttaatttcccaactgatattttcagaaccaatcatttattccggacaattaggtctgattcgttagaaatttgaaatagaatttgtctttaaacattaacttatgattaattaatataaatttactgtttaatttgatgaccaaaaatgagattttttatacgaacctgtggatagactaagccagttgaaccgattggttcggatcaatgtcaaaagctgaaacgatcgaaatagaaacgactgcgttttgtagaaaagctaaataataacaagagctagcaacatgtctactattgctatttttttagagttttttagccaatcagaaagttctatttcagatccactctcacaaagtgcgcgtagagagcgtgagagcaattctgtaggggtttaccttctgaaattgtgcctttttttatcaacgcacttgtctctaaaatcaccatcgcgtgaatatttttttcttttcctctctaaaccagtataaaccaaacacaaaatcaattgtaatttcaataccaatataaactttttgttccggttcgagatctctcctcctaaatttttgtttgatttcttcaatcaaaagctctctacgacaaactgcaaattcttctccagaatctgcggcggattcccttatcgggtattcgattccaaatgtgcagtagcttctcttccttctattgcttcagattattgttttttccgttaatcattagaatgtacttgtgcttaatgttgataatgattgtgattataatcactagtatacttgtgtcacatatggaacaaatttagttattttttgctgtaaattggtagtatactaaaaactctaagatttttaagtgttgaaaatttcaataatcctaagtcccactgtataatggctaagttgagagaaaaagtatgtgcattctttctttagttggagttttggcatacatataaacacattgaagctaagatttttgcctatcaatagaagaatctataagtttgaagaaataaagtagtaatccttgtttttctttacatgtatgtagcgagactccttcatgactcaacaattgttataactatcttcttctctgtctctacccacctcaagctccctgttatctcggtgagcacttaacatttgaagacgctgaatacgttgtggaattgttccatcaaatctcatgctctgaggatcttcagaataagctacatagtaagccaatacacatgcctgtagccacgccaaacctacccttccctgaaaacactcaaaaccaggtacacaacataaaccactttgtcttaaagtcttcttcttagttttataaaattagctatcttaccacaaaatatccaattatgaaagcatagagagtcacttccagggcatagtccttgtgtattaacaacatccatatcccagcagttaatgaagagacagctccaacagaaacagcactgagaaaacagaaggagctagtgagatccgagtcaatcagtttctccaaccctgttgtgcttctgaacttcttccaggtatcactcgaagcctccatgaatcctttatcataggttccaacatgtacaaagccccatctgtttccaagtgtaatgagtttgttagcaatggtagagaagcaatcagcacctgaatacatgacctcatcgctgctccctgacattagattaacacttcttattgatcctcttatgaatacgatgattggaacaagcgtcgagccaacgcagatgctcccagtcaagtgtttcatagtgatgcggaaagcattccaagcgtccatatcttctccatgtgcaaagtttacatatctcgcccgtgaaatcgcaacttgttgaacattcttgataacttgcatcgtccatgctaagcttattatgattacggatatgaacaagatatcaagatttgttctagtggaagttgctcctccaattccagtcaccaagaaaccagagtaaacgacactgactatgattgataagcagactacttctctggttcttgcaggtggaaatgctgtggcaagtgataatattttatcggtgtactcaagcctcggagtaatccagcaaccatagagggactgagtaatggcgaaaaggacaaacactgcacctatacctgcatctaccgctgagccaatcaaaacaagcaagattcctaccgagcaggtgagtattggactaagccagaacgttgctttgactgctcttgatggattgtagataaagatgcattgccatgctaaagatgcaattcctgagacagcaacagatgctagtaaaggagggtaccatttcttgaggtggaaatggtgtgtacttgctgagatgagaccgcgaatggtgagaacgatcaccaaaagtgagattaaggttagttgtgagaagagaagacccttgaaaagagttctaaagagttttcctgctatggtttgttgtgttgttggaggtggtctaccttgttgttcctgcaaaaaaaaaaaaaaaaaaaaaaatggtgtctcatcaacaggttattcaaagctggttaatgtgaattcgttatgaacatgcaagtaaaaagcaccatgaagaaaacaagaagagacaaaagagaagctgggtcttggttttgttcttgagtcaagaaatagtgatggaagtcaacgagagaggatcaaaacagatagcataaagtagaaagcaaaacagaacccagagagagagaagatacagagatcaaggtgtttcctgattcttgattcaaaagagagaaataccttgaaggcgattggagaagaagaaggaggaagaggagacattattcttggttcttgaatctgcacgcgagaggcatgaccgttgcttgttggtgtaggcatagatgcgttgtatttgccaggagtgttccttgaatcccaagttccacttaaccatcttcatcaatcatcattcttctgttgtatatatatatgtatatatacatacatctttgtcaataagttctatcattttgttgatgttttattaaatgcatttcgaatatttattatacatactttattccattactttgacttactccatctttaaactaaacctacacttcattgttgttttgactttttacatcaaagtttcctcatttcctgatcccccaagaaactaatcaataaaaatgataaatctttcatttggtcttcagactccacaaattatggaaaatacgttttacatacttattaaattgttaggtttatattttggtagtatttgatacatgtaggttcatcttggctacctactcatcgccgtagcaaaggtatttcaaattatattattagatcaaagagtttagagtaatcaatgagttgatctgaagataatgttatttaattataacaaaatattgttaagcaaatatagagttataaacttgatgtctagatatcatttggtttattcatttccgtatatgatgatagatgagatggagacatgaataacattaaaacgctcagtttaatctttgaagaaacaaaaacataacaaatcgtatccttctttttgattatgcatatcttgtcaaactataaaaatgataccatttgaagcaaataaacaatattataaatgtaatttcaaggaaaatgaaaggggaaacgagtagacaaacgaaatacgttctttcctttatgctttttgttgttacttttttgtatttggcgtgagcggataagtatcgatatctatctaatgaattc
